United States Patent Application Publication US 2014/0057251 A1 - sequence listing, part 74

SEQ ID NO: 115266 - DNA, 1808 bp, Cannabis sativa
ctcaatagtttagggggcattttttacaaccttaaaagtttatggggcatgatttagtacatgtcaaagttcagggagcaaaaattctaattagccttcttcaattatgaaatattcatgtcgaggtagtggtgcctcgagcatgtttatcacattcattgactttttctctacgatcttcaccgtagtactgtaacactctcttgagtctggttggactcttttatttgatcctacacctacgggtgaaggaaatttcatcgtgagatggtagatttatgttggtatctttatctccttctagatggggcgacctatgactgcgttacatgaagactgtaggtcgattattatgaaatctatcatagacttagcggtaacaggtgttgtaccaagagttatcggtagtttgatcattcctttctgtttgattgtatcttcggtaaatccgtagatactcgaagtcaccaatttcaaatccttttcatgttgtaacccaatttgtttgaaagtatgtaaatttaagaggttaacagaactactattatcaacgagtatgtagtggacattgtcgccttcaatgtttaagactaaaactaaagcattagcattgggatgatgtacccatcttgcgtcactttccatgaagtgatgttgttgcactctttcttgaaaagctttgttggcctttcactcaaattgttcacatttgtgagtagtttctccttagctttttttgtgtactaccctttgctttctttgaatccccaccaatgtgcggtccatcgatgatggttagaatattttgaggagctctagagccactcacatctttagtttctctgccctatctatctgggtagtggcttctccattcttctaatattggccaaaatgtccttgtcgaattagttcttcaatttcatcttgtaaaaaccaacattcgagcgttgtatgactaatatcattatgatacttacaatattttttttgggtacctcttattgaaatttcctctaattgggggtagcttcctaaaaatgccttttttttctcttttatagcatagatgtgaccacgtgagagacaaagctccatatagttgacaaattgcggacctcctttatgctttaggaaggtttctttcctagttagggacttagtaaggtttaggctttgttgccttttgggactgcatatttttgggatgcgccgaggattgcatcccttagaacttctagattgggacttcgagaccgtgttcttggtactggagacttctgtttttctttacttttctctagttctgctagcgatttctcaatcctcttgtgaggttttgctatggcaaagaactcaactagggttcctggtcgtcgtgcctgcaattctttccaaaagtgagttatcaacaacacacctgtaataagcatataaacaagcaaaggctctggggccttctccattttggttacttcggtgttaaaatgcttaaagtaattttgtagtgactcacctacatcctgcttaatattttcaagggttgtgtatggcagtttgtatgtcatggttgcatgaaaattgattagaaatatatccacgaatgtctcccacgttgaaatgaatgctttaggtaattggctaaaccaatcatgtgcgttgtcttccaaagttgcagcgagtatatgacacttagcaagttggggtacctgatcaacttccataattgtattaaacttatcaagataattgacaggattagtggtacctttatgttgggttttgtgccctaaataaaaccctttaca

SEQ ID NO: 115267 - DNA, 1878 bp, Cannabis sativa
  modified_base (1847)..(1852): a, c, t, g, unknown or other
aacaaatataaagggaggggagggtgacaaggaaaaaagatttgagacggaccgcttcataatgtattgtagcatcttcagaccaaagcattagtataagaataggtaatgcattacactctacaatctgcaatttcagttcgaagttaataactgaattgtgaagtaattgaaaagggtgaacaaaaatgtgtaaatggtagtgctagtcacctgatttttgttctcgtcattcttaaatgcaagggtccgcagggctgcagcagctgctctctgcacctttgcatcagaaaactcaagcaactcaacaagaggtggtatgccaccttcaatcctgaatacaaatttcagatatatgaaaacaagcatttattgatttacacggacactaattgataatatttttttctttgaagaaacactaagtgaactaaacaaacctgacacgggttttgatgctgctattctcatgagcaagattagtgatggcatcagccgccctcctgataacaccactaactgctctggagttagcatcttttttatgcctctttaacagatcgaccaggtgtgatatagctccagcatcaactattagctgctgatactcgggctgttcaacatattagggagatatattacgacataagcagataaaaaagaaaacaaagcatcaaccgttacctttcattttgccgttaaaatatataattgacccaaacaagtcaagccaatagataatagttgataaataaattagaaaaatacctactaatcttactttgcattttccttgtgaactcttcaaattgatcgattaccaaataattacattcaacaaagtagataaaaccgtaacgagtaataactattaagaaggaaaaaaattgaattaccttaacagcaagaagtccgatcgcaaaagcactatttctctccacttcattctcgtacagccttggcgcagcctcaccacctctagccggagacatcatcagtgtctggagatgcttaacaagaacaggaacagctccacaatccacaataacatttacaatttcttctgcacgaatcacaaaatttaccagaaactcataaaccctaacctcaccccaaaaaaattattagatcgaaaatcacgaaatgaaacaacaacaacaacaaagaaatactgtatattcgatcagcatgaaaaccgcaccgttcttggcgagttcacagagcgcatgggtggcgcgtttaaatgcagcacgatcggaatcagctgaatcaaggattccgatgagagatcggacgtcacggagcaggtcttggtgagcatcgtggggtgcgacggaagagatcttccgatcggatgactgttgatcgagttcttcttggaaatcttggtcgagcttcctctttaagctttttctggcggaggaggtttggttctgatcgcgttccatgggaggctggaggaagaagacgacgggagaggagatagaataggtttacggtaattttgggccttttatttttgacggcggcttttgagggaaatattgaagcggggttggttactttttatataaaattacaatcccgccaaagttttacatatgaaaaattctaaagggcccttcccgccctgccatttatgaattgaatctctaaacgaatgtcgttttagttttaatcctaccttcagatactcagctttataactatccactcaatctttttttttttttttttatatagataagagttttatttgaactttataagtacactttaatatagtatactctaatacacttaaattaattttaaaaaaatcaatcttaattttttttttaaaaaannnnnntcatattattttatattaattttaat

SEQ ID NO: 115268 - DNA, 2773 bp, Cannabis sativa
tataattaaaattataaattattcaactcttctttattgcattgtcataaactatatgcatatatcataaaatcatagaattggatatcattaaaattataaactttatacatataaaacaaatatatagaatatgatatagaatatatagatattgatgattagtatatatatattttaaatatttaataaattaataattagttagaattatagatattttagtatttttgttttattattatttatcaagtttgaatatttttattttcatcattcatatatattttcattttagtttgttttgagttggtcaattaataactatataaaataagtttttgttgttttaaaaaataaatacgaatgatttttattgttttataggtacataaatattattttttgaattatataatccatcaatatttataaatttaataaaaaatttaagaaaaataagagaataaaagagagagtaaaaaaagttattttgtgtgattttagagtgtatattacccatcaaattaaaatgagagcgaagttataaaatcaaactagaattttcaatatataaataaaaaaatttagaaatagaaactctacgataataaataactaaatataataacttacgggcactctataaaccaaccttctatgattgatcttcatgatatacgtgttgattattggtaagatattaacatatatgttgctaagtaataatattttaaaaaaagtaagatagcaaaataaatattgtttattatttattattattttgaattatgtgatttttgtttatagagatttatatttgataagaaaatcacgttatttttttttttttttttaaaaatagtttacttcttttttattttaatttaaatgtgtaatttaaatgttgatatcgtgaaaaattacacttacaacttaaatagtctaaacttatataataattactctttgcataattgttaagaaaaaaataagtccattgaagttttttaaaactttacaattataaattcagattataaataaaagacatcacttcaagagaaaaataacttgaaaatacaaagtaaacttgttaatatttacgtagccactaattgatagtttgatactaaacaaatatgtgttatccacacaattaatatgaagcataagaataaaataggaagattaatactaactttgctattaaaaaatttattgctaaagaaattaacttttgaaaatctttgcgctaatagaaatttattcggtgttaaaataataagcaccgggagatagttagaagaagtataattcttatcaaagataaaataaaacataccttgacatatgatgcatgattattaatcctcatcaattgactattcataatagaaaactcccatgcatattgcattgaatggggtaaaaaagaatattataaagattacacaatcataaataattaaattaacttattaatttaggtagagagacgtggaggaagaaagcttagatagatttatagggttatgttattatttatttattatttatattgaacaaaattaagttatggaagaagtatatttattatagaatttagatatttatataaatatttttttaattaattaatcaattaatatttataaatttaataaaaaattaaaaaaggagagaattaaggagataatttatagaagcatttagagagattttagagtgccacatcaccgcctcatactagatactatggaactgatattttcttggaaaattttatttactagtaaaaagaaaaaatcctattacaaaaaataaaattctaattatactagaccattttattctaataattctacactatacttagaaagtttaaatttaatttgtttcaaaatttgaaaaatatctttctctctctctatctctctcacattttctaaaagaacttgacagttagcttcattgtttgtttctcgcactcattttctccattgatagtgacactccgtctccgtctttgtctctttcattctttttctccatcggtagcgacactccattgacgatggaaggtcgaagacccgaagaccctaagattgaagccttacatcgacgctccatcccatcctccactgttgagacatctctgtctacccatcgacggtcgacgaacgaatattcaaagacccaaagacctaactcgtggaaatccaaaatctcgtctttcgtcgccatctataatttgtcctccgctgccatctaacccgtcaaaactctaaatccccagatttttttttttaaaaaaatcgttgttagtttaagaaaataatatgtttgattttttttttattgtggttgatttagattgattgttcattttttgtgttgaaatacacttagttttttagttttttttttgttttttttgagtttttggtcggatttatatggtggttatgatattttttaatatggtaaggtggtggttgagaaaaaaatagagccgatgtagtgttggttgagaaaaaatgaaactggtgtttgttctcgattaattatcgacggattctcaataggttatcgataagatttagcttttatttttagtcattatgtttagatattatcgactaattatcgatacgtgttatcctcaaaagtgagtgttttaatatttatactcgcaagtgcacgaatcgtttcggaatataatgttcatgtaagtgcaaggtcgaatccatgggagttgactaacatcaaa

SEQ ID NO: 115269 - DNA, 2839 bp, Cannabis sativa
tccaccctagaaataaaagctctacttttgacctggaatactctttcactttcgatttttattaataggaagatgtcagagaagttctcgccgactctacggattggcgatttgagtgatttcatagctccgtctcaggcttgtattgtctctctcaaggggttcaaatcttccgccgcgaataagtcttctgatatatctgaggtatttaaaggtttctctctttatcaaattcttttagtaataatatctccacttactacatctacatgggttggaatggcttttgggaattaagattgatgtgctatttttgtttactttattttgttgtaattatacacatttattggaatgaaggtttcgacttccaaaacccaattgaaaacagacccggtaaaaatttcgttgaaggattgcttagcatgcaggtgattaatctcattctcagttttctctttcaaaagtctttctttaagtttaattttttgagttatgaatagctaaatgaaagattatggatggttaattagttatatgaaagaaagtttttgggttttttttttttttttaagaaaaagtgaattatcacattttgttatttttgtagtacttaggttattaaggaattttgtacgttgcagatacaagtcccatgatcgagcttcagtaaattgtttgaaatttgtacctatagtttccctgtactgatggtttcatgttcttggttttttgatttgctatgcagtggttgtgtcacatcagcagagacaattatgttagagaaacaaagtttggatgagtttctttctaatattgataaagggaaggttattattatttccatatctccccagtcaagagcttcacttgcagttcattttggtatttcaccaattcaggtgagggcaatttttccttttctcgagttcggttagcaaactttcattctttgttttgcttgagatgttaagttcaacttaatgttaatgtgttatcacttaatgtaagacaatttgttaaagcgttcctattgttattcttgtttgatttagatacacaaataaactatttaaacgtgaaaatgtgtttagctgcaataagtctaacactggaaacttattttcgaaatttcaggtacttaggaaactaacatcattttttaagtcattgagtgtaaaggcagtgtttgatacaagttgcagtagagatttaaccctgattgaatcctgcaaagaattcatcacaagatacaaactaagccaatcagttgacgaaagatgtaaatcttccttacccatgatttcatctgcatgtccaggtatggtttgaaactagtaattctgggctcatcttgtacttttagtttgtttgtcatattagagagggataggataaacttaagaaatattttatagctcaaaatttttcacatacatttcttgcttaaaaaacttctacaatttttttattgaaattctgcatcaatattctattcttctgcaggatggatatgctatgctgaaaaacagcttggatcatatattctgccttatatttcttcagtgaagagtcctcagcaaacaattggagctattgtaaaaaatcatctatgccaaaaaatgggtcttaggtaatttatcctttttttgactctttggttgtaatttactagagagctttattttgtcatatacttgtgtgaatcatgcttacaagtatttaattttccaatcttaatccaataggctggatgagatttaccatgtaactgtgatgccatgttatgataagaagcttgaggcttctagagatgactttgtttttcaagccgagtctcaagccaaaagcaacgagggtgaagctctcatggtttcagaggtagattcggtgctgacatctggggaagttctagaactgatacaggtctggctgtctttcttcttgttttacattttttctgctgtgacattgtaagattttaaaaatatgttaacatgttgtattgacctattttcttactgatcaacttttgtagttaaaaggagtggactttaaaaacttggaagattcacctcttgacaacatgtaagaattagaacttggcctctttcacctccaaatacgcgcttgagttcttatttaaaagttgatcatcttcctgcaggctgacaaatgttaatgatgaagggcatatttatggtgtccctggaagctcaggaggttatggagaaacaatttttagacatgctgcaaaggtgttgtttgggaaaacaatagaaggtcctcttgaattcaagactattagaaattcagatttccaggaagttactatggaagtaagttaagaaagttcaagttcataattgaaacctattatgtaatctcttaggttgtgattgtgtgtattgttacacgggcatgtgaaatgttaaatgtgtatagtcaaagaaaaaggccattagaggttctggagaccattaatcagtggttttatagggtttagatgaacttatttgctttagaattttgttgattttcaacattagggaagtaccaattgatgatctaatatattcatccagctttccattttggccgttgcaattctttttgaagttcttagggtgtacacttgaatttctaatttaggcaactccttgtttacatccattattgttctgctctttaaacaggtggaggggaaaacagtgttaaagtttgcactatgttatggttttcggaacttgcaaaatgttgtaaggaaaatcaagactggaaaatgtgattaccatttcttggagattatggcatgcccttcaggtttttcttcttattt

SEQ ID NO: 115270 - DNA, 2091 bp, Cannabis sativa
actaaattagtgacaacttgtaatcaaatattatgttttaatcacaaataacatttttttgtgactaaatgtgacttttagtaaaaaaaattatattatgactaaaaaattatcactaaattagtagcagtttttcgtagtgtatatacaagtatgagtaaaataaatattattctttcttgaactaaactagctcatataatggagttaacttttaataatttttctacctttcttttctctatttaaaagaaaattaaataacatagcttatttaatgtaattgcattttcacataattctctaaaattaactaaagagttatttttactcatttaaggtagagcatcattttatgtttttcgttacatttattaaatgtttaaattacacattatgtatattttatatcaaccatacaatttaagtgatatcattcataccccccaaagaaaagtgatatgtttcatacttaatattatttattcctcaaattaaatataaattattgtgtgtaaaaaatttgtgttaaaacaaatattttagtaaaatttcatgtaatttattgattagtatattaaaaaagagtctttatttttacactttaaaaaaaattattttaatttttacaaaaattcatatagcaaaccacttagtaaccaacaaggaaataatttaaatcgcaatcaaaatatacatagcaacctacataaaaaatattggagcaacacaaattgtaaattaaaaaaaataattcccttattaaaaaaaaacatgcactattgaaatttgattttagaaccgtaaattatttcgatttttttgaaaaaaaactaataatatgtcttctataattataatgcaggtcattatatacaaaaattaatcataatttcttatatgtaaacaaagacatcctacaagtaaaagcaaaaatgtaatatatactcctatttatgaagcttcaatatttaacaattagtatttaaaaatcaacaaccctagtgcatgaatggaggctatcaatatttaatatttaattgtttggtcatattaaatgtgttgtttgacatattgagtctaggaaaatgacaaaggaggataatgatgggaattaaatatagtaaaataaaaacatataaatatgaaattttatatgcaaagtaagatgagaataaaggtccaaatgcaaataatataaagatgtccctaccaaattgaaatggacaataaaaaatgccaaaattgtacatcaggctagttactgcacaagaaaaatttatgagaatcgtaaagaggcattaatggacatttactgcgtatttataagttgtttaattataatattaataacactattaattagggttcgattgatacattatatattatattatattataatatatagaattatatatcatgttgggttattgtattgtatacgtttatttaatgtaatagttttatgtttgtaattttttttttttatgaatcagaattttcattactctacaaaataaatgcttttacaatctataagcacttattaaataggccttaactttagctatacaatctacttgtaacaaatcaaaccaatttttatctttttgtttaatcttttggcattacagaaactactctactctttatactccattttatttgttgaatcacttcaactatgcctgttttttttccttccacaattgctcattccgagccttccacagcaggtatacaagtgctgcaacaccagctgccagcattctttttttgaagctggaacaacttgctttcctcacctttctcatgatagtttgaagtgaactatctcttatattccatccaaaccaggtcttcacctgttcgaggcaatctgcagcaaaaacacagccaaaaaacagatgatctgctgtttctgcagcagagttgcagaagaggcatgtttccatgtcgatcaaaccttgcttgagtaattgatccctagttttaagcctattcatcatagctagtgtaacgccctaatctataggaacgccacgtgtgtgattttataaaactagtttaatactaatatattaatta

SEQ ID NO: 115271 - DNA, 1825 bp, Cannabis sativa
  modified_base (1786)..(1786): a, c, t, g, unknown or other
gaaaagggtgttgtaaaaagtactaatacaaacctgcattcctggtctcattataagcacaggtctcccaagtcgatcatgaaagtttgccttggacactttgccagtctcaccttcatgagctacttcactctaaatggaatacaacataagaacacaaaagttaacaaacacatattctcttctctataatgatataaactatcaaagtagtaaaaatttcttacccaacgaatttcctcaggtttataagtagccctccacttaagtgactcttccaacattttctttgacttgtcaacattccagttcctagcatccaaatatcttctaaggcatccatctgtacagtactttaaacttcgtccacttaatgagccaagagcctccctgagttgcttgacctgaaagtagaaattgaaatcgatgagaataaattgagccataacatactaaaaaaataagtaataataagtactgaagatgcattaccttttcctccttttctgcaacctcatccacatgatgattctgattatttctttttataagaaacatgttcacaagaactacagcttaacctgaatgaatatgaattaattaagcctaagttagacaaatgcataaacttatacatatatcatatgctattacattattgttcttttttcctatatcttatttgataatatcaaatacaatttctaaacaatggggtgtcccattcccattgactctatgagtctatatactatattccctttgttcgtaatcatatgtaaccgtggtccaaataattatataaaaaaatgtacagagtacagactacagtacatacatttaaatgaaattattcatttaacaaaataaaatattttcagtttttcacaaccaaaaaaaaaatctaacggttgagataaggcaggctgggtcccagccacccctcttgaccagccaatgctggaagaaaagtcaagtctctccattaccaaaaaaaaaaatctattcaaaagttcaaagcgtttactttactttcagtaatctttttacagcgaaaatatcaaagactgaaacgcaacttttgatgtcgttttggttcaattttgaatgcattgttttataataaataatcacaccaaagcttcttttcatcgctattgtttgagtattaaaaaatggaaagtgttgaaagggagatcacaacaaagcaaaataataataaataataatgataatattaattttttttttgtatattatctcaacctgttgttaaacaaatattatcagaggttgattaaatcaaataggttaataatgatgaactgtaccattatcataattcatggacgaaattaataaaaaaatagagtaaaagttatggaatattatttgtgatcccttgggattctccgaacccctaaaacatgatccaagttcatctgtacctaactattaatcatattacagtaataaattaatccaaccatgatctaaaattaaaaagaagaaatcaaatacagagaagatgaagaaaaataaaagctataatcgagtgagacggatctattttaatcaaaaccaagttaatctgatgacttaatacattacaaattcagagaaagtaaaccaaaatatatgtataatgatatgaaagtgatgaatattaacattacctgggagatttagcagagagaaaaatccggaagaagagaagtggtgtaactgtaagccaacaaaaaaaaatcagaggtatctgattctgatatttatttatatatatatntatatatatatatatattgggatggaaaaagagagagaa

SEQ ID NO: 115272 - DNA, 3304 bp, Cannabis sativa
tttggagttcctagttcatgaccatttttgccctcttgaaaaaactgaaatggtgagaatcccaagtcaagaggaggtccgacagacacttttctcgatgagtagtttgaaggcccatggtccagatggcatgtcgtttctctttttaaacactattggaatacgatgggcaatgagttctgtgatgcagcgatggagtttttcaattccgggactatgcgtaaaggcatgaactcaactaacgtgattctaattccaaaggttcccaacccaaaaaaggtaacctagtttaggcctattgctctttgctttgtattctataaggtgatttctaaaatcattacaaatagaatcaaacccttcctccccagaataatttttcctactcatgcagcttttgttcctggtcctagtattcaaggcaacaatgtgttagtcaaggatatcatccattcttttaagtgaaagaaagagaaggaaggccttttcacgattaagattgatcttgtgaaggcctatgataaactgagttagcaatttatcgatcatgtgcttcacagcttcaaatcccctaccattttctgcagctgggtgactcaatgtgtgtcaacgtcatctcttaacatttgccttaatggagtttcagtggggtaaattatgcgtgagtgtggaataagacaaggggaccctctttctcggtaccttttcatttgggcagcaaaaatcctctctcgtcttttggaggatgctctagataaaggcgatattaaaggtatcaagcttagcaagaatggcccctgcctatcacatcttttagttatggatgacctgatattgataggaaaagaaaatgttgcagaagcaaaggggttctgggactatctcaaaaaattttgcgcctagtcaggccaacgagttaataaacttaaaacatcaatctttttttagaaaaaatactagtgagggtatgaaagagacattaaggaggtttaatggattgatgatttgggtagaaacatcaactgcttgggtctgtctctcatcagatcgtgtcaaaaagatgtggactttaactttgtggtggagaatctagtatcaaagcttcagggctagaaagttaaaaatctctcgaaagctagtcgggccactttcatcaaatcagtcgggctagctcttgcagtttacactatgaaaactacaaagttatccaagagaatggctttcaaggtggattggtttggttagacttctggtggggacataaaaaaggaaacagagggctctatttaaaggcttgggacaaggtttgtctctcgaaattcaggggtggccctagtttttgaaaaatagtggagatgaatcaagccaccctggaaaaatggggttggatgctcatcaacgaaaattagtcgctctgctgtaaagttctcaagccctagtacctgaaagactccattcatggaatcctcacctaaaaattctgattcttggttttggaaaaatgttgttaaagctagaaccatactgaaaaggggcttgtaggatgatctccgatggaaaggatactatggtttgagaagacccgtgggtaatccatgggaaagagttcattcctacccctgtggccaactgcccgtgtgaggttaacaaggttgtagacattcttttggattcaggagagtggggacatctcaaaactccattgcctctgtgattcaaaagatagtgagtaatatcttgaaagggggtaagccgagcagtcaaggaaaagataagtggatttagacattggaatgctcgggtaattgttcgttaaagtctgcctatttagcccaagtgatggagcgggcccctcattgtaatgtggccccttctctttggaacaaattgtggaattgtaaagtgcttgagagacataaggttctgtggtgcagcatcctttctaatgctctgcctattcgtactgctattgcaaagagaatgcagatcaacgatactgcttatcccttgagtggggtaggggaagagacgatggaacaccttttccactattctaattttgcatactacttatggaaatcctccccatggggcttgatgccgattatgaatttaggtgggcatgtttgggactgggtcaaaaacctttggggcttaaatcaatagggcgccaatgttgaggaagtgtttttgtacgcatcgattgtggtagatactatttggcgagcccgtaatgataaggtgcacaacaataatctgagttgcatcatacattatattgactctatcattcgatgttatgctaattatggatcccaacttttcacttcccctactactagagctgctccccattggtcccctctgctggaggactggatcaaaatcatcttcgatgttaaagtgggaagttcatcgatgagtgttgtggctctggctcgggatcacttgggaactgttttgtgggttgcttccaacatgctcattttctgtgatgcccttattggtgaagttgcagcttgccatccaacatttgagacagcagtgaaaaggaaacacaattttgtgattatagagagcgactccgagacaattatcaaggctttgcaaaggaaagtttctgtctggagcattgataattatgttttgaattgtaatagagtctctagacaggtgttgagttgtaattttgcctttatccctagacttaatatttttgcggctcacaatatagttaagtgggtttttgcccaaaacttaactggtatggttgatgtgccaactatcctaacggatattatttgtaatgatcataaggtctaactttttattttagtaatgaactttaaaaaaaaagaaaaaaaatctctttttggcatgtaatccctcttaaagtgtttcaatcgcctttaaaaataaataaaagtaatatcatataaagtgaaaagataaatagttataaacaagttcttctggcattaattttttagcattcttattaggatgttagtattatttagaagtgacaccttataattggtgagtaatatttttaaaaaattattatattaaattatatgagactcaatacataattatagtaataataatataacaaaaagatgttaaacataattatacataattatactaacaagattgcttattcagaagtcaaaggagaagggatttggctttcaccctctttggatttggattaaaatcctatatgggcacatatgtataatgtatatgctattataaagtgtgatacaaaattaagtgaccaattatgttatgggta

SEQ ID NO: 115273 - DNA, 1927 bp, Cannabis sativa
gccgccacgctctggggatcgtcgcttatccggacgttccgccgcttaggttttcgaattgtggccggatcgatgtccacaggctgcatcgcagcaatcttgtacatcatttccttcatggctccaagctcctcttcctcttctccttcctcctgatcatgatcatcatcaccgtgctcatactgatcgtttgcctgattttgaatattattatcctctgcttcatgatgatgatggtgattgtgattatggttagtactgatcatgttcaaaagagatgatggtgtttgataagggaaaaagctgagagaagaagtattatgatgatgatgatgatgagcagaagtggtggtgggagtttgatgagtatgattattatgggaagaaaggatattgtggtgatgatgttccatggcggccgtctgtagatcccaatgaggtggtgaggaagagttatttgaagtagtaataaacagcttattatcattataagctggagtgtggttattcatgtccatcgcatatatgcctcgggctttgagctttttgtttttctcacttatagtacagaaaatgaggagagagagagaattattaaaggggttgcttgaagttgttataatatataagatatattttataatttttttctttttatctacaaattttataattacctgaaaaaaaaaaaaatatctaattatctatgactaattatgatttttgttgcctaaattttaacatgtattaaattatgatttttaaacttttttgtctgttaaaaattttctctgaaatattgagattgttaaatttaaagatttttgtgtattttgattcaattttactattttagcgattgtttatgtatgaaaacatactttccagacattgatatcaacaaatcacgcccttcgaactttgacatgtatcaaatcatgccccttaaatttttatctacgttagactttttttttattattaaaattggacaaaaatccttaaattcaacaatctcaatagttcagatgcatttttaacgactttaaaagttcaaagagcatgatttgatacatgtcaaagttcgagagacaaaattaacactcattagtcattatctatttatgtgatgatacacatagtttattgattctacactttctcttcttataattagagaagggttcaaattaaaatcctctaccctgatgtaaaaaaaaaaaaaacaaaaaacttgtcctacttctctttaacaactgaaaacacaataaaagtgtagcacttaaaaaaaaatcacatgcttattagcattactattgggcacaagtagtgtttaacaccttctagacgtgtcgtcttatacttgactaacaatacttcttaaaaattattacattaagttatatatggaacccgataataattagacaaatagcaatattgatacttaagaaggtactaaacatcactagtactatttctctattttatatgtgcagcattaaacaagctttaaatattaaatttattttgggtttagacgcgtaaataggtaattagaagctcactattttgccagaaagcctggtgtatatccgtactggtacaggtagtatttatacgttaatcttaaaatgtttatctatttatttatttttgtgtgtgtttttcatgatagtgtttattgtagtaaaagtaagtctccagtatatatttgaaaaattgtgaatatttaatagtaagttctaattaaagcttgttgtatttgtgctcttttatgtgttttgtttttcatacgtatacgtatgtgcaaaaaacattcaaactctatttttgttattctttaaatatttaaaatattttattataaaaaacaattacttttagtgataaatttttagtcacgaaatagttttttttttttttt

SEQ ID NO: 115274 - DNA, 2758 bp, Cannabis sativa
atgaaacatacttgttagtaaatatagatcctggtaaaatttttccaacacaagttggttccttcctttgaatagtttcttagaagatgacgatactagcaacattatttatgagtttgctaaggaagaattaggccgcctgggtaggattagttttttctgcatgtcttatcttcatgatcctttcggtaggtattccttacgtttctttcatttctttttgcagttagaccaatggatgccatctttgtctccatggacgctctgagtctcgcaaaaggcaacaccatctctcttgttgatttttcaagagtcaaaatgactctaggagcttcgggcccagaggtcgtatgtgtagatgataaggaaaagttacccctagaggagcaaaataggaagaatgaggctggtgactctgcatcttcaaagaaactcaaggctgctaaaattacttcccacaataccggggactcacgaacccctcctgaagctcatacttttccaggtgtcccatccattcccctaactctcattcatccggatgagggggatcagtaacttaggatttctaagcaaaactatgttgtagatgaacagaccaaagagaatgcagaggtagaggtcatgttaaagtggttgatggagaaccaagacggtttgctccggggggagtatagtggcccaattcatgaccttaacatggatcccatgacaaactaattttcaagcttcgtggggtcttccttagttcctttcgcttctgagttgatgggtgattttgcttcggacttggttcaacttctaaccaagagttttgccgtctgtgcttcctccaacctagtttgttaggtctaggacgtgagcatgaatttgacctcagtaagtccctaatcatgcatattccatttacttctcaactaacactttttttgctaaccttagttcgtgaaattggtcagattactgttgaagtcagtcgtctatccaagactttgattgatcacgggtttgcattggctgaatatggtggcgttgatgaggctcaggctctaaggaagctcaacgaaatggacacgcatgaggaagcactcaaggatgaggtcttgacagtgaatgctttgcaggtgcgggactagcaggtgggcggagagtccttgaagacggctcaagaggaggtcttggaactctaggacaaggtaaagaaacttgaggaactccactagaaggatctcgagaccgcatgcaaaatgtttgttgagcttgaggagcttcatgacttttgagagaaggctaaattggaggctgtcaaagctgccaagaaagctctcctggctcttgtcacttgtgagaattgtgtgaggcgctttgagcacggtgtcttcatgacttggaggtccaacaattatgagccttagttcaactttttatccgaccctgaggctgttccggctcctttttgtgggaagaatgtgaaatcaaaagccaagctcatgaagaccttgggtcctcgccttccgcccagaattgactgatccaccatttatctatacttaattaattaattaatgattttttgtacttttggaagatgtttatctagactatctctgaggctttcttttacactaggggagacactttattggcctgtctccaagggtctctttttttgagcaatgtatattttatgagttatttatgctctataccctactactcccctaagtgactaaatagtttgttactttttgtcacttttcacgagtttaaaaggatagtgtattatataaagggtcttaatttacaataggtcttctttgattgaaaatttaaagaaaattaaatactaaactcctaagtataatagtatttgcggagatgatcaatattccatgctcttgagattaaggaaccatccattcatttaagtttgtaggtcccaaagtctatttcatcttcagtatcataaggtccttcccaatttgggcccaaacccccctccaggttcttctgaagctgaaagaccattcttaagaccaagacttctatggagaattttatatttttcactttacaattaaagtgttttgccacattcctctgatacgtagcaagtcgaatttgtgactcctcttaaagctcttctacaagatccaacaattcttgcaataatgactggttggtgaccagatcatagttggttcttttttgggagggaaatgttctttctactaggaccattgcttcagattcgtataccataaaaaacaaagagtgttctgtggtgtttcaggtagtagttctgtaagctcatagtactcgcggcaatgcttcaggacaattattttttgcaagctaggagcttttttttgagtgtgacttttaatatcttattcacgacttctacttgaccatttgcttatggtcttggaactgcggagaagctttttacgactctgtactttttgcagaactccatgaatatgtcactgtcaaattgcttaccattatctgagactatcttatgaggcagtccatatcgacaaagaatgattttttatcacaaaatctaggcttttttgccgtaattgagttcattggttctacttcggtccattttgtgaaataatctactgcgactatagcatgcttgactccaccctttctgacccaatcatatatatacctcacactataaatggctacgagcttgtcttcaacgtgatttcatttggcagctgttggaatttattttacc

SEQ ID NO: 115275 - DNA, 2811 bp, Cannabis sativa
ttgccccaagcgcaaagatgcttactacattcctcaacacactccctttataccctcatattttcaaacaactcctctttttcttcaatgtgggactttttctcctaaatcccagactcagctctttcatcacaattttttatttaataatttttataaaacacaaggtccaaaatggtatttactagttttatgaggtcaatatatgcacggaatgaaatatcaatattttcggccaatattcccacaatttttttaagcagtatatatacctctaaaacatcatatttgttaaaattttcttaaatttccgtcgacatcaaaattatctccaacatttcctataataccgatattttttttctttgatcgcaagataagcatacgtatactcacagggcaaaatcggtccaaaaccataatttctccagtaggatcaatatcccatcttgcagaaaggcactccattacaatagatcttgcaggcaaccatgacttggcatgaaaccgaagactctgcataaaccagaagaaaaattagtatgtcatcaactagaggagcctttaatctactctttaaattgtctagaatctcacatctaaaaattcaccacccgccaaagccatagctttctgaaaggcttcattctcctttgtagaagattggtcaggatcgatccaatccaaatttaatcttccaactcttgaagacaaatgtgtattattgacgtaccgagcaggctgatctgtatcatactggttaatgccattatcaacagcatcaattgcctggtaccaaaacaaaagtattaatctccatagaaaatctccttgtccaagacttaattaaatcaagctaccatgaaagaaattgatgaaaactccagaaatatcatatcaatacctccatgaagcttttgtaaattgccaaaaatagcctaaacacatctgggtgctcttcattaacttgaagctccttggctataatctcctttccaaaatgctacaaataacaagaaaattcagacacttccattgctccaaattaacaaactaattagtagaaaaacttatagaataccaaacgctaataccaatttttcattgaaagtggtctggtttgttcatctattggttgcccccacataagttagtaagattatgaaagggattgaccaaaaaatataaattttattagcaaaagaaaactgcaaaattagaaaaatgacttaggaatgcttctatggtacactccaaaaatgagtttagtgatgcatccctttcgtgttttgatatccaaatagttataatatcaaattttgttgtataatcttgcaaaattatgacaaattcagaataatttacaatagaaaaagtaagattcaaacaatataattcacatgtctataaaataaaaggatcaagcatacaaccaatgatttgaaccttgttttcggtaaattaaattattcttctaaatttctagaaagtttgcaagatttgtcatataaaaaaattaacatacactttgaccaagtgaaagaaacaatgaaatataaccattttgctaattttcatttctgatcaaagtaaacatctttaatatattgtcttatgcaaatcacatttaactttgacaaaacattttgcattgaaaatctcatctttactgattaatagtatcaaaattgatacaaaatttaccttataaacaagaccagcactacttagcttggtagaaaatccatgaccaaaaacctcttgaaaccctttctggtgatgatcataacgatcctgactagggtcataaacaccaccaacatcaagaacagcatccaaactctccaaaacctgaaacccacaaacaaaaatcaaaaccccttttccccaaatccccaaaattcaatcttttccattttcccaataaccaaacagaaaacgaacctgaggatcacgagagcggacgatttcagcattggagaacttatcagtgaggcgaatcatgaagcatccgagggcttcatcgcagtgaaagcttccgttgtgagtaccaacccgcttagtgagctgtggagattgagtgggagaaggagacccagttgagaaagccatgagagggaggaaggaatgtgggttagggttagggtttaggttgagatgggtatgtatggaaatgggttgaagaagaagaagacgaagaggtctttggaggttagtaatgggtctgcaactgaaggagcttagtagtgtgagcattccttgttcgaatcaaatactcaaaaccccccaaaaaccctttgccctgccctcaataacttattattattattattatccttgaaacttggtgtctacacatttatttattaaaagaatactaattacaatctcttatctcttaatcatcacgtctcaaatcacgtgttaatttttttttatagtggtaatcgttagagttacaatatcatctttatatatttttgaaaaatttcgattagtttacagtactgaaaacagagttattgatatttcagtttactacgcgtgttcaaaaaattttaaacgtattttcggcattgtaaattattcgaaatttttcaaaaatttacagggatgatgttgtaagcataacgaatacccccgtgaaaaaaaaatttggaaaaaatataccgaaatgtgttttcgagtgtggaaattgactaaaaagttataatagaaagttaacagtagcactcttcttattatggtatgttttatctaaatacaaattaattattatatttttaataataattatttaatatttattaa

SEQ ID NO: 115276 - DNA, 3045 bp, Cannabis sativa
cctgtaacagaaactcgatttgtcaagttgccagaacattactcatgttgggttatcttcgcttacaaatatagctggcgaaaatcttgaggaactcaccttatcatatgtctctcctgtgagtcttggtactttatatctgcactttttaatagttgaatgtttctttgaagcctaatcactctttgtaatttgcctctggttatggtttaggtgacttctgttcttgccgatagcttgagagggcttcccatgttgcaaacagttaaattggatggttgtctagttactagtgctggactgaaagccattggagattggtgtgtatctttgagggagttgagcttaagtaaatgttctggtgtgactgatgatggtctttcctctcttgttatcaaacacagagatttgcggaagctggatattacctgttgccgcagaatcacttatgtgtctattgcccacattacaaattcatgctctgctctcacttctctcaagatggagtcatgtgctcttgtttctagagaagcatttgttttgattggacagcgatgtcgtttcttagaggagcttgacctaacagataacgaaattgatgatgaaggtttgtcctaactctaattttgtgtcgagaaagactagtatgttgagcaaataactcaaactttgtttctatgtgcaggtttgaaatctatctctagatgctctaaactctcaagcttaaaacttggaatttgtttggacataactgataagggagttgcacatgttggtttttcttgctctaaactcaaagagctcgatctatacaggtgttaatcatttttttttctcttctctttgatgtagtttctttgtataggttacgtttttatagtttctcaaatttcatatgataatatagaaaaacaatttttggattttcattaggattaatcatatgaaacattgttaaccgaaaatttatcttgtttaggtgcacagatattacggattctggcatttcagctattgccagtggttgccctgaccttgagatgattaatatagcctattgtaaagacatcagtgatgattcgttagtatctttgtcgaaatgctcaaggttaaacacatttgaaagtcgaggctgcccacttattacatcttctggcttagcagctattgctacccaatgtaagcagcttgtcaagctagacataaagaaatgtttcaagattgatgatgccgggatggtttctctggcttacaattcccagaatctaagacaggtatgcattttctttcattgatgattccgcttacataattttcccagaatctaagacatgtttgttctcttttattgcttttcagaatatgcacaatggatatcattgactcagtatgtatgcctctcgtgatctttttggcagattaatttgtcatataccgcagtgacagatgcaggacttgtaactcttgccaggattagttgcctacagagtttgaccattttgcatttggacggtttgagtcctggtggaatcgcccttgccttgttggcatgtgaaggcctaacaaaagtaaagcttcaaacatcctttaaatcattgctaccgcaccctcttctcaaacatttagaaggacggggatgtgcgattcagtggagggataaagttttgcaggtaggattggttttctctatggtgtcgtgagggccacaatatcataccattatagtcaaattgtttgtaaaaattaaacacattgttcatatttacttgactattttaaccagtcatgactaatgagattactatctgtgatttacaggctgagctagatccactgtgttggaagctaaagttagaagacatcatgtactaagggcacctcacctatctgcatgtttttgaagagttttacctcgccatggttgcgtggttccatggttcgatgataataggtagacaataaatgtaactcaaagaagtagcagcctcatcatggttcgacaagggcaacaactgtgttgtgttgtgttgtgttgcagtgagagctgtggggacattttttctattccatttttcaagtctttaaatggtgtatactccccaaaccaatgagtaacttttattatgaaatgaattctagtttagtttatatcatgggaatgagttgtcaagtttgtaaatatagtactaaatactaatagtaatagacattgtatgtacaatcgtaaatgcatatatataataaattttgtgttgagttaattaaatacttataacgttaatgatttgtttaaagtttaaattggtatctgagaagttgttagaactttgatgaatattttaacaaaatatttatagaagcgttttagtgtgtgtgagaagtggaaagagtcttatacgaactcttatttataagggtatatagaatgtaattttggcatttgggtttgagctctaaagagtatttagttttgtgcgaatgggtaaggactcactacacacgtgtgcaatgtctgtttgatctagactggtgtgacattttattattttttataaaaaaattattttttattttaattgagaattatgtttaattgaaactgattacttagtcatatattatcggttaatgggacatgttcaaccaactacaccctacgattcagaaaatgttcttcttgttatgttattttaatccatccatctatataatgcgattgaactaatgagaagaatacatttttttcatatcgaaaaaaatacaattttcacaaaaaaacttccatttgctgtatcataaatttttgggtatattcgaaggtgctctacagtgcagtgagattccgatatagtacgattgagttgttttatcttagagacgaccagtaaattgcaactgcttgcacattcttgagcagtaccgcaaacatcttaaaaagaatgacctagtccgcaactcaattcaaaattttcattcggtaatatctttactcattaatttttaggctaattagtaattttcccccgaactttgacatatatcaaa

SEQ ID NO: 115277 - DNA, 2238 bp, Cannabis sativa
cactttacacctatggatccactttacacatatgttataacaccagtaggatatctcatgagagtggaggcaaaagcaaggcatccaaaagttttcagattggtgtaatcgggttgtttgccaaaaagaacttcatggggggttttgttttgcaagttaggtgtgggggtgcaatttataagaaaagtggctgtcatgacacactctgtccagaacttaatggggactttagcttgaaaatagagagctcttgcaacattaagcaagtgttggtgctttcgttccgccacaacgttctgttcaggtgtctcaatgcaagagaaatcatgcaaaattccatgtttggagaataattccttgaatgtaagttcatgagcattatccgatctaaagtatttaaaaatacaattaaattgagtctgaatgtaagataaaaattgtggtataattgctatagcatcagatttttgctttaacaaatatatccaagtgaatcttgaatgatcgtcaacgagagtgagaaaatatctatggtttgaatgagaagtaatatgatatgggccccaaatatcacaatgaatgagatcaaaaattttgacagcaaagttatgtttatttggcaaaggcaactttctttgttttgccataggacaaacatgacaaggttcgtctttgcgtaaatctttagtattacatttcaaagtatctttaagtaaatctaaacatttatgagacaagtgaattagcctagtgtgccaagtagcagcagaaatagaaaaaaatagatgcatcagctggtgttggttccaaaatgtagagtccatttgtggaatcacctctgccaatcatcttcaggctgttgttttcctgcatgtagaactcattagcatcaaattttatggaaacatcattattacttgagaggcaacttacaaatatgatgttgtatgtgaaagaggggacataaaggacattatgtaggacaaggttgttagataaacaaacagtcccatgttgatgaaccatgatattatcattgttaggcaaaataagtcttataccagtaatgggataaagactttgaaaagacttaatattagaacaaatgtgccttgtggcacccgaatccacattccaagaacctaattttggttgtataaagttatgagatagaacaataccagagttgcctgttgaggctccaaggtccgaattcacactttgctgctgcattgcaagaatgttgagaagttgctgatattgtgcagcagtaagttggggaagcatggtgtgattgtctccaatagaggcacagttttcagtcttggtttgaacttggtttgctgtagcttttttaggtttattaggcttgttataacctggtggatatccatgtatcttgtagcatttttcaatggtatgaccatgaaaattgcagtgagtgcaaaaaggtctgcctttctttggtggttgttgtttcgaaccatgattatctttatatcctgcagctttttcaccatggaaagcaaatgccacattaggattaggatcagaagtgggattatggctccttctttgattttcttcttgtgtgacaagatgaaatactctattgatttctggtaagggatccataaccaggatattaccacgaacttgtgcaaacatatcagacaatcccatgaggaaagtcataatatattccatgttgtagtgttcttgcaatctttttaccccccccacaagtgcatccgctacaagtacaggtgggtctgaaattggaaagttgttcccaaatggttttaagcctagtgaaatacattcctacagtgtgattttcttgcttaagattcacaagatcctttcttaaattgtacagatgagctccatttctttgatggaacctgacttgaagatcagtccatatagcagcggctgactcatcgtaaagaatactagatgaaatttctttggaaacagagtttaagatccaagaaattacaatattattgttacgaatccaagcattataaagagaaggatcagaaagagagggtttagaaatggaaccgtccaagaatccgagtttattcttgactgatatagcaagttgcatagccctgctccaagctacataattgtcttggcccgtgagaggttgagacacaaggacattgccaggattatctccatggtggaggtaatatggatcggagggatcttcgagatggcttcttg

SEQ ID NO: 115278 - DNA, 3142 bp, Cannabis sativa
  modified_base (53)..(63): a, c, t, g, unknown or other
gtttacctattagtaccctgctattacaggttaaagaaaaatgtaaccatatnnnnnnnnnnnaaatgtaaccattgaatagtcactatatatatagtaattaatcacctttttggtcatggtagcagaaaataaatatgtccgatcacaagggataaccttgagaatttcataaagtgtttcttcatagccttcggacatcaacctatctgcctcatccaaaacctgtataatgtgcaagccaatattatgaaaaacttcagagttttaaaatcaacatttacacagatcccagatagcaccaatgatacgctatagaatgtagccaagccatgagaccgtgaccatgattcctcagtcaaataacagtcaacaagttttctaaatggccaaaaaataaaatgaatccagaaaccatctgaatataaacaaaataaatttaaatttagaaaataccagaaatttcagcatacgaaaaggaaaactttttctgtttaaatgatccatcaggcgaccaggtgtcccaacctacccaaaaaaaaagatagaaatttggaatatcagaaacatgtcgtaataaattacgcaactggtatcaaaggtcaattgccacaaaatacaatcattttaatcccatcaggtaaataaatctgcagatacaatgtaatcagtttaaaatatcttcaacattaataaagatcatacgatatatccttcatttatttttcttcgaagaaattttcattgatatactacaatggatattcatttcttacaacaattcaaacaatttatacgttactaaagggcagtttgaaaatctcggcactaaccaataaaaaaaaaccacatacttacgagtataccaatcacttatacaaaggaacacattttgcttgctttacagtataggctaaaagagggggaaaaaatgaaattgccaaaaaataaaacatctttcattacatgcacaagatgttcatatcattatttcacaacacagtaaattttaggaaagaacaatagtaatatattccagcacagccgcattcttatatagtgaacacattgcatatttgacagcactaagagtcttgcatcaacacttacaatgatatgtggctgctttgcaagattgatagagtcttgcctaaagctccctcctccaagaagctacagaaaattatgtaaaaataataagcaaatacagtaaacaaaatagacaagaaatttccattccgccacctcagcatcttagctcagattctttaggctttatttaaattaattatttttttaggagaaacaagagggaacattttcctaacttttcattaattcataatgtctacttttaaagtttctacaatatcaatcttatattacaatttaaagtcttgttaaagtatctgccattacaaaggcagagaaaagaaacattgaagaattcattgcaaaagaattcaaccaaaagagaaagaaaggataaacaagttaccgtttgaagaaaataaattgaatgctgcttagcaaatctacttttactttacaataattttctgaaaacttaaatctgtgaaattcaaaacaaacagtacatctatagaatatgtgttttcttaaaagcttttcaaacaataaaacaacagtaaccttcaaacttatcagaaatcttaatcatcagtttcacataatgtataatagagcaccattaaaatatagaaacatccaatgcaaggtcatctatcaaacaaactagtatgtgtgaaatgctcaccaacacacacttaacaccaatttctgatcctattgcttcaaactggtcaaaaatctgaaatgtaagctccctgaaagaagatgtaacaaatgcaaataaaatcagaaccttatatgagatataacaatcaccgctcaacaaattattcactacacgaaaactaaccttgttggacagagcacgcaagcaaagaatgattgtggattctctaaaagagcttgcaatatgggaaggacaaaggctccatttttaccagaacccgtttgtgcaagtccaattaggtccttacctgtaaattcaaattaatttttcaaaaccactcctcaaattgtcaaatatatgcaaccaaaatgttacagcctaacaatgtttctgtacatataaatgcctttcaattataaattaattaaatctcccatcaaatgtacttctcagtcaagaacaacaaataactaggtatgatcaaagacattattatagttaaacaaaagaaaagaaagacactatttcaaaatgtcatactatttcaaaatgtcatctattccatgtatgtttagtaaactaataaaatatatgcacaaacaagaattatgcaatgcaaagtaagatcaaaattgtccctatagttggctagattttaacaaagttggagagcaaaccatcaagtgcatgaggaattgcttcagcctgtatcgtcgaagggtttttccaacccaatttatcacaagactcagccaattcgtcacatatccgcaactcttcaaatgtttggaggacctcctcgctttcctctgccattctcaaatccctaaaccaccaaattaaataacatatgatcatcaattttcacagaggtactgaaagtctcatctcaactctgaacgtttaaagaacagaaccgtacctgtgagtgaagcggaagtggtaatgaatccgagtgtgacaaccttacaaaattcttcttctccgattcgtcggtgaaggacgttgataatgtatcaactttctattctactagggtacagcgacagaggagaagaaatatccaatcaaatatataagactgataatgtattttagctgtagattattaattaaataaagattaaaaaatttcaaaaccataaaattaataatatttagaaatttttacactaaaaatctaatttgcacaatttattactgttttactcctacacgcctacatcaacatttttacttatcatctttcttttattacaataatactacttacacatcattttcatgcacaggcacgtgtgccatcccatcatacatcaatcaacttccactctcttccctctcttttttcattttcttttcatttgattttcgattttcttt

SEQ ID NO: 115279 - DNA, 2298 bp, Cannabis sativa
  modified_base (2263)..(2263): a, c, t, g, unknown or other
aatcgaattaaggctacagcgtgtacatcactttatattcctgaaaagggaaaaataattcccccaattccaatttctgttcccactgcgattaggctgcgaaaccctaaccccaattctacccattatcgaccatgcttcactcgccgggtcattctcctcgccatatttcatcgccttcaccttcatcgaattcacgcctttcaacttcagccccttcttcctccagtactccttccggttccagacctaacggggaaagggttctcgacgaagactcgtatgtcgctgccattgagaagattatagagcgtgacttctttcctgatatctcgaagcttcgagatcgtctcgactggttggaggccatcaagaccggcgatcctgttcaacttcgagatgcacagttgaagattattgagcgccgtggaaacaaggtgagtattcgtaacactgatggaaaaactcaaactcctggttccacttttatgcgaaattttactcctttcgatgaattagatgggaaaacccccaaaacaccgggtttccttaatagggtttcgctcgatggcggcgagcctggggagggtggtgatggtggggttgacgttagtttgtctctggatgagttttttaggcggtatacgagtgaggacaatgagagtttttcgaagattttggagaaggtgaatcggaagaggaaggaaaggtatgagtatttaacggaaggagaaaaggaagatgttcaggccattgaggatgccaagaggaatagaattacggatggatatgggacttctgatcagccgcctagtacattggagagttggaagtatactgcgaagaatctgctaatgtaccatccggctgatcggggtgaagccccattgacggaggaggaacgggctgttagaatgaaggccttagagaaggagatcaatcgtcccaacacaagatttcatggtaaaatgatggatactaggcccagagatgatggtagtattgaagtgctttacactcctgttgctggttcaactccagttcccatggatagaacaggtgataagacgaagaagtatgatttggatgatttgaggaaaaccccaaatccattttatatagaatctgctaagaaagcagataatggttataactttgttaggactccttcacccgcccctggggttgatgaatctccgtttattacatggggtgaaattgaaggaacaccgttgaggttggatgatgaggacaccccaattgatattgggggaaatggcgatgggccgcattacagtattccttgcccggctgtaagagatgagaaagcacattcactatcgagggatgctgcacgcaagctgagagagaggtcaaaaatgtttaaaaagcctccattgccgtctcccgttagaggtggcagtgccagtcccagtgtacgggcactttcgtctgctgcacagaagtttgtgaggaatgcaattggaaagaattcatcttctgttgatgaaacacttcgtgctagttacaggggttcaagccccgtgcttgctactccgaagggtggcaggagtgtttcaagacttggaagagatagtagcttggcttcaaggtcaccttctgtgtgagaatgtttttaatacttcatgctgttctgtaattctctttcaaagcggcttaatattgtgccgctttcctttttccctaaacaaatatgaaatatgtatagtacattttctattttccctatgtgccattagttgatattattatctgctttctcagctcaattctggttatttatttatttttctttccaaattcatgtaaaatagattctgttctcttttgtttttatgatctcaacttgaaacttgatgtgatcaaataaacatgctacggttttctagtgtgtttgaatttataattagctgattgatatcgcagtactttcagttggagtattttttatgatcttgtcatatattgaatagcaataggaatagaaataagattggaatgaaataaaatttaaaatttaaaaaaaattgataaaaaaattattaaattttttctcttacattggaatggtctttcatttctttttaagatagaatagtcattctaccaaaatggtagaaagagcattctattggaatgtcaaatgcaaccaaacgaaggaatgaaataaaaattatttccattctattctattttattagctctaactaaacatctctttaggtggcgtttggttggaggnaatgaaatggaatggaatggaaataattttcattc

SEQ ID NO: 115280 - DNA, 1435 bp, Cannabis sativa
  modified_base (58)..(59): a, c, t, g, unknown or other
taattagtaatcccggttaggggattagggctttataagtattttgggtagcgtgccnnattatttagggcgttacaccttccaactaggaaccaacaatcagagtcttcgaatcgtccctccatgacttaagcattaacaccatttaccatttgcaagataaaaatgacagcaaaaggcagatcattcttatgaccacaaacccgtcaacataaatccaaccaagctagcaacttaataaaaccaaaccatcaaaacaaattttaagtaagcaattaatcccagcctcatcttctttagccaacactgtgaaagaaagcaagcccaagagctcaaaacatgtttacctaatattctatcactgccattcaaatttcctttgaaacctactaacataggggctaaggttttggagcaagtatacaaggctgacagttacttgaggcgtcaccttactgacgaatgcaatgtcgtcaaactaggattgaccgactgtcagtagtgaaaagggccaaaataacaaaaggcatctgtaatctagggcacactgcacccatcatggatcttcctgccctcagtaaaaaactcatgacctgctggaggacataacagtcagtgtaggtgaattgaccacgaagaagttgtcagtaggcagcaacattcatcccatagtaattgctaattctacgaggcaacaagcgtctagggtattttaacctcttacctaacttctcttttttacttgatgtaagttattgctccttttctaacttttcttctcttatttcaaatggcagttcttgaggagcgtatgttgagagaagtaagctctatggcaatttcgcttgatctttcgttggccacttgacggacactagaggctcaaatcaagaaaattaaggaggaggccatgtaaaagattgataagaacatcaaagaagctgaacagtattgcgttgacgcagacgccaaggctgataagaagtatttgcagaagtttaatgattataaggaggatttcataagccaaatggaagaaaaattcaaggcccaacgtgatgagctagaatttgccaattttgctcttgctcaagaacttaaagaagccaaaggagccaatgaggcccttgagaactaaatgtccatcaaactttgagaactttaggacacgaacaacatcatttgttgacctcaaaaagttatcaatcgacagcggagtcgtacaaatctgatgcttgccacatgtttgcataaataagaataaaaacaataaacaataagatttgttatagaggttcgaccaccttttgatagtgagtaatgacctaatgcccttttagttgtatttataccgagggaaatactatccaaatcactataggtgggatctgctatagtatccttaggattacaaggtatgaatcaatactgacaa

SEQ ID NO: 115281 - DNA, 992 bp, Cannabis sativa
  modified_base (31)..(40): a, c, t, g, unknown or other
tttcataattaaacataaacaactgctaatnnnnnnnnnnactaagcgggctttacattgtatgatcgtggacacgtgttgttaaaggtctttcccttgcaaaatagtctctaaccaggccgttgggcaaaaatcatatttgagggtgtgtacgcgcactaccatactctggcacgtggttcaaatctgatcatatgtcaaaaaaaaggtgtagccatctacggagtgatattttgtaagatgctaacgtggccaacatctttaagacccttatcaccttttgggttccttacagagggaagttactcccgaaggccatcgcctctcattgcctttatggtttgggagtcattccttatcttagttacctcgaataactcgtgcgtattgtgaccttatccttccctccgatcatgccacgtgtctaattaatgacaacatggataacacttgccaaattcattgtgtttgatctgatcttatcaagaaacacccaaaatcattaatgagaaagaggaaagtcaaagattccaaataaataccactttccttaagagaatttcttttctcacaaaaagttttctaaacaagaataagtcagctgaaaaaagattctttccttagatgaaaataatcaataaaggaacgaaatcaaaatgcacaaatcggttcaattgaacaaggaaatcacataataaataaaaactattttgacacctaaatttccaaaaaaaaacacattacaatctcccccgcattttagataatcaaaatattcttaactaaaatttacctgcaaatcaaagttagtgacaccatacaattaaactccccttgagaaatacatcattacactgaaatagaatgattactttaaagcaaagcttaacacaaataccaacctcaactgcccctgcgaaaagggtccagagttgagaatacaaattaagaaattaaaactattactgtaacgtccccgcttcaagcctcca

SEQ ID NO: 115282 - DNA, 2163 bp, Cannabis sativa
  modified_base (2119)..(2124): a, c, t, g, unknown or other
atccacataattattaatatttataacaatatatatatcttcattagattatgctaatgtattgttatgtaaatgttaatacaataggggtcgagaaatatccataacccatactgatttttctagaagattcttgatttgtggcaacagcgacacctccaggaccttccacactgttctgactccactataaaacccattgccttgatccaaaagaaatcaacacagtctagtctactgcgaacagagtaacgctaacattcatttcatttctctctactctttcctttcctttttctcttgtcaagctctaagctcagctctaatggcttcctcactcgctctcaagcgcctcctctcctccaccctccgctccaactccattctctatccgattcgccccatagctaatactccctccatcgcttccaggtacttcaacaccaacgccgtacggaattacgacgacggcgactacgacgagcgcggtgtcgacatcgaccgccgctctgaccgttctccctctcgccgactaggccgtgatgatttcctctcaggtagtcgtcttcttgatccttcttttaaacctttcagagattcattttcttttttcccgaacgcttttacgatttgaaaaaacaaaaaaagtgaatagctctgttttttcggctctgtgttctttttcgtttttcttaaaattgttgtaatacttttagtgtttgattttcttagatacttcagtgcttgttagtgagagaatttaagttggaaaacattaattgagatgtgaatttaagcatttttctaaacttgatttgaatctttgctttgttatgcaacagaagtgtttgatccattttcaccaacaaggagcctcagccaggtcctaaacctaatggacaatctcatggagaatccactcctctcagcctctcgcggcgccgggtccgggctccggcgagggtgggatgcgaaggagactgaggatgcactccatctccgagtggacatgccaggactcagcaaagaggacgtgaaggtttcagtggaacagaacactctaaccatcagaggcgaaggcggcaaagaggaaggcgacgaagagagtggacggaggtacatgagcaggatcgacctgccggagaaactgtacaggactgatcagatcaaggctgagatgaagaatggtgtgctcaaagtggttctgcctaaggtcaaagaggatgagaggtctgacgttttgcatgtcaacgttgagtagttctgttaagcatggctttttctattgtcttctttgtttcgagtacaatttacttaacagtgagaaatgagagatgagaatgtaatggctatgagaactatgagttgagttgttaatattttgatattatttttctttcataataagatagttttgtatttttctgtttttcacattttcacctttgtaatccttactcgattggtagtggttttttatagtcgatgtctgcaaatgcacttgatttttcttggattgaaaatgccttctaatttgataaaataaaatcgtcaaagaaaatgaaaggagaattaattgaagtttggagaagagaagctaaaagcagtagtgtctattggtgaaggctgacagtgttgggcttgggccacaataggcctgtaactgtgtctctgtatcggattaagtgactaagttttcttcccactaaggaacaagaatgtatcggaataaactgtagtcttttataacatataattagtatggcaggcaaatttattcactaattcatacgaatatagttttttggcaaaattaacatgttcataaaaaaaaagactatgtgtgaaataattacagttaactgagctattacaacaaaataactgtactcaaattaaataagaaacaattttggacaataggctcagtttcatttttaattgtctcatattacatcttgttatttgaacaaatattctagttttctacttgattaactgcttgtgccgtgatactttatatttctcgttgtacttattagtattatattttatatttggtcttttaccgagataatttttatcgtttgtaaagtcgtattaggtcgtattgtattgnnnnnnattatattgaattgtattttatgcaatatttttatgtaa

SEQ ID NO: 115283 - DNA, 1273 bp, Cannabis sativa
ttttatacggactatcctgtatgattctcgggaaatcagggtgttacatgttaaacaccattattacaaggaaactaaatagagaaagcaaacaaaacatgcccctaaactcaaacaaagaaaagaatgaacctcaatctgtcaagcatggataaaggaacatggacacagacttttgaaaatactagtccatcctcgaactcccacatggattcaaaatagtaaaggagacaggaaaaaggttgaacattccttgggataaacccatattctcccttcaacatctacgctccttggctttaaagtcgagacacaataaaagaaacaccaagatctagaaaaggaagagtagcacatccaaaacccaaatgccaactagctacaaccaccaccaaagctccacaattcaccatcaaaggaggaaaagaccaactggtaaccaccaccactgctgcaaagcagactaagggcaaaagaccaccgacgaccaccatccactaccactaaacaaccaattcaagacccataaccaccacgaccatggtcccaacacctaaaaacctcaaccacaaaccgcacccatggaacaaaggaatacaaaactcgtcgttgcatccatgtggatggaccaacgatggttgaagctccactcgatcatagacccaccagaaactacaaactaaagatctcgaggcaccaccaatcaagaaactagccacaagtaccgaaagaaaagaaaactctagagggttacttaagataacgagaaagcaagagaatgaatatttaatgttaagaatacaacaaacgattgactgctaaaattggtgaagaatccaatgtccatttaaaatagatcaaactcactaaaacattatatatcacgcactactttattttattcgaacttcaccccataagcattataattttctatcattcctcattagcaatagcaaatacattcaaaaggtgaagaacctcataaatgtctaaggaaaaagtcagtcgcatgtttagttgaattaggaattcgtaagatgcacatccccaaagtgcatgaaaggtcacttcaatcttagtagaagacatagggcacaaaacattttagctaaatttccaagaataagtaattagttaagcgtgactttctaattgaacatcttaactaggggtgggcatccgatccaatccaatttttttctcctcatccaatctaatctaattagtaattggattcaaaaaatcatcatccaatccaatccaattagac

SEQ ID NO: 115284 - DNA, 3643 bp, Cannabis sativa
  modified_base (3581)..(3599): a, c, t, g, unknown or other
aaataaacaaatgtaagggaatgactcccttactattgattcccattgcttattagtaaacatgccataaaattattttctctttcctttctctttctctttctctcttcactcacttcacaatctcaaactcattttctctctttctccctaaccaaatcacactaacatcttattaaaagtaaggattttaattacttcaagctcacatataaggtgcattagagtgagacatttttttaatcaatgggtaagtgatgttttttgtttctttttgttgttggttgttatagttattttaaaatgttgtttagatgtttgatttgtaggttgttgctttttttgctaatgtttgtgtggaaatgattgttcttcgaaaatttaggtttttttttttctaatttctaagttttttttgctttagctcaatggtgtttgataggggtccgatagtgttctaatagtttgttgaattttgaggttagagatgatgtctcgatggggtccgaagcatatatgatagagtttcaattgtctaggtcaggatgaaggttcgatattagttcgattgttggttcaatggtcggttcgatgttgtcaaattatttgttgaggatgttagtcatgaatttgtcccaatagggtccgattatagttcaatggtcgtctgattggttaggtttgattttgtctgattgttattcgatgttggtacgatgagaattgtgttgaatattattctttaagtacgattacagcctcattgtgtatgatatttgtctgacattacacatattgttcaataattgattatcatttctattaacttttttattatggatcatagggtcaattgtgtttacattcatcatgtgtaatggtgtttgagagtatgagggtagagattgagtttttaatggagcaaaaaatttgatattcgagattgataagcacataacctactcacaactggttgaacttttgtacgatgagatgatggttgacaaagtgcactatgacttaaaattagaagtgaattacaagtacatgaaagggttgatgtgtcggcctgaagttataagtaatgataagcatctaagtttatatttgtcaatgctttcgaagaagccagataaatctgttcccctttttatgactttggtgaagaagaatggttgtatcgatcctactcctacaccaagtactgttggtagtcaatgtgttgcctgaattaaatactatgatgtcggcagttgacattgtaacacgaatacccttgcatgatgagtttggtgatagtctagaccctgaagctttctttgatgacaatgatgatgtaagagacgaccaaaagatagaggtctctactgtagctttaaacttgactccactatcgtaccaaatatccaggcaaacaacacgtagaaaaaaaacccatagagaagattgccaacacctagtactagtagtagtcatttagacggaaccagtaatgctagagaaaccaattatgctagaggaactagtgatgctagaggatttagtgatccattctcttcttcgataacttacggtaaattcaagaagaaatattgacaagagaagacgttgaggataatagttattatacatctatgggtggtactccaggtggggagttacatttaggaaagttttttagagacaaaaagtatttgaagatggttgttcgcttgtatgcaatgaagaaacggatcgaagctatttgatacattacatgcaagaatttaaattaagggtagagattaagagtgaagaagagcttacttttatgacatgtttgatgtgattacatttcaaaattcacacacttgctcccttgatgttcaaagtaaagataaccgtcaaacatcacctttgataattgtccacctaattaaggataaatttgcaagtgatgactcagatcatttggcctctggtataagaaaatatatgcataacaattatgtgatcaaaatgagttatgaaaacgcttggaggtgaagagagaatgcactacacctagtttggggtacacttgaagcttcatattcaaaattagctgattacttgcatatgttataattgaaaaatccacgtaccattacggattttatgccagagaatggccacttcaagtattatttttcttatgctgggttcttgtaggcatgaatttaagttttgtcgacctgttgtatgcgttgatggctcattcatgaagactagatatggtggacacatgttgtatgtagtgacattagattctgatagccacattttcctaattgctttcgtgataattgatagtgagaatcatatgactcttggactaacttcatgagaaaattgaaagaattgattggtgatgttgagaacttagcctttgtattggataggcatcagtgcattgttcatgattggaagcttgtgtttcttgatgcacaccatggtgtatgctaccaccacattactctaaacgtggccagcaagttcaagactgacgtattcatgaatcatatttacatgtgtgcgtactcatatacaaaaacaaagtttcatagagagtttaagatgataaaagcaatgaaatgttgccattaaactatatcttgagggcattggattttaaaggtgggctcgttcttactttgtaagggattgttacaaatgtaatgacaagcaactaggttgaaagcttcaacaacacaattaaggactcaagagccttcccgatcactacttctattgaattccttatgttcaatgttcaagagtggtttgctatgtgaaaagaaaattttgacaagtgtacggagattatcaccagaaatgaagcaggacttgtcattgcagtttgagaaatcttggtgcctgaacattgacacgtgtggaccttacacgttcaatgttcaccctggaggatcagttgagaggggtgttgtagtagccttgcggacacaaacgtgcacttgcagcctattccaaatcatgaagattctctatcctcatgcatgtgtttcagctcaagaatgaaatattagcatgtacgcactatgcactataataaagtattggaggagcacatatgagagaacaattatactagtcaatgacgaggatgattgggaattgtccgaagacattaagaacatcacaggtggagtgcttgttaagaagaaatgtgttggtcgaccgaagaagcaaaaggatggaagaataaagcaaaagcagactccttctaatggtgaaaagatagtggtacaacaaaagtgtagcaagtgtggtgctaaggggcacaacagaaagtcatgcaattcttgagattaaaaatttatcgtcgaatttcttttcactatgttattttatgttagtaatgctacaattatgtgttgaattagcaagttttattttgtgtgctttcttttattgtaaattgataattcaaagtggtaaaatagaagcttttatgtttttttttactgggtttcgtattggtacaatgaggcccgatagttgctcgatagtggtatgatggtactgttggaaattattttacnnnnnnnnnnnnnnnnnnnacaagtatgttgattaacaccttaaatatgaacttctaaaacga

SEQ ID NO: 115285 - DNA, 2823 bp, Cannabis sativa
  modified_base (673)..(700): a, c, t, g, unknown or other
cgcgtttaggctgacttgctagcttggtgtgccagcaagtgccgcacgtcccacctatttgggggtgtccaaataggcggctcgtgacacacggccatgctcacatctgctattgacggtgatgcccgtagcctcaacattatgcccatccacctctccttcatgacaccagcagaattactgagaaggtgtcaggggggacaatgacgactcaacctgcttacataacagggacatattttagttcgttcgaggtacaaaatgaaagaagcttttttagtgaaattaattaggatcctagacatgacaggttgcttaagagacagtgtaatgataggtgaaagcaactggtcatagggtgtatgggggaagctgaaaggtgtaagggcaagagggttgattataaattcgactctccaatccattgagagggggaatttttccttttgaattttcagagagccaaacactatattattggaagagcatttatgagataccatttttcaaagatattaaagactctagagttctttcttctttaataagagttctttcttcttagtattaaagtcaaggtttcattgaaatttatcaatattattagttgaaaaagtttatctatattgttaaccagttcagaccgttaacagttttatagaacatgtttttnnnnnnnnnnnnnnnnnnnnnnnnnnnnaaaatagaaaactgattaaaaaaagtattaggaaatgacaccttttataaacagttttgtttatttataaagaataaacttatttgtttatttatagtaatttgtgtatttgacaattttatatttattttataaaaagttattttgttttgtttatttgtaaatatgtctttacacattttttttataaaaagttttatctatttataaagagtttttgtacatctattttttttatttacaaatagttttgtgtttactattattaaatatttaattggtaaattaattttcataaacttttgttaatttatgaactgtgtcactaacttcatatttaatttatatatatatatatatatatgtattatttacaattagaataatatatattttcaatacaaataaaatgatttgagtttttaaaaggaacgtccttaattgattatagtaatttgtttggtttaatatatttttaattttgaggcattttcactttaatactaatgtaaataatcttttgttgtctttttaaaaaaaaaaaattgtagtattttaataaaaagatcttgcttatgtaaggaaagacaaaatgaaatcaaatacaaaaattaatgtgaaacaaacaaaagtatgtggacgaatgagattagaaatagggatcattttcttaaaagctagggcagtaatgtgaagaatacattaattaaaaaatacatatcgttattgttttggtgtttatattatattaattcatgcagccaatgttaattgggtaagcacattgaattaagactttcaaaaccttttactcacgacaacagaaacttttgattcatctgctatatgtttatcaaacgatcaattttggcaactatgtatacataaatatacacatactaaaatatatgttgaaattcttttttagtatattttcatggcactacattttttttttatcatggcactacatatagttaaaatattttttttttaaatttttgaaaaatttaaaattatttccaataatgaaaactgagttgaagtattttgaatacacatgacaaactaaaatatatgaaaatgatattttaactataattatattgaacactattatacaaaaaaaaatatatatagatatttgatatgtattttcgaatgcaaaaatttaaaaagaaaaattgtaattcacactcattaaatttatgcatactgtaagatcgtaaaatatatggggatctaattggcataattatatattactagtttatgtagaaatagggtgttaaaagaataagagttttaattaatatattatataagcttttaaagcgacctttgttatatgtattccattatgtcactgtacactagtactatacagttgttgattattattattattattttagatgtttcagatcaaggtattgtgacaagagtattattattagctatgacttacgaattaagccgccctcaatcatcaataataagttaatattttaagaagttgaattcctccatcaattattagttaattattttacctgcaatatatactatatacatatgatttgacaattttagctaaaaaaaccaaagtcagaggtcaaaaattttcttaacccttttggaaagcatccgatttcgtcttccttacctattttttaaaatagttgtcaagttagagcactttcaacatattcaccattttattttttaaaatactttattaaaattttatttttattattacatagttattacaccatacattaatttttttatatattttttatactatttaaataatatattcataatacacaaaataataacatattatgtattacataatatttatttactttaacacttataaataaataaaaataataaaaaattatagctagccactaaaattaagaaatttcttatttacatttaattaacctatttagatgtaaatttttgagttattttagttcaaatatgcttttttgatattaatttttggctaattatgaattttgccccctaaactttgacatatgtcaaatcatgccccttgaacttttaaggttgtcaaaaatgctccctgaattattgagattgtt

SEQ ID NO: 115286 - DNA, 731 bp, Cannabis sativa
ctgaattttgatacctgggatcccaatctatatggttattaatatataaattattaaaattaatttccgagtttattattataaaatgcgggcgttacagataatttgttccaaaacagttttggaacactttcgagcccactctgtgtctcatacttttgaaggttatcataggttcgtatttttatattaatccatatcccatggaaataaattcaacactaattttagactaggagcttgctcccccacaaagatttctctgtctgcccccactactctctaccgagctctcttggacattatggaagctgaaagagtacaaattaagatcacgagggatatgaacctttgatagtaaggttcatatccctcgtgatagtaagggcacgagggaatccttccccataactgcttggaagaggtcctcatttgattcgctatccaggaataaaacctttcagggagatcatttgttctaggtaatagaatcgggaacacaagagtaaagggaacaatgaaagcttacgtactatccaaaaccataagggttccaaacaagaaaataaaaattttaccaatatttcagcagcaaaagagggttttccaaagcaaggcaacaaagagataatttgtaacgccccaatattttgccttattttacaaaatactaattttgatgcattaattaaaaagattcaaagctgtttggaaatacacagtgggtttta

SEQ ID NO: 115287 - DNA, 2455 bp, Cannabis sativa
cgccggcggttccctcctgatcctgtcgggtctggtcctggccgcaacggtcatcgctctgacaatcgcgaccccactgtttgtgatattcagtcctgttctggtgccagctttaatcaccgtgggtttgatcataacagggtttcttgcctcgggaggattcggtgtggcagcgatcaccgtgttatcgtggatatacaggtacgtgacaggtaagcacccactaggagctgaccagcttgaccaagctcgacacaagctagccagcaaggctagggagatgaaggacaaggctgagcagttcgggcagcagcatctcacctctgggcagcagcagtcttaagattcttcaccactactactttactgggttctgatcgatgacgtggcccttttgggtgcgtcgattgtaagagttttatgtcaagaataataagtaaagctagctcatgtgaatgttaatgtggatggaggggagaggttactttttgttaatttattttctgtttatggttaagacttttttctttttttacttgtctttttgtgttgtggagtctgtttcgtccttttgtaagagaaaatttatgtgttaaatatgaactttttttttcccctatttcaaatgttgtgttctctaatctctcctttacaacgttcaaataataataataataataataattatatatcgttgcatttggggtcatggtatgcgctgcgcgcacgtgtgtcatagaatggtaagagatttggatggtgatttaaaacttgcatgcagtgctgcacgtgttaagcttttgacattttgtttgatagaaaacttcattttgaagcaaatatacgagtttatatactattttcacgtaaaaaaaagaatagcactatatattttatacttaaatagtgcatatataaatataaatatcaatatgcatatcagccaaagaaatttacaagtgtgttttcaaaattgtaaaaagtagaagtgaagtatatataggttgccaggaaatcagtatacgattgtgcgccaattaattaataataaaatttgcctcccggtcccgttcccgttccatcccccttttcagaattttaaacgttttcttaatttaaaccaaaaataatttggactatatatttatgcaaaatagacactggactcttatgactcagctcaccggccctcaccgttacctgtacgtttctctctctatatgaccatcctagccctactccccacttcaccctttagagaaacaaaagaaaaattaacaagcaaaccaaaatcacttttttttttttaaaatgggaaccaaaacaacttatggcggaccactactgatatttatttgttgttgggaaaagtgagatagttaatgagaaatttgaaaaaaatatgcataaaatactctctctttctctatctttctcagttctctctcaacatctcaccctcaccaaaaccgaacctaccctcaccgcctacacaaacgaccaccgtgagacccgactaccttcgagatgttgaaggtaagcattcggcccatttttttttgtcattattttttttggggtgatttatgatgggcaatgttgtcaaaggaataaattgaatgattaatgtttgttatctgtgagtagatgttagacttagggacgaaaatggccagatctaagttttgagcaaaaaattggtttttttgtcaggctcgatggtggtccgatggtagtttgatgctttcttgttgttaaaatgagtagacgaaggtccgatggtagtccgatgatatggtccgatggtagtccgatggtgggccgatggtcacctgatgctactttttttttatgtgcaaaaatattaaaagataaaaaaaaaattgggtagcagatatggtctgatggggtccgatggtagtccaatggtagtccgatggtcacctgatgctacctttttttatgtgcaaaaatataaaaaaaaaaattaggtagcatatatggtccgatggtcacctgatgctacttttttttatgtacaaaaacataaaaaaaaataataaaaaaaaaattgataacagatatggtctgatgggtccgattgggggtccgatggggtccgattggtccgattgtgtctgatgtggggtccgatggggtccgattgtgtaaatggggggtattttagggatatcataaaaattgtcatatcctacaaatattagttattatgttaggaaaaaaagtttaaccaaatgtaagcataaaaaatcaaatttccctagttaatttactatggagagagcgcaacagaagttgttacgggccaccaaagttaactaatttttatgagaaatgctaaaaggtagttgttgaccgagattttcggcaactattaaaatatgcttataatattgagctgtaagaaagtgagataaggatttttacgtggttg

SEQ ID NO: 115288 - DNA, 1395 bp, Cannabis sativa
taattcatcttgttgcatcaaaggttgcatctgtgtttaatttcaaacgtccagagggaggagccaaccacttcagtttgttgttaatgcgaggagcctccatagtaggctgagaaacaatttgagttggttgggacaatgaaggctaagatgttgtggttgttggtgcttgcgctttcgtgtagtcatctagataagaggtagaaaaaatgaggaataatgtagcatgttttgcttttttgccatggatttttgcatttcttttgaaccagatacaccagaggattataacaaactgctcgaattgatccttcgaaagctgatttgagacatgaatgagaaaatcttgaccgctaaaggtggacgacaatggtagtcaaaagcaaggtcagtgagattccatacttcttgagcagagctgcaccaaaatagtgaatgacttattgattcaagtcggtggtgacagaacaaacattttggttcatcagcaatatgtcttctacaaaggacaacagcaacaggtagaacctcatgaaagactctccaagcaaaaatgcgcactttcaatggtaatttcaagctccaaaagaactgccaccaatttgcagcagaagtagggggactggtttcatctcttgctgccaaattagtagcgaattgatatcctgatttaacattatagcaccctgttgaagaatggtgccaaataaggatatcatcagtgggaaacaaacttaaagggatagttctgatgcagtcaatgtccacctgacaaaagagagattggagagccgtgaaatcccattgtctttgaggtgttattaaatcaacaacgagtagtgatggatttgttcccttaaacacaagtggcctgaagaaagcttgccctggaatccgaggatcagatttgcagtttacattcaggccaaaaccaattcgaaattgcaagccttgttttagtaactccttaccccaaagaatgctcctacaagtcaaagatggtgctcgtccctcaatagcttctagaaaacctccatgtagaaagtatctatgtcgtagaacttgacaaagaagggaatcgagattttttagaagtcgccaagcttgtttagctaagagagtcttgttaaaatgaataaaattcttgaaccccgtttccctgtgcacctttgctttacatagaaaattccaattcttctaatgaattagattacctgaggtagaagagccccactagaaattgtccattagactttctatttgttgacccaacttaattggcaaccgaaaatagctcattgcatatgttggtattgattgcacaatagcctttagaagaacttctttaccaccaattgagaataattgctctttccatgaattaagtagtttcca

SEQ ID NO: 115289 - DNA, 1395 bp, Cannabis sativa
tatatgggattgaattaccataaaaaatattaaaatttccttcatttttattttttaaaaaataataaaacaaatgaaactacagtgatcgccggagtcgtcacttgtgccaaaaaagtcaccggagtttgctatcggcaccagaaaagtcgtcggagtagctgtcggtgccaaaaaaggcgttggagttgccaccggcgccgaaaaatcattagaattagcattgtcgccaaaaaaaacatagaaaaaatcaccaaaaaaaactggtttcttgatgaagcacttggtagagagggtgatttgtcaatactttgatggcatatgcttgaaagtagggtctgagcatttaggaggtgactagtaagcaaaaagttagcttttcaatcaagggatacctggattcagcactcagtaatcttttagtaacgtagtacacctgtagttagacccttctttcttctcacactaaggcgacacttctagcatgatcagacattaccaaataaaggtataagtctttcccttccactggctttgatgaaataggagttgtagtcaaatgctcttttagtttctagaaagcttcttcacactcttcagtccattcaaacttcttgttttctcgaaacacgttaaagaacaagatgtacttgtttgtagatgttgagacgaacctattgaggtatgcgatccttctagtaacactttacacatctttgtgctttcggggagatggcatatcaacgaaggctttgatcttctttgggcttgcttcgattcttcaggagctgacgatgaaacctagaaacttcccaaaggagacaccgcatgtacatttctcaggattaagcttcatcctgctccttcggagaaccaagagctttcttgaggtctatactgtgttctccagatgtcttagatttcactagcatggtgtcaacataaacctccatatttcttcccaaatgatttttgaacatcttgttgaccagttgctgatatgttgctccataattcttcaaactaaacgatattactttgtaacaatacacacctttatccatttggaagctggtatgttcttcatttgctatctgcaatttgatctgatgatacccagaataagcatccataaagctaagcaactaagggtgagcaacggtcggtttggtcggttttttacacacaaaatccaaaattcagtttttggtttttatggttctaatccgaaaaccgaccgaccattataaaaatgtaaaaaaaaaaaacgaccgttttaatccacggtttggtcggtttaaatttagtaaacgaccgttttaaattttttataattatttgaaaactaaaaaattagaaaattgtatcaaatatcatataatttaaaaataaaac

SEQ ID NO: 115290 - DNA, 2050 bp, Cannabis sativa
  modified_base (750)..(751): a, c, t, g, unknown or other
tatatatatatatataaagagattccgcaaagttaaaagaagattacaatagaaaataataatattatttctttacaataataaatggtgtactaataataattaatatacataattaaaattaattattaattatgtaatctctacgtctatatgaaaatgatacaataatattgtgcatatatattaatgcatgtccattcaaccatcctatataatatatatatatatatatatagtggtttttttaatcactagaaacaaaggaaaggtcaacaaaaggtatgatatattctttagtgatcaatcttagtacacacaaatataatataatttaaattttattatgattagtataacctatacaatattatctggattcctttgtaatttattttcattggtcatcgctactacttttcatattaatatcatcactgttcattatatatagacataataattatatattagtaatgactgtctaattggatatataattaatacaatgaagaaaatttaaatttgagcctacgttttaaagcattgatattaggtatgttaatggtgtctagacctataaatatataaatgtgtgtatcgtacatattttgaaatataagtaaaggtatatcaggccatacataaaatataaccacttcaggctaactcgagtggtcattagagggtgtgtgttggagattctgggttcgagtctcaaattatgcatggttgtaatatataaacgcnnaaataaaaaaaaaaaaaaaagccatacataaatatagatcgtgtcgtactaataattttataaaataaatttcacatggttataaattcaatatttttatatcgtgtttaaatttgtgtaatactctactcgaatatttgtgcctaattttttaaataatatcaaccccttttaagtgttgtgtgtcactcttatgatcacattaatttgtatttgagcatgttaatgatccaaaatatttatatatatatatatatatatttatatttatatgacctgctataagaaaatgacaaatccataatccatgtatgtaagtttgtataaaaactagaggctcgttgggcacaatgatgtctgtattgtattatattatattgtgttcaattatattgtatttatattatttaatggaatattatattttatattgacttgtatactaatatataggttacgtaaaattataaattctttacaataaactcgaccccaaccccgaccacaacctggacttgggctcggacccaaaaaaatgccctgaactcgaactcgaaccctgaacatgaactcagatgcggaccccgaactcggacctgaactcgaaccgtgacccgaacccctgacccaaaccgagacctaaactcgaactaggacctagactcgaacgctggacttggacttgactgggacttggaccccaaaccccaagtttgagtctgagtttcgggtttcagaccctggtccgggatctgagtccgggtccatgatcagggtataggtccaggtccgctgggctggggtcgaggccagggttgactccaaaccctttgtacacattataatacaagttaatacataccatttgttatgtattaaataatacgactcacattgtattaaaatttatagtcgtaataattaatacacacaatactatccaaatatagtattatttgttatttaatacaatatgactcttatatggcttaccaaatgagtcatagtttttcctcttatttaatggtaactcttatttttacacttttaattttttacagctactctaaaaatacttttttcagctataaatatagtaattaaagactacacatcacaatataagatggtcaaataaatttttaaatgattatttacactaatatattaaaagaataatcattgaaaaattttattatagattcaattataaataaaaaactttcgtgatatgtaagagaggcattatttgtaacgccctaatgctaaggcacgctacagtgctttttcaataattgt

SEQ ID NO: 115291 - DNA, 1836 bp, Cannabis sativa
aatatgagattttcactaattcgactaaaatgattgttagtgcatgaaaattacttttttctcaacgtttccaatagaaaagtgatacacaacagtcttggcttcgttcttgtgaaatttcacaatttttgcagatgtgtagggtgagattttaacagaacactaacgagtgcaagagtaagaaaaaacttgttaaaatttaccttgaaaagaagtatattttcaattattgaattaatttagcgatatttaatgatttcacgatgtttcgtgacatttagtgatgttttgcgacatcgtcaaaaactataataaaaaatgcagattacaagcgagttgagaacttcaacgatgggtggggattttgggggtttagggtggttgtgctcataaattttggagttttgggtttcacgatttctctttgtggttttgcgatatcctcctcgattttgtcgtacgtttcatcttcggtgtgggtttcgccggaggtggtgcggtggtcgtgggtttggtctgggtctggttctgtgttcgtggatatcagttaggtttggtgagagttagagagagagggagaaagggcctagagaaagagggaaggtatggggagattattttaggatttaattaattttagagtattaaatttctatgtattttaacgtggcatactaaaagactatggacaattttcaagtataaattgtcaaatttctcttttaatattcttaaattttatatttattttccttaaatttttataacattaaatattatttttaaaaaaataaaaaattaatacgtgatttcttttaatttataaaattcaatgcatgtgtaacctaacaataatcttgtagtttttaaatatattaattcttttttttttttttttttgtttattttggtaagagaaatgtattcactctgttaaataaggagatataaatttaattttaattgaggagagaaatttaattggattgtgatagggagacaaaatttggctctctcatgaacaatttgcatagccattaagatagttatttattaagtttttttttataacaagttgctctatcctatatataatataagtatatatttataaatatagattgtttattaggttaaatttgtttttttttataatatatataagtatatatttataaatatatattgtttattaggttaaattaaagaggtatagcatcaccccatatggcatattattttattgaccatgacttgttgaggtttctaaatggaaaaaggtcattttacttaattttacacaaattaaaaatgctagctgtacttaattaatgtccattatgctactaataattccactaatttaatccataaattccaaaaccaatttttttttgtttgcttgcattggccacgtcagcaaaatagatacgggatctccatataatatttattattattattaatggttttatttatttatcatataaaaaggaaatttataataattgtcttttgcatttattctcagcaaaaccaagagaaagagcatcgccacgtggcaaagagtaaaaaacaattagagataatgttatccttttaagaaaagtcatacaccactgatttatttatttatttataaacaaatcaatttcaaggctattatttacatattagttagttacagcactcaaaataaattttattatttgtgtttatatctgtcacatctttatatattaaaagtgcctatttaacggcatttcttggtttaacagaatataccttaaaataaaagaatattctgttaattttaacggagaaaaccaaaataaa

SEQ ID NO: 115292 - DNA, 2364 bp, Cannabis sativa
  modified_base (27)..(32): a, c, t, g, unknown or other
aaaatagattacattgaaatggagttnnnnnnagggcataaaacctaacatgttcaacagtgactgatttcttttatacagggaatatacctttagagttacattctactgtaatctccctaattctaaagattgacaatatccagcaagggtatttgactataggtcgattgcctgctgctctacaatatacaagtgtatatctaagcttctgtgctctaggcttgatatagtgcttccttatttgatcaactaaaattagggagctttcatccaaggaaggttcatagcccattatgtgatgattcttcaagatctcttgaagaattataatagaaaaaatatatctcctcggtgtgccattaaaattgacattagcaaggcctatgacacggttaattggaatttccttgaagctttgttgaatgcttcaatcttcctcaaagattttctaatttggtgatgatatgtgttagatatacctattactcgatcattttgaatggaagaatccaaggtaactttaaaggagaaaaagaacttcgctaaggggatcctttatcctctttattgtctattctaatcatggaatacttgatgaggagtcttaaaaatgtagctcatggttcctccttcaagttccatcatttgtttaaaaacttaagaatcattaatctttgctttgctgttggcttaatggttttcagcaaagggtcaaggcaatcaattttggttcttaaaaatgctcttgatgagtttagctcttcctcaggcttgcatatcaatatggagagaaatctcagattattttttttggtggtgtgaaaactaaagagaaactcatcattctcaaagttcttaatctgtttgaaggatccttccctctcaagtatttgggagtgcctttaagactgaccaaatggaagcctgaagactgtggtgtcataattaaaaagataaagcagaggttgcattcatagtctactagacatctctcatttgcaagcagagttcaactgattcactctgttcttcttgggcttcacaactattggatgagaatttttgttcttccttaaagcatcacaaaggatgtagaaagattatgcagaggcttcctttgggatctgtccggaaataggaacaaaattcacgtagcatctcgagagaaagttgtcttttaaaggcttatggaggtcttggtttcaaagacggagctaagtggaattaagccaatcttgcaaaatatatatgtgccatttcagaaaagagagatattatttgagtcaaatggattaatatcatttatttgaaaaatgtctccatttggtcctataaactaaaacaagacacgagttggtattggtgtaagatttgttgtttgagacttaaattcttagaggttgacattcatttagcagtcctaacaggtaaattcaagataaggaggctatataaaagctctcttcaacaacagcaagttcactaccatagagttgtttggaattctttgacgcttcccaagcatcaatttgttttatggaaagccgtgaaccatcaacttttaacaagagtaaacttgttaaagtattagattgtgatggactctttagattgtctggtgtgtgctaatggtttagaaactcatgaacacctattttttgagtgttttctttctcagtgggtggtgagagtcatctttgattggctaggcaaacacgcttggtatttggattactgggctagtacaattggttatcattgtcatccataaatttactaatagatatatttatttttccagccacttgttatagcctatgggtcaataaaaataaatgtatatttgagggcttttctaaaatagtctcatatagttaaagagattaaaagtttagtgatttatagattataaattgtaaagcacaaatatgtaactagaataaaaatattatacttgaaaagactacaattgtaatggggtggttgtctgcttaggagacgtgtaggattgttgggctccctttggttgtaattatttgtcgattaatgaagattcttccttcttgatccaaaaaatatcttctaatatttattgcttgattagcttgtttgaataggcttcaaaccatagttaagcttgtgtgatttggagttcttgttgaaaatagatgttgtgagggtgttgttgaatatcactacactacaaaagaaaagctacctttagtgacaacttttagcaacaatatagttttttgggactaatatgtaactttttgtcgcaataaaaagttatttgtgattaaaatataatatttagatacaagttgttactaatttagttttagtcacaacaagtattgt

SEQ ID NO: 115293 - DNA, 1039 bp, Cannabis sativa
caataatacgagcatagctttttctccatataataagaatacgattctcaatggttggactagtaaaatagccccagttaggaaatttcatatcaacaatttcttttatttttttcattctttaactttgtttcaagcaagccacaaacacttattttatgcaattaacaaaactcatacacatcatcttgtttctcttttttattgatgcccctcacattccaacaagccatatttgcattatccatgagcaaacaaagagatatcagggtcaattacctcctttgtgtccttctgttcctctcttgaggcttccaataactccttttgctcattctccatatcaaccacatgctccttcaaggcagtaaaagaattactagtgctaccagtagccttctctctcttatcttcatgattcttcatcattctaacaacagcttttttctttggaataacccattgttgttgatcgttgttgcctcaaacctccacttctgtttttttgttcttgttgctttttttggtcttgctaatttttcccatctttcttttcctttcgcatttcatcaacacgacatgtagccttagtatggccgaatttcaagcagcttgtacactttgcaggcagccattcatactcaatggattgatcttgcgattgtccaaattcatcaatgtaggggatgaattttggaggtgcatctgttatctccatttccaccaagatttgagcaaactgaatacgagttcgatccttagtttgttggtccaccataataggttttccaattatgctaacaagagcactcaagcttttgttcccccaatattgaagacctaagtcatgtaatcttatccatagaggaactaaatgaacaagattcatagacttcaaatcagcagaccaaggtcgaatgattaccggcttcctgtcaaattgaaccactccagcttccaccacttgatctcgtgttgcttcattattgaatctcaccatgattaggcccaagtgttgggaatattttaccaggattta

SEQ ID NO: 115294 - DNA, 3518 bp, Cannabis sativa
aaaaaaatcgtaaaaatatttaaaattccgtgaaaccgcatttttgtaattttttttgttgtttttatgtttttgtgaaataattccaaaaatgtaataatttattttatttttattgctaggtatgtaaaataaatatttttaataaatattaaataatttaatatcaaaaagtaaccaatctaaaataacatatataatctgtacattaactaattgaattagattagatgtaagctattgtgtagattggattaaatccagaatataaaatccgtagttagtgcaaatctaatgcactataaacaaataatgtgaattgaattagatgaacactcctccttatttcgttttcaataaaatcgattgtcctgatttgatattggcactgctcttccagctcttaatttcctcagagaaacggttctgccttaacataagttaaactttcaccaaatgagtaaaaactgtgtatttgctatgttcctctataactttttaaattttctccaaagtcagcttttgttacgcatcaaattacaaactcccccctttcaaaaaaaaaatctacaaactcccaaccgtcaatacttaaaagtaattaacaaaaccatctggcagaatcaatttaccattaatgttccacatgatttaatagtgaagagaaatgaagctacagttcttccaaagctccctaaaaaataaactatgatgtcaagtaaaattttatccaatgtgcatatctgcaaatcgaatggaaaaacacagtcgatgtatgccgtgccattgtagcaattaccagaaaaacacaattagagtacaacataaaatgtgctacgaatgtcaaaattttaatcttacttaaccatcaatcgccatttggatgctttctttgtcttccttcttttctacatcatttttgcccttttcatccacccccgactccaaacgggaagggcttccgtcttctttcaccgctgattccttttctatttcaatcaatgctgaagttctttctagcatttcttggcagtcaacagcattgaccatcacagtcaagctggccttacctttccagcagcttatggcaattgtcgactcatctacttggataggactcgatgtcgcctgaccatctgtaaaaatttggactagtttaggaaagtaaaataaccaagggaaacccaattttcaatcatcataacatgatgacacatacctttccccaaaactatcacacagcttcctagtaacaactctgacactttcttgccaaactcagcatcaacaaaatcggcaaatttgatggatttatactgtaaaagatgcttgaaatctacaggggatgcatataggatttgttttgtgacatatgggagaataactggtaatccttcagaggatatccggaatatacagggtgcagagcttccttctcgtgacgtttgtcgttcctgtttattattatggaaggcaaatcagatagtttccatatattattatatcttaacagtatagcagtctcatatggcagaagagcagtgaattggggatgattttaaattgtttgtgtcagtctcataccattgcatactagaaaaatgacaaaagatcagtgattcggtggtgattttaaaatgtttgtttccagtggtattaacgatgacctgaagtttctatctaaatcataaagtaaacaaagcaaagatcataggcatctagggcaggtagaattgtcattaatcaaaaccacaaggtcaagtacggaggttcatcaggaattaatcatccaactcctttcaccccctatttgtctagagaaaacataaaaaggccacacatggtaataagtaataacaatgaatagggaaccctgtggaaaatttttgattctagacgcctaataataagaaataacacacaacatgcatttctagcaaaagaaagaaagaaaacataatttattgaattgaaaaacttacaaacatcttcaggccaatagacgcaatcttaagttgctgtccaacagataagttcagttgaagaacatccttaactgactttgagatatagtatattctcttcacgtgattattatcaaggtttctcaccacaagatggccagtcaatggaaaagattcatcaatgccatagaatgcctttatgttactaatagtaacctcatctttaaagaaaataactgggtcaacccctttccactttccttgtctctgtaactttcttttccctccaactttattgaaatcagatttactgtcactaggttcttgggttacttctatattttgcacttcagatgtaacagagagatctggttcattatctatcaaatccccaggttcttggactactaaattttgttcttcagatgcaacagatagatctggtgccacaacagcatcatcctctttatcaatcaaatcgacctctcgagctgctgcttctgcaaattggccattggtaacatcgttatagtcaacctccaacccatttgaatcttcagtgacctgcttttgaagatctccttgtggcccattgttcccaaagcacttttctttctgacagtttgacttctcctgaacagcaactgggtggaaatggaaaaacaaatttaaaatcataccaaggaagagatacctgtattcagattttagcatgaacattatccttagtttattaaccagaacatatatagagattcaagaataaaaaagatcaatattcaagaattcataataaactgcatgatttggacaatatggaatgcacctggcagtgaggaatgcttgtgaaagacagcaataaagaaggctccagtattttgatcatgaggcaatattctaatgcaacgttctagtggaaaattagaaacttcctcagctgtacttgaattctctgttgaacataaggaatcttcacaattatcacttccaccattctcatcctctttgtctggctccttaccagtaatgtcattttcatttgcatccctgtcactactaccagaaggaaacatgctaggaagaaccgcatctgtacggtatttggaaacatctttgtaagaagccatcaagacacccttatcacgtacctgcatgtaggaggatattggcttgaaactttagttgcagatagatgtaacttgtaattgtcaagaattactctacgaatgtttgggtaacaaagttactaggacaagtccagtcaaagacaagtatttgaaaagttctttaaattttccttttgatcagatacttttagggaaagacaaggacataatgcccaaaaaagaaggaacatcggtataatattattaacctaacattatcgctgtcaaaaagaagaattaaaaaattaacctaacattatcattgtaaggatattttttttttgaaaaaggagaatagatccttaagtcattgacaggatcctccccgatatatattaaaagtctcccttatggtggaagaaaaccataattacaaataataacaaaa

SEQ ID NO: 115295 - DNA, 1215 bp, Cannabis sativa
tttaaactctcaagaagaataattaagcacacacaatttttctctcgagctatctctctctctctctcttgcagctcccttcaagttggtgctatggcgaaaacaagagctaaggttcagggaaagattcaactgtctgctaaaaagaagaaaaaatgacctaattcaacagttgatgttaagaaaactaagttgatggaagaagtcttgggggtgaaaccacttgaattcactgatgaagaggatgatggagcagctactgttgctgcagtagaatcagatccattgcgagacatactaccagctcctatgtctccaaagtcttcgttgaattcgataactcagcaagatattcgatttgattttgctcacatcatggaggccaataagaattgctctgtttcaattgcaaaaggtaactcgataacactcccaatgctcagatctgggaatatggctaggaatctagagtctacctttgataagtctgagaaagagaaggcagttaagatcactatggaagacattgaagaagagatagcttactggaaatcatctatagtctactatgtgctaggagccaatccaccattatcagtattggatggattcgttcgacgcatctggattagaaaaattgacaaggcaggcctgctctcgtatggtgtattcttaatcagatttgatacaatggagcatcgtgatgaagttattaatggtggttttatattcttcaacaagaggcctgtcatcatgaaggcttgggatccaaacaccaacttcaaaaaagaggatatccgtactgttccaatctgggtacatcttactgatttggagtaaaaatattagggccaaagagctttgttcaaaatcataggccaagttggaaaacctatcatggttgatgatgctaccaaagagagagacaaactgagctatccaagagtccttatccaagtctcaattcatcaagatttcccaggtactatctattttgaagatgagcatggtaataacatacttgtggaaatctattatgaatggaaacctataagttgtgggaattgtaaaagaatagggcatgccactgctgattgccgcaaagaagaaagtatgaaataggaattggttgtcaagaatgataagagggaaatagaagaaaagccacagccagtaccaggggagttcctattggaatttattttaccaagatct

SEQ ID NO: 115296 - DNA, 2589 bp, Cannabis sativa
ataaataaataaacataactttataaacttcaaacattatttaattagaaaaaataaaatataaattgtagataagtttatgggtatataatttacctaacgaacacaaaattatttataactctgttcaaaaaaattaaaaatcatattaagaattatatattttataataaacaaaaatgtgattatatattaacaaaatataaacaaaaaaatgtgcatacatttataacacaaataataacaaaaaaaaaaaaatacaaatcaaaagaaaacttgtaagatatatgaatacataatagtcaataatagtatgaaattaagtatttatgttaagtacatttatgtttaaatttagcaagaattatagaatataaaaaaagaaatatataatagtcaataattattactatatatgtattataaaaaaaattaatttttttttattatatctaaaaatatttgagaaaatggtaataagttttttttgtaaatattttgtaattaattaaaataatgtatacaagattgtaaaatacttctcaatgagtattagtcattaatgagtactaagccaatttaactgtaaatattaattttaaaaatattaaactattaaatttttgcccgatagcgaataataaaagagaaattataatttctatgcataatttagctactaaattaaaaaaaatatataaaaaaatacttcttcttacactatattaaaaatatatttatataaaaattttttaagtcaaactcaattttttttatcacttttttgcccatttttttttatttatttctttttttttttcaattgatgtaccgattccaacccatataatgtaaaaatgagaaattttttttaattaaattaattataaaacttattttttttaatattatttatttatgggtaatacctgttaaaaatacacatgtatataatagatgtagacaatcataggtaacagttcaatgaacgttgaagctattataaatgttttcacattaggtatttgatcaaactatatatcccccaacaagatctgtaaaagtcttaataccaaatagtgaattttattatattattattttgagatgtatgcataaactctactgtgaaaatggtgtgtaactctcattcttatttctaatttccccacaatccaaatatgtcaagctgaaaaagttatgttgtggttgatgatggatggttcacctaattcctctccacttgaacattacaactttattcatatatattaataaaaactaatattaattaattcattccattatataaaaatatataaaataaaaaggggtgaccaagctatgtatgatctgatgagtcaaagagaagttacttttttttttttttgagacatgagagaagttactagtttagctagggagaaaagaaaaatatatataaacaaaaaatgttgtgctcttagctagtctagaatgtgctcctttataaaccactagatatatatgactaaagctcagtgacatctgtatctatttatttaaataaataaataaatagttatattataaataaataaaatgcctcattgtagggtctcatatttagcaacaaatttcaggctcaataattactatatccaagtccaattggaactagattagacccaccattatgttatacttctaatgaagatttgttgtgatgagcattcatagtaatcattttagcatcttcaaaaatttattaagttttattatcccctacttttatctaaagctaacgtccacaattccaatggctaatatatatatatataaaaattggtgaatttaactcactttcttcttgccacatcagctatctacttatcttagttggcaaaaactcctagttaaaataattaaagctgaaaccagttaaaacaagcttcaccatccaatataaaaggcagccactcatcatatgattgtccaaggcttttttagttcaattgtacattgatttttcatccagtagtcttagaaagttttaatatttttgagagagtttggagggatgttaaagttatcctcatattaaatgtatttaatagaggaggctcaagtaatgattaatttgtaattgttcttgcattgttttcctctacaaaatgtacagataaattcaatctatactccatataatacaatgatcgtgaataaataaagtggctgtaagtttttgctattcttcatgtgttcatttaaatttagttttagttcttgttcttacttcatttttatttatttgtatcttgcatttgctgttttttttttttagatcaatcttgccactgttgttgatcaacattgtgaattaagtgtttcaccacaaatagtattagagtaatgtttcaagatctgcattcaaatctccaagattgatcttcaaacatcaagaaactattgaaactaaatggctactgtaagattcaaggtggacaaatttaatagaacaaatgatttcaatttatggaggattaagatgaaagtcttccttgtactatagggaattcatgaagttcttgatgaagaggctatgaaact

SEQ ID NO: 115297 - DNA, 1982 bp, Cannabis sativa
aattttttaaaaaatgtttaaataactcaataaagataaaaatgtaaaaaaatagcaaaaaaagataccaagtgtaaaaatcccaaaaataaatgtgactatataagtagatttaatagtttgtcctttagtcaaaatatctttttttaaaaaaattaaaataattaaataacaagattttacatatttaatttaaaattaaaaatatagtatctatatctcatatataaagttgtgtttgtctcatgttttctcttagcttcaatctttcatttccactacttttcttgattcacaagttatgttcatattcctttgctttactctaataatttcttcataaagtcattaattatatattgaaagaagattattaattaactctctctatctccttctaataattttcatcttaattaatttctaatggcttcaatggctgctagtacaatatctataactctccctattgtggctgctgctcttggtctttacttatgtgataaaggccaccccaagactaataaaaaggtaataaataaccaaagaatcatttatttatttattttttttttgaataatctaaggaattaatcaagtacttgtgatgttcaggaatctggagatgagattcgaaatactgtgtctagatcaagaacaatggaggttaagagtactaataggattccaaagtttgctcctcaatttgatgggttggattgttttgagacttttgttgcttgatatattgatatcatgtatgtatggtgtttaatattaggaacatctatatgtgtgtataactatatgtaatttttgtaagatttatcattagagatagaaatttaactttaatatatgtgattatgctgttattcatttacaggttcaactctctatacttaatttgaattgattatataatgattgactttcttgttcatcataaccctcttattatgtttgttaatgaattggcaagaaattcatatgaaagaaaacatatgattcaagttgagaagagatagagaaagaacaattgaaattctgtaagagaaagcactctgaaaatgaaaatagtataaaataatattgggtaattaggattttttctttccgaaatttaacgaccttaaaagttcgagaggcttgatttagtacatgtcaaaattcaaggaaaaaaaatcctaattagccaataatattttaaacttaattttcatcaattagtatgtacccttatgaattaaattggcaagaaatgcagtaagaaaatgcattgtgaaattctgaaatatttttatctaatttttaagtatttacaacagtacacaagtgtcttatattattctaaggacaaagaatctctgtgttcacaatctctttctcacatttgaaaatcttcttgccaccccaaatataactgcctttgttaacagtcctttgtcaaaagtgcaagcaaagatcatagcccccccaagaattagtagcttcggtatatttctaccctgcggtttttcagataaagtatctactcgagtctctgatgaatcgccgttaccatcatcatcgtcgccatctaccaacattgctctcatgtaatcgggattgattttgctgttgatattagccataaaagcctgtcgagagagtgagattcctgatgctctttctttctgatatgccctgaaaccggtgtccatgtttttgacagtaccccacattcctttcttcactccaatcttagcgatttcccatggaattcccatgtcttcgtgatggaagagcagcacttcacaggcggtaagctgaccgtcaccactcattgattccactgcttcaaaaaacatagagacaagaggttataacagtgattgatcaaagtgttagaatactgtaaactctgaatatagccctaattaattcaagagaatcaaacaataagattaaggaatagcggaagcgtaccggagtccatagaa

SEQ ID NO: 115298 - DNA, 1449 bp, Cannabis sativa
aagtacttttgagatgaaagaggaaagttgagctgttactttgccattggccccgatagctaacagtacgagtatttcccttgagtacatggagaagaattgaacctgattgactaattcaattctcttcgcacttgtgatcttattgaagactactttgaggaaagtagtcactacaatgctcggaatgaatattctcacagcgggtcgtcccgagacgatctagagttcattctggaggcttcaccagagttgccttcacgatcccgtggttaggagacaactacaagaatactgaaattaatataagaaaataaaaatctgaataataagaatttaattaattaatgtgtaaatgacaaaaaaattaagaactcttgataaaataataatttaattttttgccaaaggtcttcttagtttgagatggaaaatattagaattttttttttactgaactcacatcatcagagtcctgggattgggatatgcatgcatgcatgcagatatatatttatatatatatatatatatttatatatttatggagggtaaatattaatttgaatgtttggttttttaagcatatttggtggtttctgcttttcacgtcaatcttctaaactagtgcaaacacactatcacataacataacataactccttttcatacttataatcaaaaccttttctttcatatttatagaacctttaacttctttcttaacatttcaattttttctcctttttttattctttttatatacatgcattaattatatctgtcttcatgtcacttcctcatcagtagacatgcatgggagttgagtgagttcacttctttaattttgccttttctttttcttaaaaaaattaataataaaaacattctttgggcttaggtgggctctcatgtgggcctaatgcaaacactatcacataacataggaagtaggaaccccttttcatactattaaactttttctttcatattgatagaacctttaacctctttcttaacatttccagtttttctctttttttcattcttttatattcatgcattaattatatctgttttcgtgtcacttcctaatcagtagacatatgggagttgatgagttgggacataaacaataatctaagctaagcttcacttgtttaattttacctcccaagaaagagaaacaccctttcggcttaagtgggctctcatgtgggcctaccttcaatatatacaaccaaatggattcttctacaaatccacacttgagaaaaaaggaacatcatcacctcttgtaattcttttgcatatcaataaaacaattagttcaagctaaactttgcaatttttttttttttttgaatataaatgtagtcagaatgggttcgtttggtacaccatattacactgtattatattgtattgtataatattatattaaattgt

SEQ ID NO: 115299 - DNA, 2384 bp, Cannabis sativa
tcaattcaaggagtatgcatgagccatgaacagtgcatttccagcagagcctgcaaccaattaagctttaccaaacctcttttaatagtttcaaattcaatacatcttctgttcccactaacttttaataactacattttaaatattatatcaaccatttcaaggcaaggtataaataatgctaaaattttaagcactggcaaaagtatggtaaagagagttacttattctgaggaaacaaatcattcagtataaacatcaaaaacaatatgaggatatgtatatagaatctacaacagttacagtaatggttggttcctaatcccaatcaagttattgtaatagagagaatgttgtttcaattcaagaaaacatgtttctgaacttgggatcataagaaagatcagacaagacagacttgaactatattaaagaaaaaaacttattataaggataaacaaaaatagagggaagagaagaagatgatgatgaagaaactagaaaacctgtaagactggcctctttccaagcctcttgatctctttgtccattttcccagtaagcattaaaccaaacatcttgtaatcacagagaagagaccaaattggatgcccaaaagtggctggaatatttccttcaatgaagaaatggctgtaccaagcgcatccatagccagataatggcacaaagagcagaaaccaccaactaaaaaacaaagaacataacaagaagaagatactagaagctgtaccaatgaaatgccaacgccttgttaaaggtttcgagtgttgattcacataaaaagcccaaaactcatccatgttcctgaaattcatatctgataaaaagaaataaagggagaaacttttatatactgaaaaccttaattctttcgctaccttgttcagaacccaaatccaacaaatcttcaacaaataccaatcaagttcgccactttattcaaaacccaattcagaaacgtaaaattattgggttctgaagttgacccaaatcagaaatcttatcccttatcttgatggaagagcttctgttctggataaccccaaaattgaatctgggtatttgtcaatgattaatgaaatgatgattaggaggtaaatcaaattctgagtttcaccgaaatcatcgttaggagaagatttccaaaaacataatcttttggagttgaccaaaagccaaagagaatgaagcaagagaatcttctcttctttcttcttcttcttcaaaaacaaaggtgtgaatagttttggaatttagtgatatgttgtttagtttagattgctgacatattttgtttgtggaaattttggactatggaaaaggtgaagtgtaattctctttagaattgcgtgcttggaaatgaatagccaaattaggtttagggtctaagaccagtccacaattttatttcaactcatcattgtcttcaccaattacccaaattagaaccaaccaagaaattttgcttcttgtggagatttcattattaacacattatagtaagtttctcttaactcttattattattgttgttttgtgacaacattcatgtagtgaatattagtcatttctattatttttttcactttaataaaaatgaaaattcttttacatttttttgtaattattgaaagtgatacaaataatatataatattttacacctaaaacttaaggtatgtttttcaaaatctaagttcttatactaagagatctattgatagtgcttgagcacttgtatataccataggagcattgctatttggccagtaagttggaggtgataaccaattacaataaatgacacttgaaaaatatttttaccatttctcttgaatattttgtcccgaaataaaagctgcttgagtaggacagatcaatcgaaaaagtatcggtctaattctattagcaatgattttgaaattgccttgtacttgtagactatattgcaaagagaaataggtctgaactgggatacttttttcgggttaggcaccttaagaatgagggtcacatttgtagcattgagacccctatacatagtccccgattgaaaaaaaattcaccactgcctcacaaaaatccgtacccactgagttccaataatgtttgaagaagagaaccgacataccatccgaacttggggccttcaaaattgccataaagaagagtgtttgtctaatttcttcatgccccggtataatttctaacgcagcctgctctagaagagagagttgatccgaaattaaatagtccagattctctaaaggaccttggactaggttggtaaaaatgtcctttagaaaatttgagaattcactagtgttgaccgaggttttaggcaactattaaaatataattata

SEQ ID NO: 115300 - DNA, 1852 bp, Cannabis sativa
  modified_base (1198)..(1200): a, c, t, g, unknown or other
gaattaaaatcatccttaatagggatgaagataggagagcactccccgccaattccctgccctttgtgccacatctcatattttaaatttatgcatcaatgtcttttttcaccaaataaaaaaaggttcaaataagaaatctaaaaaaattagttgcagtttaaggcaccttgtattttggtgccatgctcggcccctattcaaataaaggagttgatatgtgcacatatgaattatatacaatattagcatacttatttgagaaatttttaacaagtggatccatcataaataaaatgattgatttaagtgccacaccatataggtttgtcaagtttgtgtttgatttaacaatgcacatcattgatgttagacgaaagtattaactatgctaaccaaaacaacgacgtgagatactccttcgatcttagacaaatggtaactagaactgaactaattaatcttggatgttaggggataagttcacttggtttcaaaagtcttcgagtacccatagtggtacctcggttaagtgagctcagcttgatagagctatggcctctacctattggagaattatgttccctaatactatagtggagcttcttacagtgagtaaatcagattacagatcgattcttctagtggatattatagcccctctaattagtccttatgatatattcaggatcacgggttgtagggattttagtggatattatagcctctctacctcgtcttctagtgattatggtaaattccttcggcaggaaattatgccccaatcttcccttttacttgtctttcaattaatgcttaacactttgttttgtcccgcagaaatgaattttgagaatcttgtccataagaaggaaaagaagaggctgaccatctcggaggtcccatcagacgcagaagtggagcccccaaagaggtccaagaagactacggctaacaagaagcgagcctcccaacctgctaaccttgaggttcttgagactgagaatcaggatccaatccctccttctgcccccgcaagtactggcgagcctattcccaatgcaacccaagccttcgcctcttcgagccaagccctcaaaactttacctgtcgaggctggaaaaactggcccagagtacactgcagagtttggtgcaatatgctggcgtcacttcaagtctttcctcccccatgaatnnnatttaatcaatcatggggatttggggaatatgcttacaaggagtttgtctcacagtctttcggtaaatttccttacctttatttgctcacttctcttcttttttcttttctttccgtcaaaatacttatgtatttttgttggttggtttctagacatcttttatttcttttgtggcccagcaacgaggcatggacaagatcaagtacctggagggtgagatccagaacttgataggctagcgcgaggttgtgactaagcagtggaatgatgcccaactggagattaatcgccttactaaagatgccgaaaagttgaagaagagccttgagcccaagcttgaagctgccaagaaggaggcaaaggacaagaccgatgaatgccagaaactcaaaggggaactcgatgtagctaaggtaacgcttgatgggaaagaggccgaaaccattgaacgatgcaacgttgttggccttcgtaccatttatcaagcttggatggaaaatccgagatgaatacgagtttcttggaagattctgaggaggaaatcctttctttctgcgagaagactaaaaaggaggaagaggatgctgaggcagcaacagaagaagaactatccaagtctcctactatgtaggcttggtttttattaatttt

SEQ ID NO: 115301 - DNA, 2033 bp, Cannabis sativa
  modified_base (1996)..(2000): a, c, t, g, unknown or other
gcctacattgtactagtggaaagtcgttacattaaattttatgagacccgatacttaattacatcgatagagttattacatcttagaaagtattaggcaccattactaacttttagcatttttctttatttatggtctaattttgaatcgtgaatattagatcagattagctaaatcttgaacacagctacataaaactaaatttacaagtattgtccataccgtatatgcatgtttgtttaaggttttacctttgttttcttcctttgcactatacttttttatatctagctgggataagatttgaatttatgttcttgtggggaaaaactaaaaatgttttaagacattatttcaaaaatggcagaagaaaagagttaaattgctctttgaaaacaagtaatgctagctagtaattaagttttgttaattacatgtattaattagtactccaagctagaaaggtgatggacatattaacctttagatcttcgccttttcaaaattcagacacatgcgaaaaatcaaattagtttgtaatcaaagaaaagggtgcaaaaacatataataaaatgcatttgaaagcagtaataggaataatgtggatgtagtaatatatgttatgtcagctgtgctcttttgtttagcttcaagtacatctgtgcagtcaagaccttctttcccttctctacactgcaaagcaaagaggccaggtgggtactttccatacaaattaatgtagctaaacatagttgaagcacagtcactttgctcgtcgtttattgcgtctgcaaaagggcatgcgaattccttgaatgccgagcagcaagactgaggtgggtattgaggtcctttacacatgcttgtgattattgtatagttttgtgactcaaaatttattgcacacgctgagaatcaaaaatatgtatatgtatacaaaagaaacaaataatctttcaagtcttcttccattatgtattgtatggaaaatcatatatatgaatgaactaattgaaactctaaaatatgaaaaatttgttcatgtatatcatttaataatttcacgcatttacgcacggagaatataaaagagaagaaatactctgatcaaaacaattgtcatgcatgtattatataataaagtgtgtgtgtgtgtgtgtttggtagaataaaacttatgataattttcatggaaaagatatcagcattttagtacaatactactcttgccaaattaaatgattatgcaatatctatatagaaatgagagaacaaaaggagtttactctttttggcctgaagaagagcacgagatgtggaaccatgtaactcaaaaagggtatctgcaacaatcccaacaaagaaattagattgtaaaatatatcccaattttagttttgtttatacaaattagtaaaatataatgaatttatgtatgtacctgaaaggaaggtggtagagaaggcaaagcctagcagaagggagcaggtgaagaagaaaatatgagataggcatggttggttagtgaaagccattgttgaagagttatttctaataatctaaagcaaataaaggtggagggagacaggagaggttggtctccgtcttccaagagatgggtcacccaatttttttttaaatgcaccttttttgtttgttaatgtgtgtgtgtgggcaaaggaatgaaaagagttggaattttgaatggagaagagtaaatagttgcaaaatatgtgggacaataaagaagaggatcctttttagttaaaatattaataataataaaataacttaaatagaatgtttaatttttttttaatgaattattaggtattgtatatgtttatataaaaatgactttttttcggttaaattctctcaattattattctacttgcacttaacaatccaaactcaaattttggtagtgaatatttccaaactactcaattgttagtagatttaaggtgacatctgtaacaccctaactagcatnnnnntattacgtgatttttaaacatattgtgcagctc

SEQ ID NO: 115302 - DNA, 4230 bp, Cannabis sativa
  modified_base (47)..(48): a, c, t, g, unknown or other
  modified_base (4182)..(4188): a, c, t, g, unknown or other
ttctctaattttcttacagctctataatcttataatattttattggnngccgaaaacctcggtcaacattgaggtatccaaaaatcaccacaaatgggtaaccgtttacccagggcctaccagatgaaatggttactcatttctccaaaaacggtaaacggtttcactgcagttttttaaaactcaaactttttcaattctaatccaacccaaacctactcaatctcagagatattttccaaaatagtcctaaaatgagttctaaatataatccacaactcaaaaatcataatttcactaagaatcaaaaatcaccattgttgagcgaattttgagttctaaaattcaaactcactcaactcttgctacaacgactattacacttcaaaatcaacttcaaaccagcttaaaaataattcttaatctccccaaactcgtatagaatcaagtcaacaaaatcatgaaatcaaactttaacttgaaaattaaaagggaaaataaacttagatctatccttaaaattaaagccgaaaaacctttttgaaagtatgaattgggttgaattgttctttgttttctctgggtttagattaggtcgagagagagggtttgaagagaaagagagtgtgccttgattttcttagtgaagttatataattccttcttgaataatctaatgacttcaatatataacactttgtttttcaccaaaatccactaaaataataattcttgaataatcttaggttaaaaaagtcaatagtgcccttgccttaccactaagtaaccttcataactaagagtaaaatggtcataataaattactccacataaccctaatattctaactgttctaaaatattgcctcgttaaatcaaagatcctcaatcgtataaaagtgaaactaatggccaaaccgtcgaatttcactgttaccaggcataaaatataaaaatatcataattcataaataacatgtatgacacacctagaattcaataaaatctctataaatgagaaattatttcactaatgcttatttctaacaatagagcttatttcattttaatgcacatatatcataaataataataataataattaaattactaataaactgctaaatatctcctaattttcatgtctaaatatacggtcattacaattatatcccagttaaaaggattctatcctcaaaatctaatctgaacaattctgggtattgagccatcgtatcggattctaactcccaaaaagcttcctccaccttgatgttcctccacggtactttgaccaaagctatggtcttgttttgaaggaacttatcatttttatttaggatttgagctagttgttcctaatttgacaagtctggctacaactttaaagcttcataactaaagacatgagttggatttaacacatacttccttagcattgatacatgaaaaaaaaaaaagtgtgcattgctaacaatgtaggaggtaaagctaggtggtatgctacttgaccaactttctcaagaatctcaaatggccctgtaaaccaagggcttaattttcctttctttttgaagtgcttcacacattttattggtgaaactcgtacaaaaatatgatgtcttacctgtaactctatatttttgcacttcggatgtgcataacttttccacttactttgagaaccaagcattcaagccttgatcttttccatagcttcactggtcttcttaaatgattttggacccaaatactttttttcttgggtttcatccaagtgaatcggagaacgacactttctaccatacagcatctctctcatagagagtcacccctattgtactttgataactgttgttataggataattctatcaatggaaagaacgtactccataaactttcaaaatccattacacatgctcataacatgtcctctaatatctaaattattttttcaaaatggccatctgtctgagggtgtaaagatgtactaaactttagctttgtatccatggttttttggagactctcccaaaagttggaactaaactttggatctctatttgaaacaatggacttcaaagtcctgtggagataaactatttctttcacatataactctgcaaatggatccactaacaaagttgttttcaccaattgaaaatgtgttgagttagtgaaactattcactattaccaaatcaaatcatacaatctcctggttctaggtaatccaaccataaacccatactaatatcttcccaaatccacttggtaagagtcaaaggctgcaacaaatctgcaagcttctgatgtttaacctaaatatgctgacaagtgaaaaacttggatacataatctgccatatacttttcaaaccgcaccactaatagtagggtttcaagtcttgatacgtcttggtggtacccagatgcaacgagtaagaagtggtgtgagcttcatctaaagtctcttttctaagctcactattgttcggaacacaaacttgattcgtgtaaagtagcatcaaatatctcatactgagaagtcttttgctcgaccaactaaaacttcctcccgagacttatctttaaatatttttttgagttatttttatgccagccttttatttttacaataatctgtcctatttgatctccaactacttttggctttgggtgcacaagttgattcatgggcttgttactttttgataatttgttttatggttgatcaatatgtaatgtcgggaattttaatatggtctgacatgatattcttctttattctagtttgaataattagcatgtgtttacccaatttttattgaaagatcttgggcttattgtcattgatgggtctagtctgtcatatgttcattcaggataaaaatagtatacttcgcattattttgatgcttcacaattgatggcttatgggtcattgtgttaaagatattgttagggattttgtcctagttattgcaaacagcttggctagcctatttttgttgattcttctcaatgagcactatctgtatgtgatggattatatctcatttacctattaataaaaattttatttaccttttaaaataattatatatatttttttaaaaggtaaaagaaactatttactaatgggttaatgttacattccaagaaatatgcacaaagagcaaagtcaaacgatatagacatatcgagttgttgtcttcttttttgtaaggaatacatgtcatcacctgagaatctccctgagcgagatgtgggcttgggcttagactgattgagaatgttcctcgataccacgggaaatgggatccctgaaaggcttatgttggacattagctcactaaaccaatcactagcagaatactacaacatttttttcactaaaccaactactggcagaatgctacagcatcagttcagcacatctatctattttttgttctcgataggcagttaagttggcttttatttctgtccaactatctcaactgccaatacctataaatagtcataacaacctacactcaagataacttcaacacctagaagatctttctacagtcaagatttctatcttttctttctctctcgaattgtaccctattctagagatttagtgtgtgaaggagagttgtaaaagatttttagtgttgagactcttcattgtgagatcatttgtaattggtgttgtatactagtgtaattaagtttggaaactcttgttgtaatgtgctaaatgttaataaagattcaatcatttttgtgccattgatttcaagctaagcctctctgttcttgttttatttttctagtctaagtttaattctgtttgaatgtttgaaattgtgattcttatgaactgttattgatcataacagcaagttcaaggtgaatctaattcagaacaacttactaggctccccgaaaggtcatactctcagttataccttttaggtcccatgcttacaatgctgaagaagagaccttataatctagggtataaatctataccatttttttttgttaaacaagaaaacatattatgtaatatttaaattttgtttcatattatattattatattcttaataactgttttactaatatatatttaatatataataaaattaggagaattactccctatactatttttttaactttttttnnnnnnntttacggtttgggtttctaaagtgattgcagcgctagttgca

SEQ ID NO: 115303 - DNA, 1795 bp, Cannabis sativa
gattagggggttaattgcaaaaacatgtctactttaggaggttttgccgcaaataacccttattattattattattattatatagaaaaatattacataaaattagactatccaaccagaaagactatatattgtcaaaccattaaaaagcagtaaattaataattaagacaagttaattaatagttaaaaggaaaataagggaagtgtatgtctttgttaaatgaagaataaaacatttatatacataattgtttataaaatataaaataatcttttctataattattaaagtgcctatgcataataataataaatacgtgttcagtgtaatttacaaaatacgcgatcgttcagtttgatttttttatttactgtcatttttttacaaaaatactgtctactgcagtatactgtatttatttttttaatttttttatttattttacagttatttttctaacgtcgattttactgttcatactccatcttgttagaattaatgattgtttcgtaggtgttctcgtggtgctgtggtggttctatccgtgagtgtagaaaatggacgctataacatttcttcttctttctctatggttattttgtggttatatttttattttagttctcctaaaaatacatttggcgagctcacgagaaaaaaatttgaggtgtgtggttcttttatatttttctaagtggttatatttgtttattgttttacatttatttttgtgttgatttaatagtttttttgttttgattttttaagattgggcttgcaaatataactgctattgcattggtattgaggttgtacagaacattttttagttttttttaatcatgtttaactttcttttgtttgatttgttttagtgttgttttacaattgttttgccatgattatttatttgacgtcgatttcacatttttcttctcaatgtcacaagaatatatggttattttctaattgttctggtgttcctatggtagttctgtcagtgagtgtagaagatagaaacctcatttttttggtgtttactgtataaaagaaaaaaaaaattggtcaaaacagtatacaagtaatttcttctgctgtatgacaatatttttgtagagattgagccaacagtcaatatttttgtaaatttctctatattttactgttatgtattcaagatgatcagtttggtaacatgggccaacccaacatagcccatgggcaaaatttcaaggacctgaattactattagcccatttcattgtggtaatttacattgtacagtaacatcataaatttaaatttagtttttataaatatatagaccaaaatatatgataccaccaaaatacagttttggaaaaccctatctattttgggatctggaatacaaaagtcaattttttttttctcatagttacagttatttaagatattttataaaattttgaaatttttttaaaaaaattaacacgttgaaaatagggttcaaattgtgtattgtacacgtgactattttattttatacacgtgtaaaataagatatttgaatactactttttatattgaatattctaaatttctcaaaattttataggatatcttaaataactataacatacaaaaatattaaaaaaattaaattaaaaaattttgtatgccgaaataagtagaaattgcatcggtacattcttcactataaatttgtttacttttagtcacaacaaaacttgggactaaaaataaaaaaaattgtgactaattataaatcaccattcctatgttgtgacta

SEQ ID NO: 115304 - DNA, 976 bp, Cannabis sativa
aaagtaaaaaataccgcctggcagtatttttgtaaaaaaatagcaaaagttagcatactatgtaaatttccctaaaattaagggaacccttcatatgttgaacccattgggcttggcccaaataatggaaataatccatgtattgaggagggccatcagttacactttacgggtcaaacagggccacccaccaaacccaacttaagccccatcaacccaatccgcccaaaccctaatcaattcaataacatattgattaccgctgcttctttgcaatctccaccactaacgtccatggcgactttaaccaacaaaccaccaactatgtgccaaatgtcagagacaaaatatcaagaaaagagaatgaaagggctatgtttaatatgtgataaaaaataatatcgagggcatgaatatcagaaaaaattgttacaagtattattgtttgtggatgaagatgagcctctgtcggtcctggagtcaccaccaccatctctggtggctgacgaagccgaagtaacataagacactccgacgactctctcattaaacttcctggttgaaatctcatcagtgcacaccatgaagctggttgggaaaattggccagcaaccagtggcagtactcattgatagcggggcaaaacacaacttcatttctcttgaggtggtagaagccacaggtattccaattactcaaactaatggctattgcattcttttgagtacaagtgatttggtcaaggcaaaaggagtgtgtgcttaagtgactttggagctcggagctcttcgtgttgtgatagaattgggagggctaatgttatattgggaatgaagtggctggaaaccctgggtaatatccaagttacttggtgttagatattagatgtatattagctgtaagagagttagatatttagtaaatatttagtagatatttagtctcctaactctgtatataaatatgtattattcta

SEQ ID NO: 115305 - DNA, 596 bp, Cannabis sativa
ccaaacaaatattattcctaaactatttacccatataatttcacgtgtttttattattttaattaattaacaaacaaatattactcctacaatctatttttatatataggaaatttttaaagtgggaaatttactttaatatttctatatatcttatcagacagatatagaatagtttcatagtactgaatttattgtgttatttttattttacttaatttataaattttttctacctgacatttcaaatcaataaatataattggtcaaaaaagtcttcttcataatctaataaagacttttctagttgtctttctaatgaggggtgtcattccatgaaaatttgataatgtgtgataagtgtttagttttggtttgttactatttttttcttggctttctttgataatgatcattagttttggtctgtttgtattattcagtttcttgccaatttggctttaatgaatagagtccttattgaagcctagctatttcaaaaaaaaatattgttcaagttataataattttaattggctaataatcaatttttttccccgaactttgacatgtactaaatcatgttcttgaacttt

SEQ ID NO: 115306 - DNA, 880 bp, Cannabis sativa
tatatatatgtgtgtagttaaaaatgatttgggcaagtctaatgatctgttagttgcttgtgctagaatgacatatgagttgaagactgcctctgtttttaggcattttaatgcgtatgtttatccatttaaaaaaagaaaagaaaaggagaacgcctatttttattgccctcctcacctcctcccagagaaataaatgcatacataaatggtggctgcaaatgttgtttgttgctgccctttgtttctttttgaattccagctcctcatctaatcctacaatactacttaatatgaaatatgtcatacctgaactcttttaacagaaatgaaagaatatttttacaatagtacttttacttgcttgtattacttagctaaattgtttcttgtccagggtataatgtctgcacaattttcttcattactttttcttgtggtgggtatttcaatggccctcacaccatggcttgctgctggaggccagttaattgcatctcgttttgagcagcacgatgttcgaagtttattacctgtggagagtgaggtagcaaatcatgagaaatcactattgcttatattttattaattttcagggatttggtgcatgaattatttattttatagtgtgaatcatgctttccactgcattgcacttctttctatgcagaatctacaaaaatttaaaaaacaaatatgcataattttactacattttactattttagacagaagctacagaaatattggctcattagtcattttaatcactttggctactgatctacaaaacattacaataaagcttttagtagattaatgagtttgcgatgatgcaaatataattagaaatgtttatatctatataaatatatatata

SEQ ID NO: 115307 - DNA, 2266 bp, Cannabis sativa
agtccgaaaggcatgactaggtaacagtatacccccttatcggtcctaaagctagtacactcctgatcggcgacatgcattttgatctgattgtacccgaagtaagcatccataaaagataatagcttaaaacctaaggtatcatctaccatttggtcgattctgggcaacaataaataatcctttgggcaagctttgttaagatcagtgaagtctatacagactcgccatattttatttggtttgggtaccagaaccgagttggccaaccactccgggtagtatacgtcatggataaaaatgttggacaacaatttgtctacctccttttccagggcgtcagctttcattgggtctagcggacgtcttttttgttgcattgggggtatatccaggttaacatttaggacatgagtaatcacgtggggacttatcccggtcatgtccccatggcaccatgcaaacacgtccgttgatgcctttatggtatcaatgattttactccgctcctctggttttaggttcttacctaggcagataactttagatgggtcgaggtcacatacccttacatcctcattatcttccatgggttctaacgctgcttcaaagctaacacgagggtctaatttgtcctgtttattgccaacgtcggtcccgacccttgtattgttaggaccgataatgtactacagcgttataacactgtcttgcttctccctggttacccctaaccgttcccactcctacctcttgggtaggaaacttaaggcacaggtgtcggatggctgggattgctctgaagtcaactaaggctagcctcccaagaatggcattataggcaatgggacagtccactactacaaaggtgcaatatttgaatgtgctttagggggtgtttagacacaaggtaatcaggagcctaaccttttccatagggacgagggtcgtctcgttgaatcctgtgagttgtgaatcgctgggggagagatctctgttaatgagcccaatggttgtgaaagcgtctttgaatagcaagttcacggagcttccattgtccaccaatattctggccacaactttatttgcaatgggagtctcgatgaccaaggggtcatgatgcagaaagtgcactgccttgcatcttcctcagtgaagataatgggttgatctatgagcctgggcctttgtgccggaagttgagtaacttcccatatttccttatcatgttttagggccctaacttaacgcttcaattcatttctagtgattcctcgaatatatggacctccagagatcatagtgactgttctgttagtccggggtggcaatccaggtggctgtggatggggcatccctccagaaggtacctggccctccagtgctatcgcgggtcctctttcaggcactgggactctggcttatgtcagattgaggtgtggaaacctattttttagccacttgtactagtggcctaatcagattaaaccctcaatttcatccttcaaatttttgctttcattcgtggtgtgaccaatgtcgttgtgatagtcacaccttttgctggggtctcttcgagaactatctctgtacaaaggaggaggtttccggtaatgcgtattttgctgagtcgcaaaatacacgtgttcttgagagtttgttagcttggtgtattgcgtatattggggcgtatactctttcttttgtcttttatcctcagatcgcgtactacatttagaagacctcttactccgataactttgaggcactcctgccatgcttgtggctagtgcgaattgatttggtagttccgcgttcactacagtaggattacttacggggcccccaggtgcgacagtgctggagccagggcaaactttgaagtgtatcccggagtggcagaaaactgtattctgcttgtttgtggggcggcagggagtgcagctccaggaagttgtgctcctgttgcatatcctgacaatcccgtcgggtaataccctctatacgccattatttgtgcttcttccaagttaatatacttctggaccctattttgaaagtcttggaggctaccagctccttcccattgtagttcattccaaaaaggagttccagtccgaattccaacttagagtaaagctaactattgtccgtcgtcgacctttttagtttttgaagcctcctctttgaacctctttataaaattcttcaaggtctttgttggtagttgttttatgttggtcaaggtgttgggttttgtgcccta

SEQ ID NO: 115308 - DNA, 1565 bp, Cannabis sativa
cacaaatcctccagccatttcttcactcttatctcccaaaacaatgctgctacacaatcaactcaaaaatatataaatatatgtatcagactaataataatgaattgagattgattatatgtcttctttaccttaaaaggtttaatctaaatctcagtcactataatatttttagctgtactgcatccaaattcaaaaaaaaaaaaaaatcttgctatagtgttgatcgagtcaccagtttaaagatcttttaaataataatcaaaattaactaaaaatagagattcgaaagtgcaacaatgtaacaaaaacgttttttttttttaattctctccaaactttatgtttcttattgttatgtttgttatcgtaagccgcgtgatgcgaaattaaagggttttatttaaaagaaattaaattaaaattaattaagttttgaaagatatgatattcttatctaattatctatttagaaggttaaggagaattaatcggattttacaatgcagggtacactttcaattttttatttttttttttttcctaaaagaaaaatagagacaaaggactaaaaaccataatccatccttatccaagtttctttctttcatacaatcttttcctagttggtaaaactaattatctcattctaattcattttcatgatttatgtgttaattagggacacagatagttttcaagaacagcttgcttttacatacgattagatcgtctcagaaaaacagctggctttttattagtaattgagtaactgatgataaatgagttcttatctttttcatgaatgatgaaatatatatatatatatacataaatatttttatatatagcttataatagcataactaattattaattaacaattaaaaattttaagcggtctgtcagcacaaaatttgtaacaatggtacaatgctcctttataattatcttttaaaaataataataataatgcatcgcatcaaagaagaccgttacaaaattcctccaattaagcatgtacaactaatttataagaaacataattaaaagtattttgaaaaattaaacattgaaaatatctaaaaaaaaatccttaagcttaagaagaagaaatattatccattatcatttattttttcatgagagtaaaatagaaggataaccaaatcatgtatgaaaacaagaataataagattcaactaaaaaaagaaatatagattagtgcaataattttgaaaaataaaagtaataataacaatgagatatttattaacaaaattgtactttttttattagaaataaattaatattataataatacactagatttatattacattatcatatataatcaatttttaataaaagcatgtaattaataccacaaaatcaaatgaccttccttttttaaatctgattacaaaatttataaaagattcaactaaactttccttttatgtattgatatatggggattttttaattatataccaaattaacaaattaatattatagttaccgaataaaataaatataccttatatatgtatatttgtaccgaa

SEQ ID NO: 115309 - DNA, 1126 bp, Cannabis sativa
atatatatatatatgatcagtctgcaagcaacaacacaaatcaattaaagtaattccaaaattaccatttgaaaacaaaaaatccaaggatcattgcaaaataattttgaacccattaaactataagaccaaataaccaaatgaaagaggacaaaatatcttatataaaaggcaataaacaactagtgattaaaaaagaaaaaggtgagtttagtgatcctataaaaattaaattatcgaggtccagagaagttcatttttatttatttaaaaaaaaaaaagagaaaaaaaactcccaaaatgacaaacaactttaataaaaatctatcaaaacataggactccatttcttgttcaagcaattgattgcccatttcttcagctgcaaataaactgtataatgttctatcactattattttttatcgttcattcttttccctctcatatactcacttttctttttcattttcaccatttttcacttttttttttgtcttttacttacctttttgcaatgataagacaagagaagagagaatatagtaaaatgcatgttgaaatgtgcatgaaaatattaaatttcttgttttacttccttgttttttcactggcaatatgaactgtctatgcatggtcccttttccttatcgtgttttataagatatatataaggtttatataatgctgcatccgttaaatttttcatctaaatattcttatttttgtaaaaaaataataattcatttaatatcttcttgggtgaagataaatgtttttaaggggagtacaaaattatttcacacaagaagggaaaaaaaaattaaaataaagagagatttcatactcataccagagactcaataaataaataaatatttctatatatttcaagagaaggaaaaggaagctaattgtaataagtataaattaaatttcaaaaaatgttcattcagtaatataatttgtgattaaatttagggatattggtcgctaaaccgcctgaactttacagtttgtaacacttaacacaaaaactgaattttgggtggctaaactacctaaacactggttccgttttgctctgcacacctccgtccaaaaatcacagttaagtgccacggtgga

SEQ ID NO: 115310 - DNA, 1999 bp, Cannabis sativa
  modified_base (1919)..(1920): a, c, t, g, unknown or other
aaataaaacacacaaggaaatataagtaaatatatatatatatatatatatatcatgtcctctgagcctgaaccctataatcttagaagttagaaccctacaatctttgagaggacaaaaactatagtgaatactgaatagattggttaccacacaaaacatggcatttttgctgagtttatgaaaacaaaaaagcttaaaggcaaacataaaattatgcacaaccaaggcaaagggagaaacaatgaaattgtttgaatgggggactagctaagataagtcctacatgaaatttgaacagaaaatctaataaataagaaagaaagtacataataacttgacagcaagtgcctgctcacgagtgtaatccacgtctaaaagccaataagcgtaaaccacatacaaaccaataagcgtgattatgtctaggataaacaaaattacaaagaaactgttcaataattacaccattaaccattcaaatgcaatcaaattactgctgcaaccaacaacttatcctcgtaaatacaataatacttgcaataaagcacataattttccaatctcaagtaattagggatagttaaatgctagtttgacatagcaataacaaataatccaaaacgtctgcagcaaatatgaaatgaatagctatgacgataacaaacaaagaaaataattccaaagtatacctgctttctctatctcgttctcgcaccacctccttctctttctctctttctctaagctccttgtcatgactctgctccctttcaaccgcaccactccgatgtctttctgaatgactgcggctcctgcgagatctctctttgtctttgtctctttccctgtcaccaccttcacggtcacgctctctcctttctcctctctctcttccattcctctcctccctatccttatccttactcttctccttgtctctatcctccctctccctgtgttcccggctactcctttgtcgatctctatcgccatctttggaccgagaacggtgacgagacgagcccttttctttatgtcgatcatggtcacgtgaatcctcaccagattttgaacgccttgaacgatgctccctatcatcattcttgtcatcacttctatgcttagaacttcgactgcgatctttctcagaagatttcacaatttcatcaccaccaccaccattaacagtctccttacccttgataggttcaggattttctacagtgttctccagatactcatactcatcaaaatccatagaaactaattatgccaacaatgtaggtttcaacagtttaaaccctcaataacagctaattatctacaataacaacaacaaaaattgctaaataattagtataacattaacagcataaattaaaaacctagaattcttcttaaactaggaaaaaccattacagtagcacaaattaatatagtttcaatcaaaagcagaaacagaaaccaaattaaagtgaacaaaagctgaattgaaatgcaatgcaaaacctaaaacccaccctagagaacagtagaatatatatgtatatataaaattcggaaactaaatgaatgaattcatgagagtatagtacagcgtgaaacagaataatttacctgagatttgtagagaagtggaagaacagagtgaatagagagtgagaaaggttgaaggttgaagatgaaaggaggagttcggagccaaaagctcacctattacagattacaaggtgagttgcgttgcgtgagtctctcccgctagggtaatatgtctttttttttatttttatttttatttgtaggctaatttggaagttctttactaatattttcttttgtaacaactatttactttaagcaattaccaatattaactatgaattgaaataaataaaataattattctcacacaaatnnatttaaaatgactataaaaataagaaaaattaccttatatattattttttaatcttttttaaatttacggtgtgggttt

SEQ ID NO: 115311 - DNA, 1393 bp, Cannabis sativa
aagcccgataagagcctgaataattcgggccacagtcggcccggcccggcccgcgaaaatggcccagattgacattcctagtcaagagagtgaagtaattcaccacaccaacgcataaccaaagcatctatgatggacgggatatgatggatatgatataataaaagtgatctctataatttatttagggaaatttgacaatacacttaaaattggtgcatgatgatctcttattattccgctttaaataacatacggttataatacttcaaaaacctacaaactcaaaaatatttaccccatttgaatcactcttcctttaactctccctctccggtctaactctctctctaactctcaccacaaaacccgatcatcctctcgcccttctcctccaatggtcaccaccgacgaaacccaccaacccaaccaccccaacgaaaccacgtagtcgaagcccaaatccaaatcgttaaacgcaatcccaaattgtgaaacccacatccgaaatcatgaaataagtatttttcctaaactttatttgattttgaatgggttttttttatttttttttatttttgttatttgtaaggaaatttattagattgtaaggaaaactcctttcgtttgattttctttaatgtgtgttcaagttatggctttcgtgattattgacatgtagcgacattattcacgatgttattcaattttgtttttcaatagaacaaaatgtagtaggtgtttgtcttttagtgatgtttcacgacaggtcgcaacgacgttttgcgacatgttttatggtttgatgaacttttagagttttgttgtttgatgtagtttcacgatatctagcaatatgattggtgacgtctcacgatatattggattacttaatattatcattagacgttgtgaatggtatcgctagatatcgctagtttcagttgaacaaaaaaaaatgctttataattatattgatatgtcgcttgaatgtcgtgaaatatcgctaaattgtgaacttcatatttgcaattttattttgcgacttttcatgacatatttgcaatgcagtttgcgatataaaattttttggttttaatatgtttgctcttgttgttttcttacaatttttgcagatggctcatgaacttaaacttcctgtttctcaatatttcacaagacgtctttgttagaatttatgccctaaaaataagtaattaatagataatatattatagaatatgtaaaatgcatatataagataaatgaatatattcattatagaagtataaataataaatatctaaaattttcttattcatatggagatagtataatcttgtaaggtcgtacaagagaattaagattatacaatatgttgacctcgctttta

SEQ ID NO: 115312 - DNA, 3388 bp, Cannabis sativa
  modified_base (3256)..(3292): a, c, t, g, unknown or other
tttttttgaggttaaactatttgtatttttaatttgaattgtttctattttcaatgctagttgtttctatttgaaggttatgttatttctattttttgaggttaaagtgtttccattttcaatgtgagttgtttccactttttatgttatatgagatttaatgctagttgtttccactacgcaacaaattacattttccatttcgaggttatattgtttctattttcaatactagttgtttttattacacatatatatatatatatatacgaggttatatgctagttgtttctattttttgtggttaaattgtttccattttcaaagtgagttgtttataatttttattatatttgtttttattttcatacatatatatatatatgaggttaaatgctagttacttctattttgcaacaaactaaaatttccatttcgatgaaaaattattttcattttcaatgctagttgtttccatttcacatatatatatatgaggctaaatgctaattattttcatttcgagattatattgtttttatttttaaggttaaattgtttttatttttaacgtgagttatttttattttttataatatttgttttcattttaacacacacatatataagattaaatgctaattgtttttattttttgtgattaaattgtttttatttttaatgtgagttgtttgcaatttttataatatttatttccatttcgtaataaactaaaatttccatttcgaagaaaaattattttcatttttagttgttttttcattatatatatttatatatatatatatatatatatgaggtttaatgctaattgtttccatttcgaaattatgttgtttccatgagaatttgttaataaggcaccaaaatctgtgaagaaaaaagtgaagccaatggagaatgttgggcttttgaaataatttcctcaatactttcgacataatgttgagtgtgagatatacaaaagttgcaccatcaaaagcacgagacaacagacactttctgtactcaactctaaaagttatcatgcacctagagcaacaagacatgcatatgccccatttaatcattttatattaacaaaaacattactggtttgaaatgataaaaaagtaaatatatatggcaaatagatgaataaccaaagactaaccaagccgagtataagaaaacaagttgaatatagggacatgatctaaccgaaatcctcagaggacagatacgaatgctaaaagaaaagcacagttcaaattaaagaatacaaaacaaaggctaaccaagctaattatacgaaaactaaaacatgcaaaacctttaaacaagttgattataaggaaaagatcaaaccaaagtccttagaggagagacacgagtgataaacactattgttagacaaagctaaaacaaaaacataatgcaactcaaagacacaaaacaaaggctgaccaaactgagtattcgagaaacaaaaggcaaaggctaaccaattggagatacctgaatataatttagtcttttgattgttcataaaactagaagattaattttgaagaaaaagaaaatagattaaacgtaccaataccaatatacgcgcgaatctcataaagcatatatacaacagattaaacatatacatatataatctatatatatagttgtataaagtaacacataacatatttgatgatacacataatatattttgaagattacaataataccaaagttcatcactgaaaattgatcaaagtggttctctccattggataaagatatactccaagtcctaattgttaagatagagaggatgaacttctcttagtactcatctattacaaaaagttatgaacatagcattatatgtaaatccaaacaaatctcaacagagcataagttcatcaaccatttatatctctaatttttgaacagtaaagaaaaaacaaccattaaagaaataagcttaaatctctaattatattcaggtttaataacttttctgtaatatcagattcaatcagatcaagctgtcttagttgtctgcaaaattatgtgtatcactatcagctagtttaattcagctccacgtttgcttctccactctactctccattttataccaacccattgagataaatatattccagcaagtatgtaaaactcaaaagatattgatctagagttttaacaggtacatatcacaaagaataaaaatcaaaacagatccaaactttcttcttccacgtgtattagattaagaaaaacccacaaaaacttaagatttttttcaccaattaattaattcacttgccattcaagctatgtatatatctagcaaaaacaaaatgataaaaatatctcaattatatttatgagaaaaaaaaaaagaaatcaagaataagatgattaagaacaacatgacgtacctaaccctcgcaacaaactaggacgagctctttaaatccaaggaaggatgcttcaggtgtactttctccagctaggggtaagccttggccatgggcgcgactcggggcgagaaatttcacctccacaacatcgacttcaaagggaagcagcaacagtcgtcgatgaaatagaagctcccaaccgtcgtagttgtcgcacttcccattgcacaagtctgtcagcgacaatgaagaaggagaagaaggagaggcggcagctgaaagggaaaaagatagagtttttggtgtattttttaccgtataaatgaatgaaagaataattataaatatacaaatgaaaagatcccaaaattaaaatccaattgattacggggaatttaaaatggaaacaatataaatcttataagatccgattaattagaaataaaggaataaaaaagcaagatagctacacgagtctataataatcatgatacggtttggtttgatcaagatgagcataatgctcatgctcttccactattaatatctcaacattacattccactcaagtatgaaagatttttcgttcaacacagaaagacaattagaatttttcgagaaccaaaatcagcttgatggtggtcaaattcatgaatatgatggaatataatcatgattatatgttcaaaatttaagtcccatgatttgtctggatttagactgacatgataatcggtgataaggtatacttacacaatggataagtgtcatgtctggcaaagtatgtcagtatcagacgtatggagggttggaaatattttaccaggatnnnnnnnnnnnnnnnnnnnnnnnnnnnnnnnnnnnnnaatatgaattctctaaaataataaaattaaacatataagagtttagaaaattttacattggttgcagcagaaaataatgactccttccgttcagat

SEQ ID NO: 115313 - DNA, 1292 bp, Cannabis sativa
gctttggcatgaccatccacactagttcgggtgaagttctcctaaacttggcgtagcctcaaaacggcatcactacacctttgataatggaagcacaggcacttcattcagcagtatcctggtgccatgaacactccttttatccagatagcattgtctcagattgtagtgtgttagttaattatatttataaaaatgaatctcataatttgcatcttaatccttttgcctttggaatcaaaagcttgctctctttcttccctaaagtgtctcttagctacattccaagaggggcaaatcttgttgcccattgtttagctaagacagctttaggcttagagaaagctttatggatgagccctactatccaaaatgctttgtctcatgtatcatgtacttcaatttctgattaatggatacaggtctttctctcaagaaaaaaaaaaaaggaaactttcaatatcaagcacgccttgtaaacgtatattatagctcatgaaattaatttttttgatggatcgtacgtgtatataatattatggttggttgagatcatgattaaacttggataaaaaaatcaatcatgtatgtgcattaaaatgcatggtttttgttatttgagtagatgagattgtataaagtgacaaaaaattaaagtcaagatttaaataattatgaatatgtatatataataagcacacacgtagtctattataattcttgataaaagaaaaagtgggaactttcccaaaaggctgcattataatagattgtattatcccaatatatattatatatatatatgaatataaaaatatcttggttccaactcagaggtatcccaaatggggagatggtcagcagtaattaaccctcattattatgaaaaggatcttcttctacctaaaccctttttccccatttcttatttattaaatatttatagttttcttttgaaggaaatttataggttattttatttatacgaaaaggatagaatacgttaactctctctctctctctctatatatatatatataattattctgctccagttttgaagcttccactcaactgaaggacctcattagatttagtagtgcttctttgtctttattaatcattacaaagtagacctacaaggatggcacacacaagcaatttactcaaaataatttacaagtttgtcgatatttaataggcctcatgctaatggaccacaattattttttaaggaatatttcacaaatacacaaaaataataataaaaaaatataaaaatacagtttcac

SEQ ID NO: 115314 - DNA, 2911 bp, Cannabis sativa
  modified_base (44)..(56): a, c, t, g, unknown or other
acaaaactgtttacattttttgtatttgttcgtgttaggaattnnnnnnnnnnnnnttatattaaaaaaaaaattgtcaaaaattgacttcgagaactccggaatgaaagtttgaacttcgataacttgtttccaactcactatctttcagtattctagatcatgaagacatggagcaaccaaatctaggccccgagagcttaaattacataaacttgcaccccaaaaatccacctaaacaactagggtttcactcaacttccagttgacatcttcaactaaagtttcagtttttagaaccgtcttagtgcaaataaatcaaactttgaattgagacataaactagacatatatgttttaaagttatgagcaaactactcacaattatacgttattaaaattttcattgattttatttgagttcacctgatgagatatgtaccattttaaaatacacaatactagattagtattattaaaatacgtatttagataaaacacagtactatacatgccctttaatcttaaaagttatgtttagataactgttatctgtgtttccgacgagagacacgtaaattccaaatagaagtttaaaggcaatcagtgaacccaaataacataaattgggccaagcaagtgttatctggccttacgggagaacaatcttatgtgaaaatagacacttatcacaaagcataacccagccttgcaataccaagagctaaaaaggtgatgaaacatatctagcccgtagtgataagaatggaaaagcggaagacaattacaacttgaagcatgatgattaaagcatcctgaaaattcattgaacacccaaaacaaaagacatgaaccaaaaatctcactaaaaccgattcttgtttaaatagactgataaaacaattgaagccgtgaaagaagtttcaaacaaaacaacatgattcatgaaccaaaaatctcacaaagaccgaagctaaagttataagaaaacactagtccagaacaactcccttccaaggttagattcttgttaaaatagacccggtaaaactagtcgagaacctgaaattagtgaacaaaatgcatatgctaagatggacagcttataaataaattccttaaagaaagaatggagtcataaagaaattcaaaactggagtcatgatgaacaataggagagataaaagcagggaagatgatactatgtcaaacccacaaggaagaaaggccgcagtttatcaaatcaacacaacctgaaaattcaattgagaaaatggtgccaaatgacacaccaaacaagtaatttgaattatccacaaatcttcacaaatgcacaaaaaccatataatatatatcacatccattatagtaaaagtcaaaccacacaaagaagcacaagtgttgtaatctcgtgattctttcttattaaaggtatttgactagaagaaatatgacagcagccaaagccacaatcccaacaacagataacaacatgcacatgcaggagcaaccacccttggtgcgcttgttcataattgccaaggtcttttgcactctccgcagtctagagtctgtaacatccacatggtagtccaaatcatcaataagtctagtgtgtaaatcaagttcttcattaactgccaatgcaatatgttttgtgcttataacagtctcctccaacttctcaagcccttcatcttgctctctcatcacttgtctttggaaaccaacaagcccattattgtccaaaccagctgccttgcccatggcatcagcaggctttatttcaggaccaagtaaactgtccctattagcaaagtttgacatgttcaatgatgaagccatttgtgacacttttgacttaagatttccaagcatgtctttacgtcgattcatctctttatctgatctgtgaacaagtaataagcaacataaacaagtttcaaaccaagacccagactttcctaatatcaccatattgaatcagaaagctttgatagaaaacatcaatggagttaattaacttacaaagggtgcttcccaggaagctttgataggagggagtgtaagctatcaagtctagtgcctaaaattgtaatctttctccttatagcagagctatgacgctgcatttctgggcctgatccagacagtgaacttcgttccgatatcatcccattgatatcatcagcaagcttcactgcttcactgtattctttcatccatgaatccgaagaagatgccatcaaacgatttgagaaattagggtaacaaagccaaacgcggagttgcaaacaagaatttgcctagtgaggaaattaagtccaggtttcaaccattaatgtacaaaccgattcttcttcggatgatgataaaccctaaattggaagaagatcaacaccaatccaatctaatcggaagttcggtacccataaaaaaatgatcagaagacctggaaacttcgtcagggggctctatttatagcaaaaggatgtgtaaatggacggccaagattaagtctcataatatatctgaacggttgagaatgaaggttgtctttttatttcatttttattttatttttgctacacaactaacccactcatgattaggatatcttttcctaattcctacacaataagatataaagatttttgttatataaatataggaagattttttattattattattttcatttattaaagtataaacagctgtataagataagaatgattaaatttaggtatgatatatatatatttctttcaaaaaaagaaaaggtatgattatattatttaaagtgactctaatagaaaaatacaaaaaaagaaaaaaaaaattacaaaaatactatggatcgacccattaaacatttatacagtcaatatacaaatatttacaaaaatac

SEQ ID NO: 115315 - DNA, 1865 bp, Cannabis sativa
agcctccgacttctcgcactcgtgcccgaccctttcgccgccgacgacccacttgaggtgctgctaatattaacggagctttcatcttcgccgctaacaaaattcccattggaaggagaagctgcagatatgaaaagggtcggaggctgctgtggaggtgagaacaaggacttttgggaagagggaaaaaggctgatgttgttcttgttccattgccaagaagaagaagaagtagaaaaatgggagtgtggtgtagctatggcagcgtttgcgtacatctatatggagtgagtatgtatatatgtgcaccgtcgaatttaaaatcggccggggtttaagtctgttgcttttcgttttcttttttttttcttctcagataagtcctaacaaaattactatgtaccccttcacctgaaaaatgcttggcaataactacgattctacgagtaaagtactaaaactaattaatagcgttttttatagaatcattagcaattttttctaaggaatcattgattttgtcttctaaaatttcatatttacataaatttaatcattatgttagatttctcgtcttattttaaaaatgttgacgtgtgtttttgtaaattaataattttgtctccctaaactttgacaattattaaatagtactccttcaaaataaaaatgaaaaagattcaacttctttctcttattatcacagacactaagaggcgtaggcccaataataatgggccagtgaaatggaagaagagcttgaggttactgatgagcttccaaaaaatagggtttcgatgggttttggtatccaggcccaccaaaaattatgactgttcttggttagaattatcgtgggcttgagaactcacgggtctctaaattcctaaaggaccttgtggtttagaagaagccaaattttgtgtttttatgtgaaactttgagtaaaaaagatatggtggaaaagttgtgtatttccctgggttttgatggagcctttgtcatggatgtacaaagaaggatggaggtattgctttgctatggaggtatgaagatgatgtccatttgctgggtttttcatccaactacattgatgctaggatttcgggtaacaatggaatgtggcgtcttactggttactaaggtgaacctaacaggaatttgtgaaacaagacttgggatttacttactattcttgctgctcaaaactctcttctttggtgtgttataggtgatatggataatgtagtgtctcaagaagataaaagaggtggtaatgtgtatcatgatcgacttattgatggttttaatcaagctttgattgaaagtgggttatatgatctagaaatccatggttatcaatttacatgggaaagaggtagatgaacaaatgagtgggttgaagtctgacttgatcgagcattagttaactaggagtggttagatcgttttaactttgctaagctttttaatcatgagtttttctcttcagatcatagtctcatcctacttgatccttgcgttctccaatgtcttactggtcttagaaaatttcgctttgaaaactgttggcttagagaaccaatgtgtcttcaagttgttaaaaactgttgggatacctgtgatgccgattataatcagaaaaagattagctactgtgaggaggttcttgctagttggggagtaaggttgttcacggtgcgggtggttcggtttttgaccattttttcaaaccaaccagcacatgcggttttttcaatttgccaaaccgcacccgcagtgcaaaactaaaaaaccacaaaaactgcaccgcaaaaaatggtgcggtgcggtgccgtttatgcagtttggactatcactaaata

SEQ ID NO: 115316 - DNA, 2781 bp, Cannabis sativa
  modified_base (2656)..(2656): a, c, t, g, unknown or other
agtaaatccgattatattaaaatgagttttatttaggacataaaatctcaacatgaatttcatcagatcccttggtttgagaatgtcaggtcgctttcatactaggtagactagtacctcagatagtgtggtgtctcaggcattctcagtagcacaaaagctctctcttccacttgtaccttggatgaggtaaactttgttttcattatccatacttattgtgtagtcattatcttgtctgtaatttctttacttaaacaaccctagcatcgatcttttctcatcacttctatttgtatgaggggaaaacaaaaagggttgaaggaggggtgaggaggctgggcgcgcggggttctgggcacgtggaggcctggtgcacgaaggagttgggcacatggaggccaggcgcgtggaggagctggccgtgtggaggccaggcgcgtggaggagctggccgtgtggaggtcgggcgcgtggaggagctggccgtgtggaggccgggcgcgtgaggagatatgacagagagatgtgaggagggggacaaggacaaaaagggcggaggccaccctttgtcccttttctttgttttggaaatcttacattatttctccctcatacttgttgtccaatcgaacattcatttattggattttcgcggttggcaaatacaatataatgcaatttaatacacacaatacaatacgacgtactaaacgagctcaaaatatttaaaagagcacatcattaatttttgttttattataaaagattgaatataatttttaataaataaatcatatcaatacattatctagctaggactagctcaatacaaaatatgttaaactactcaaatgctgaaacgagattaatttatactcacaaatagtttttctatcaattaatacataattatgtattgtgttggatgatactataaccacactatactgtcaacaaacgaatattcttgatatacataaatatataaagagatatagagtggtcaattagtatgatgtttagtaaattaagaaaggaacatagatgtggataggtcacattcatgaaagaggtatacttatcatggtcttcactcttcagcttcacccccaaaacccaaagtttgtaatgtacatatgaaaatgacttatcatacacgctcacatatctaaacttcactcactgtcctctcctccatactatatactatatatatacttgtaccaatccaatgcataaattatttccttatattttctatatacatattcatattcataacagaaaaacaacaaaatattatcttattattatttagttcgtattaagtcataataatacgatttatacatatcagtatgtttaaattatgatcaagaagtattttcataataattttttttaaaaaaaaaattaacatcatattgaaaacttttatcctccaacatattatgtagaaaagattttttttatgggataaaatcaagactcttttaatacataaatattgtatacgcatgtaaaatttgtgtaaagtaaatgaaagtgttagttaattccctacaaaaacatgaatgtgttcataatggccattgggatggggattttattaaagttgtgttcaatcatatatatgcaatattgtcttggtaaagatgactttgacttgttccttggtattaacttagtaacgatcggtatgttaggaagaagatgagaatggggaaaaataaccaagaactaatgaaactggaattactatgagacattcaagtcaaagaaccaattaagtcagtcttccacttcaaaaaagagaaggaatcaaatggacacctccggctgatagtatgatcaaaactaatgttgaggcagggcaaaaaagcaatggggattggtatagtgtggttgttgtcgctagagattctagtgaaaacttacacctgaacttatgtccatcaagaaggattgatgatgagcaatgtggaaaactttggagtttgactcaaattatttatttatttctttatttatctatatatgtaaagttgcaattttttttgggtaattattaattgtgggaaaaaggaaagtcttggtgaccaagttttgatgagttttcttaaggaagctttggaatgtcttggcctccaagttgtcttgatgcccaagttttgtaactctataaatatgtgttttgtgtgagaggtgggtgtgagaaaaaaaaaaattagtaagttgtgaaaaagagaagtgtgtgagtttgttatgtggtgagagtgagtaagaagcaaaggatgtattgggatttcggatgagagattgagatagagagtatatgtaattttgaagtgataagtgaaatatatctctctttgtgggtttggtagttttaccaaactgagtaaattgctttgcttcatttctttgttatttcgctgcacttaaagtttatcattttttccaacaagtggtatcagagcaagattcagatcaacacagaaaatatcaaagatggtgtcttccataaaatttgagatcgagctttttgatgggaagaataatttcagtttatggcagagtacagtgaaagaagtgttggtacaacaagggctcctaaaggcactacagggaaagaaacctgagagtatgactnatgaagattgggaagagttgcaggcaaaagcagcaagcactattcgtttgaagtttggctcctgaattaaagtatagtgtattgaatgaaacatgtctgtctgagttatgaaaaaagttagaaaa

SEQ ID NO: 115317 - DNA, 2961 bp, Cannabis sativa
  modified_base (2910)..(2934): a, c, t, g, unknown or other
actaaggctcattaatgtcccaaccacgtaaaaatctctctcattaattccttatagctttctaaaatactattattatattggttgccgaaagtctcggtcaacaaaatttaatattaataaaataataataaattattatgtatgatgagtaactacaatatatgaaaaaaaaaattaataaattaatatatatgtataacggtcgattttaatttttttggtcggtttattacctaagaaaactgatcgttcaatgacaattttaactgttagcggtttttttggttttcggttttgtcgatttcgattttaaccgtgttcagcaagttagtttaaacgggtttttcaattttttgaatttcatggagagctctgacaagtagtatattatagaaatggaaataatttgtagcgtaaaaagttaaaagtagtattttttttttttttaaaaaaaagttgaagttgtaattatgctatatactattgacattgactaggggctagttttgaaaaagctaaagttatcttttaaaatagatgtgataaaaaagtgtttggtaaacagttaaaaacaactttttgaagaatttgtgaagaagctacaactaaaagctaaagttggtacaacccaattttttaaaaaaactgttttgattaaaagactaaaataaattattttttacttaaaaaaatattttatatttattatatattacaaaaaataaaaaatatctttttgaaggaaaaaatatttaaaataataatattttaatttcttattttttattttattttaaaacgtacttcatatttatatatttttatttttattattaacaaatcagtttcttataaactacaagttataaaaatataaattattataaattatttttattaaatgtgtataaatttatattgtgagaaaaaataattaaaaatatacaaaaataaataaaatttctgtataacataatttattatacagatttatgattataataaactagattataacattctcattattacagtagaattttaaaaattcacattacttaaaaatttgtatttaccaaatactcaacttaattttttttgacatttctgctacagttgttttttttcacagcacatctataattgtttttcccggcactacaactgtgccaaactggccctagatttgcagtgcaacgacttgtcgttacaaaacgtatgggatctgttttgggtcgtatagtcgaatttcggaagataagctgccttatctatctacactattactctcccactcccagtcccaccctctctcacttgcacgaaaaccaattaccactttatgaccaaaaatggtttccaggacatttgcgtttgcagctcagtcttccttttactgcttttctgatttgcccaagctaaatccctccaaaatctcccctaaacagactccccacaggatctccagttttgctaataaccaccacaatcgagttccatggctccctgaacctaagctcaaacggttgagttctgtttgcttctttaatgctggggataaatccaaagatggtattcaaggcaaggaggtaatgttttttcgagcttaattcgatgattggtttgggacatttgcaacttgacatcttacaataaattgcatttgaatttatgttagaggaagttcctctgtatgttaattgttgagcgtcaaggaatttaaagattggaaaaataacgcttataccttaacaaaattgtcaggaaactgaattaggctggccgattctggagcgttgggatgtgccttggggttggcaaacagcgtccttgacctccttcgcctgtggattaaggtgccatttttattttgaaaaacaagaacagtgctattttgttatttattagtgggttcattggtttctagtttttgtccttttggatgtcaaaggaaatgatttttttccaggcagttttgttttgacaggattagtagaggcagcagctataccctacctaggacttcgtgttgaagaattgagtttagatgagaaggcagagattttgtttcttgatcaagggtattcgtactttggctttgattttgtgtcaatattcagtctcttataatacaagaaagtgtaccctgcctattatgaactacttgtattgtggtatggaatatgttatactatatctttaaaaatactctctagagaattggaggttttgaatatgttatccttgtattattgcacccttgagctgatttggttattgttttgcagcattactactgcagttgtacttgcagttttatatggtgttgctaactccttccaaccgctacctgaggacatgtaccgctatggtattgatctttccaatcattcttttttattcagcggattgtttttattcatggttgaattcccccccttccccctctttttctttttctgctgttattttcctatttggttgcattaaatgatcttcacatgaatgtgtggatgttctgttaagtttcccttgacaacttcatgcaaaaacatgttttgtgtttatgtatgtagcgcatattgccacattattgtttctttatcaaatattttcattgatggttcagcagtgtaaatgattccattgaaatgatataaaataccatattgtttcagatttaagggatccattcaatctacggaaagggtggcttctgtgggcaggcatcggtcttgctggtgctatagctgccatttcattaacaggtgttgccgtgtcgtttttcagtggtgaaacccctcaacgagaggttaggagcttctgatgcttagtttttacttctttctttcactttagatgctgacattgtaataaataaagatttaagggctcgtttggaacgcnnnnnnnnnnnnnnnnnnnnnnnnntatattgaattggattatatatcatat

SEQ ID NO: 115318 - DNA, 4136 bp, Cannabis sativa
  modified_base (856)..(859): a, c, t, g, unknown or other
  modified_base (4086)..(4093): a, c, t, g, unknown or other
ttgcacatattttgtaattaattaaaataatgtatacaaaattgtaaaatgccctatataatacctaacctaaatttctatccagcagcaccccatcaaaaccgcacaccattctctgctgtctctctcttctttatcttctctcaggatctctctcgcgcgcccatccaagtcccacaccgtccagctatgggctcctaccgtccaagggacactgtaccgctctctcacacaactcctatatacggtggtggccacttgaactaaaactatcgtgtggcgttcaagccaccatcgaacttagagataggtaatgttctctctctcactctctttctctccctcaggatctctatctctctcgttctttcgagatctctctcttgtaaatttgatgtttttctatttcttttgtagggcctcatgttgacggtaggagctcccatggtgtttgcacaattttttgttggcaacgacgaagatatttagtggttttcgatttattattgtgtaaaaactgtatataattttgatcttcaatatttctaatgtgtggagggattatttgataaatggagctagatctgattttcttttcattattatttagtatgtgccggtacaaaactgacgggattaatatagttaaacatttaatttttactctatttgcgttggttccaaaatgacgcaattttttaataccgacagatgaaaaatgatgcaaaataatatttatttgcgtctacggcatatacgtcggtttataaaatcgacaaaaaaagtttaaatgtcagttaaaaagtgacgaaaataatttaaatgtcccacacactataaaaaaatcttacttttnnnnacaacaaaatttgtgactaaagataaaatagttgtggctaattataaattatcattattgtgttgtgactgaaagatccgtgactaaaagtattagtcacaaaaattacaatttgttcttactaaatgtatttttagtcacaatatttgttgtgattaaaactaaattaatgacaacttgtaactaaatacaacgttttagttacaagtaactttttgttataactaaaagtcgtacatgtagtcacaaaaaatttatgttgtgactaaaagattgtcactaaaagtagtagttttttataatgacaccgaagcgtctataagcaccactatgaagtggctttctataattaattagttggcgattttttgtaataattattaaaattaaataagtagaagttaatattattaaagaaaattatagtgccctttaacatttttctttaaagatttctcaaatcctaagatgtttgcacccttcaactaccctatgtattatatttaatttcacggtcatttcatatcattaattgcttttatattagttgactttatacttcttttaatctacaggttagcacattcagttattgttgctttatttttacctaacaaatactcaagaattgagtataaaaacaaagtaataaaatatttttattgacaatcttttagttacaacataaattttttatgactaaatgtaatttttaatcacaacaaaaagttacttataactaaaacatagtattcagatacaaattgtcactaatttagctttagttacaataagtataataacacatttaatttattcacaaaaaattataatttttataactaatacctttagccacaaatattttagttacaacataaattataattatttataatttatcacaaaatttgttatgactaacctgatattttgtcaaaattaaatggaacatttaattaattttaatatgttgaaaattagcaattttaacgttaacttgtaattaaagatggtgtaatacaattccaattccaattccaatgaggcatgaatatggtaattaaggcaaccatgcaattaataaaatacgtgctctcactttatacttatgccacgaaagtttggttattaagtcaagccaaaccgagacaagatcatgttcctttgtccatggaaagcacaactaccaaaaatttgaatggtacaatgaggtacttagcactttataacgcgatgtcatattgttattggtataattaagtattgggtcgcatactcaagaaaataaattttaggaaatatcgctaaccaatcatagagcgccacttataaaaagtgttaagtaccactagtgcccaacattaaaaggtaaacaaagagcgaacatcatcaattgaggaattaacatacaagtaaaatcaagacattaataatgatgtattctttgtttggttgatgagaggagcaaatctaacgtttcccacgatgaccctcctttttgcaccgccttatgagccataactgcaaattcttctaccttcttcctcatctcttttcccacctctccctccattaactccttcaccattttactcacttcttcactcttcacaatcccattcaatgatccatcgtagctcttaactctcaaaccaatcttaatctcttccaccaccattttcgcgtttatatgttgctccgccatcatcggaaaacctagaattggcaatccagcacttaaactctccatcactgagttccaaccacagtgactgaaaaaccctttaacgcttttgtgcttcaatatctccatttggttaacccaatctctaaccactattcctctatttttcactctcttttcaaactcttctaagaacttgttctcttctggctctaattttcttagcacccagaagaaatttacgtttgaatattctaaccctttcgcgatttctctaacttgttccgatgacacagttgcttgagacccaaaggccacataaagaaccgaactcgattccttttcatcgagccatggatgaacaacaaggcctctgctctctattttcatgtcatgtaagcaaagaggcccaagaggccatgatttgggtccaaccttttggttccagtagtcagtgaacatcggctcgagctcgtagaagctgttgtaaatcataccaaaactattgtttgtggcctcagtagcttttgacataaattcatgagcaagagactgatcttcaccgttttgagcacttggatcatattcgcttcgggtgagtttgatccaaggaaaatcagagacgacggtctctgtctctgtctgcttaggctttttactattaaaaagagaatggtatacagccattgcataatgtgacataccgtagaaaacaagccgtgggaatcccaacttggaggccgaatcaagggtccaccagagaaacccgtcagagaccatgaagctcactggagtttgaatattctccagagctcgatctaagtcgggtttcatgttttgggtgcccaagaccaaggagtagaacatggacatggacatggttgggaaatcctcggtattctctaccccgttagggactcccggtatgtttttcgggaagggaagctcgacgatggcagctgaggtggccgggagaaatttggtgatgaaggatctgttggcgggagtggtgaagatggtaacggttacatggcggttgaggaggactcgagctaggtgaaggagtggaatagtgtggccttttgacatgaaaggaaacaaaattacgtgattgtgatgatcaagatttgatgatgaaattttggtgttatgagaatctgactccattctcatgctgccttgttattttttcttctcttttgaatgtttcttgtaagttataaatctatgagtgtatgaaattatgtttagagcttttcatatatggacaaacaaagtaatgaccaagaaattatacgtacgatatgacatttaatgtttctgataaattgttttgaccaaaacttacatatctcttagtcttaggttcaatgatatttatacggttagaaatatcttccaattatctaaaaactttgtcaaatagtaatttatccaattcaaatactttctttgtcaaatccttaattaaactttatttacatttattattgatataagttttcgcaaattaatgatagaatttaggtggcgtttggtnnnnnnnnatgaaatggaatggaatggaaaggaaacaatttttattccatt

SEQ ID NO: 115319 - DNA, 4826 bp, Cannabis sativa
ttatgttcaaaattggggacttttgccgcaaatttctcctttctaaaatgtaaaaaataaaataaaataaataataaaaggttggagtcaagtcaacacgggagtcaactacacgaacacccctctcccaaccccaacctcaaaatcacaagttacacaacaaaaacaaaaataaaaacaaaaacaaatgtacccgccgtttgagttttgggtccctaaactaaattgacccaagtaaacttggtcaacaacaacaacgattgcgcaaaatatttcacaactctgcctgcttctacatcaatgacttctgcaaatgtcgctaacacatcttcttctttccactatttcttaaaatcaactattctattcctctcaaattcttaaattgatcattctttctttacttctcctgtatgatctttccattctttcacgagaatattgtttaggttaagcgagtttgaattatttttctcaaaatttgttgcttcaaactcttgcaggtggacaatcggggctctttcgggtcaaaacgctctcgcaatgatggtaaatctcttatctttaaaatatgtacacatctattatgttttgtgtagtattgttttttaatttccttgccttaattttatctaaaattccttttcttgtaatgcttgttttatttctacatattactagatggattgataatattattagagtagagatgaatgtttagaaaacttgcaatgttggcttcggtatataatatattatgttggttctgattaattttattttattttattttgtgtttagttgttttatgttattttggggtcccattttcaaaattgtttgattttgattttgaccttgttgctccatccataactacattacaatcagggatttcatcctttcgtggttccttgttatggtatttgtgtcctaagtttttgtcttttattcattctgtctttttgcctaaagttggaatccattgcattttagatcctcggagtgatggagattggacttgtcctgagtgtggaaacattaactttggatttagaacggtttgcaaccgtgcaaaatgtgctgctcctcggcctcaagttttgcctactgtgagtgattatgtgattttgttttattctttcatattttgtagtttgcagtgcatgtgttattgtgtaattagtgtcctagtaaactcttctcaattttatttcaggccaggtgaaaagatacaaaagaaacttaaatatgtgattttggtagcttggaaattgtatcttccggttggaaactctgccaataacaatatagacatgccaagtgtaaacgacccacctggacttatcaagcatgttagcttagaatagttttgaatattaagtcttctcgggatagatatcatgaaattattgattttctaggtataagagttagaaagcagaagaaagtgtttaccccaagattaggcggtttcttagaattggagttatcaacagttcaacactatcttacatttaggcttatctgtaactcacatgattttttttcttttcagcattctccaatgacaagtcattacaataaccctcctcccttttattatggaggttttgggcttcctccaatgccatatggagtatccaccaggtatggatccccaatcccacatactggagtgcattacgactatgctgcaccttctgttgctcatggagcatatggccctcctgcgcccacatttccccctggaagttttggaggttttttcttttactcttgttaatttctttctgggctcattcgttcataatttgtagaacaaaggattttctacatagaaaacatataaagagaaatagttactaatgttttaataggatcaaagaagaggagttaaactaaacatttatacttcttgtatgcacctacttttgctataactttgtcaaaatcttgaattcactggattattcctgttccactattgagacatgggcctttggaagcgctatcacagcattatttggacttaaaatgtgatgcttggttggtacatgtgatatatacaaagcatgtaagaacatctcacttaaaggcttgtgtaacttataggttttggtgactcaggaatgggttatgcatcaccttcaactgtgaatggatatggatttggttttcctggatctccttggtctggaggaatgggtataataactgaaaatcctgcttccaggaaacgtcgtgggggtaagttttgccttttttggagctctattctacttttactatcatctttccgtgcactaattcagttttgcttggtttctataatagatcacgactttatattgagttgcctgttctattctgcttcctatcacattaaatctgcataatttaatttagagcttgaatactataatttctttccagagaaataatagacttgtaattaagaggcaatgcacttgtcaaaaattgtttagtatttttcaattgtgagtgtttcaaaactgtttctactggaattgcaggtccagatggttcatatgatggggattggatatgtcccaaatgtgagaatgttaactttgcttttagaactgtatgcaacataaagaaatgcggggctgccagacctcttgtaagtgtttcttataaatatttaattaatggaatgctgttcacttttcccatttcacaacgataaatttgttacttccattgcctgcaacaatgaagcacttttctgcgaaatccattgcatactcaattttgtatcatattgtgaaaagcatggccttcaaagtagttagatgtatctatgggccctaatgtttgcctcactgtacatttgtgttagttttgaaagttagattggattagatgtggtagattaaaaaatattggatagggtagataatagaagaagaaaacaagttggatgcaaagttactattaaaatacatgaagatcgggattaagaaaatagggttccacagtttttcgatgaaattaagttatcccatacttggagataattcttttaaaaatcttctccaaattcataaggaaatcacattataaaagttatccaatccaatcatgctctccaaacgtgacatttgtgtaaagtttcaagtccaggagcatttgtggaattatctgaattttaaattgttatagaaagccaaatcatagttttacactttttaaatgttctagtaagcataatataaatcataatatattatcttgggattactctttttgtagggtcctactaatcagtcaaatgctggtgctcccgaaggcagctggacttgtggcaaatgtggcaatgtgaactatccctttcgaactgtttgtaatagaaaggaatgtggaactgagaaacctagctcttgaaatctaatcaaatacttcttgttttatgtttcgtgtaaaaaatcaacagatttcacctcttattgggcacagaacttcaaaataaagacaaagttgctctctgaaatatatttggaatggttatttctggctgaaatgaggacacatcccttatttacttgtgtttcttctgatctgttgctgtggtattacttgcaaacattgtattttcttgaatgatgagatgccaattgtataggctaaactatctgatgccaacgtttggatttgaagtggtttagcttgcaaatgtgctctcttggttagtttgaaattttttattttgatattattaacggcatcatctctcagatgccttttatcttaacgtttagctggagaagaacaggccttttatctttttggataggaatgaactaaacatcatctctcagattgccgattgtacatgccaaaatgtaattgagctaaatattctgttctttcttgtttgctctataaaataagtggatattatgtgatgaagaggctgatgttttataaacaatattttaagtggattctgttctttcttgagctaaatgtgtatttgatcccatttatataatcaatattttataataagtggattttatgtgatgaagaggctgatgtttttgtatgtcctttttaattcatacacaataggacaactagctacgataccaactggcacatatttgaattatcatagctggaaaaaaataggaatctccgaccatagtatggaaactgaaacattatcaatatagggccaacaaaaacaaagcattttccttgcgtaatttatgatgtgaaatgagaagcaccacaaaaattagttttttttagctgttaagaattttattttattttatttttgtattgtttatttgagatataagactaaaacagaaatgccaacaaagtatatttgctgattaatctctaagagattatttttattttttaacagaaatagactacactttggtatctacgtcaggctcattaatctcaaagtatcaatccaaaacacgttgtcgtttggttactctaattatttcattagtctttatatagttaaagccacgaggcgtacggtactatatgacaactggcggcacattgggtaatgccaaccaacatttgaaaaacaatacaaaagctttggttgttccagagacggttgctgaacgatggaggccagcacaatccctactatcattgccattcggatatctattctttgcatatatatatatgtactagtgaaggggtcatcacccgtttctcgacattgttttcatcaataatatattttaattaaaatttattactcattacaaataaaaaaaataattacaaaaaccttaaaaaaaatataaaaaaaaaaa

SEQ ID NO: 115320 - DNA, 1069 bp, Cannabis sativa
gattaaatgtatgattagtcttcaaaatagcatgataaattataattacactatttgtgaaagagaatgtcaaaggaaattaggtgttggccaaaaaaattctttcttttttgccataagcctccttgtggtttggcacaaaggacaagccccttgttttcttgggattctatcatatatatgccacgtgggttgactattgcaacccatatcgtcactggatgccccttcacattccttatgcggaagtcttctgcagatatttttccagagttaacattgtttgtctctataagaggttattagctcttctagctttaggtcctcgggtccactggccgtggacacctctgaagctccagcttcagatctacggatttgacccttgagtggagcaatttatttgtaagactcatttgggggccttctgagtgggcctcgccttcacgctgggccttgggacagctcatttcctagctatccagaaacatggataacaacaatctaattcgcaaaatgtgaatatctactgttatgttgattgaattagatttaaaaatttaaaatttgtactcgtacggattgaatattaattcacatataaaagtaattgatcgaatccagtccacgcctatttatatatttaaacaattatgtgtataattactattttaaaataaaaattagtacgaaattttaaaatttaattgataggtatgatataaatattaaaattaaaaatataaaatgtatattccaaagtttcatattaataaaatataatttcaaaaagtagagatttaaatataatttgttttcttctacttttagaattcgttattgtttattttatttattttaatttgttgttagagacataaaataataataattttttttagttatgtgaaaaaaataatattctaaattgtattgtattgaatttgaattattatacggaaattaaatttgattaaaaatatagggaaattctacaatgcacccccttaaaatggatacattgatgcactcccatctgttttagcacctgaaataattttttagtcaa

SEQ ID NO: 115321 - DNA, 899 bp, Cannabis sativa
atttgaattcaattcctcctcaaaaataatgtctttaaccttatttctctgagaaatactaatgatttccttcgagaatcattgtacctagtgtggctagcaaatctcattctggtccctaagcctaatgatatatggagaacgtgcatagacttcatggacctcaataaggcttgcccaaaggattcttttccactcccaaggattgatcaaatggtggtcaccacatccggatatgagcttttgagcttcatggatgcctactctgactatgattaaatcaaaatgcacgttgcagatcaagaacataccggtatccaaatggataagggggtacgtgtatagttacaaagtgatgacatttgggttgaagaacgtcgaagccacctatcggcggttggttaacaggatgtccaaggaccagcttaggaggaatatggaagtgtacgtgtatgacatggtggtgaaatctaaaacttctgcgaagcacaacactgacctcgaggaggccttcttagtcctctagaagtatgcattgaaactcaatcccaagaagtgcacatttggagtctcatctgggaagttcttaggctttattgtcagctctcaaggaatcgaggcaacccagagaagatcaaagcattcgtcgacatgcctttccccaagaagttcaaggatgtgcaaagtgtaactggaaggattgcaaccttagtcgattcatttcaaaatccatagataaatgcatcccatttttcaatgtgttgcgaggaaataaaaagttcgaatggactgaggaatgcgagtagagatggaaattgggcggttaatgtacggggaatgcaatccccgcccccatccccgctacctatttatacccccatcctcgtctaataaccaac

SEQ ID NO: 115322 - DNA, 1873 bp, Cannabis sativa
aaaaaaaaaaaaaagaagaagagcaatgatcaaagcactacttcaacatcatgaggtgcttacaataaacttttaaaaccaaaatcgtgatgaaattaatctttcttatgaatccaaaattgataaatatttttaatgcaaagataaacttacattgatgccgataatcgatggcctccacgaggggaagaacccattgctcccctcatttagtgtagtcaatcaatagtaagtttacagaaccgtttcctattatgaagagagaattaagaaaactctgagaagcttaaaaatgaaaatatgataagatataataagatttgatgaatcaaatggcagaagtaaaacaatgttaacaagcctcttgatattgaaatatagcataactgaaaaaactatgaattggtggaaaagctttaggaaagacatcataataaaagtttgcataaacagagaagagagagagagaggatcatacctgtaaactcttgaggtagctaatgaagaagggtgtgagagatagacaggttgataatataataaatcaaaaagttaagagtacagaaacgtctattataatttactttccacaatagaacttcactctcaatttctaaactatctcccttctgtcaccaactttttattttttatttttccttcttatttaataatctcttaatatatatttgttttttgttcaatagttgtttacttgactgttacatttcatatacacaattttctatttatttatttgttttaatttgttatttctaattgtttgttgaaagttgaattagttgacacttatatattagatgagtcatcagccataactcttccagatttagccttgatatcataaggaaattatacttgaagaaacttaaataattaggtttatggttcatattatatatagtaatgattaatgattaactaatttcattttaaagtggtgttgaacagaaattttctgggtttaagaagaaacttaactttcattcaagtctttttagggtaatattgactcttaagcatacaccaagaatggagatcaacataaaacactcggtagagtttgtacaaatatgtataattaggtagataactgtaccaaatggaatagtaggaataaaggttccatttaacagcattgacaattttgattatataataataagagttgactacataaatactcatattaggttcaaattaacaaacattttaattagttaaaacaacacaatatttgtaataaacaaatttgattaatttgatataacagtaagggttgactctattaatactcatattaggttgaaatttacaaacaaaatatttgtaataaattatagaatctctaatggagtagtaatatagtgatgtattggatatcttaatagggttattaaaaaaaatacaaaccgaccatctaactaaaccgttcaaataaaccgaataaatcgataaaacacacaatatataaaccgcgcaataaatatattagatgtattgaaaattattctaagccttaatccgaataaatcgatttctatatttttttttttttaaaaaaaaaaaagtatgtataatattttacataaattatgtttattattagttaagttattttgtatttaaaatatagaccttataatgtttcacttaaaatttaaactttataactaataatttttattgtgttgggatattaaaattaaatttaaagtttacactatattattacttttttcaatgtttagatgaattttgtttaatattttaattttttttgaattaatatttatcttatgttaaagttcttaaaattaatttaaactatatattaatctagaaatatttc

SEQ ID NO: 115323 - DNA, 1016 bp, Cannabis sativa
tcggcggggccggacatgagatcggagacgacggaaggaatagtcttcagacatttgttcttccagcaaacgttgcgaatcagagaagagaactttgtgcaaacgcaggccacgcgtgcccagtttcgtgggtcgttttcgagcttgtagaagattttaagaacgacatcgtcggaaagctttgagaacatagtatcttccattctgtaaataattttcaacgaaatttcccttcgtaaaaatataaactttgaatgacagagagagagagagagagagaatggcttagttaatgtacatgcaaggtatcgagagatatggtggcgttaaagtctaactaataaggctttctattcaagctttgattctggtttggttgcagttggtgaaaatatggaagtaatataagactttttcattcaggagagagaaaatctaaatgggtgaaagaaagttatatgaaagagaatattgagggaaggggaaggaaaatagagaaagaaaaagtaatcatcttcaattcaatatcattttttgatttttaattaatttactatttgtttttttattatgatcactttgagatgaaaagatgggaaggatttgaaattcatggagtctcaaccgaacaggagtaagataggtgtgtggtggtggggccaaattaagtgaagagcattatacttggacgtaaggctgccaacaatcttcgacatgcgatgtcgattcccaacttgattgtatggtacacaattcacccaccaccaaaactcatactcaacactgttttgcatccattttggaaagaaaaaataaaacattttattactagatattgtggcaaccgccttaattaacaaacaataaatattacaaaatgtgcatttttaagtgattatgtattatgcaatacatatgtgtctcttgttaatttaagttggaaactttatgaataaaatatttcaaaaaatagtggtgcaatcgatattatattattggaaaattctataatgcac

SEQ ID NO: 115324 - DNA, 3063 bp, Cannabis sativa
atagaaactcctattgcaactagagctgcaaccactttagaaatccaaaccataaatttgaaaaaataaaaaataaaaaaatagtatatgggataattctgttataataataataaacacttatttataaattatatataaatttataactactcttgtttttcaattttaaaaataaaaaataaaagtgtgctctataaattttattttcatttttatttgttgatttttttaaagtcaggttcaagactaggtccaggtccgagtctgaggccaagtccagcttaagggttagggccgggtccaagtctggggtcggaggcgagtccaagtttgggtttggggcagggttcgaggtctgggtccgggatctaggtcggtgtctgggatctggggtttgggtggggttcaaggtctgggtcagaggttcgggttgggttcggggtccgggttgggctcggggtctagcttcgggtctaggtcggggtttgggatctgcgtcgggtctgaggtctgggttgggtccagggtccatggtccgagttcggggtccaaggtttaggtctgggtcgggtttgatgttcgggttcggggtccaggtctaagtccggggtccagggtccatgtcgcggtctaggttagggtctaggtcccatggtctaggtcggggtcaaagtccaaaatattgattaaaaaaattgaaagtaacttttttttttgtttttaaaattctttaaaattttaattctcaattaaaaaattaaaaagtgaaaacagttttatataatatgattttgaaaaatattttcacttttctaattttaaaaataaaaattaatttaaaaagtgttatcaaacgcaccttaaatttcaataaaccaaattagcttatataatttttttttgatattgattaaaaataaatgggtagctcccctaagacgtttttttaaagtatattagtgttataaaaaagagaaatattgaatattattacagaagagtttatatagtgttatctctccctttaaaataaatattgaatatattaatgaagagaagtttatataattttttgagatatataattattttttatttaatattaatgggagattccacaaaaaaaatttattaaagtatattagattgtgaacgagcttggattgatacttttttatcattttctattgatgtattaaactcacttattattaataagaggttaatttaaaaaaaaaaaagtatattatttttattagaaaataagtataaagttactcagcgttaactcttcaaaaaaaagaaatattaatgaagaagttcatataatgttatttcttacttgaaaagaaaaaatatcgaatatatttatgaaaataagcttatataattattaggataaataatttctaaatatttaatgggtaactcttttaagacatttatttaaagtgtacttaatttttaataaagaatctgaaagtacaaatttatttagcgcagtcttttctctttaaaaataatattaaatatataaatggagaaaagtttagataatttttcggataaataattctctttagttaaattaaatggaaattccccgcagacatttttattttaagtatattttttattagagaatctaaatttaggatcaaatgttagtttttgctttattttctacaatgacttattttaagtttatatctttatacgattataaagactttaattattgtttcgagttgacaattttttgatgataaacattgtaaacattaatatgatctcgactacagacattctttgatgtctcttagggcaacttctaaagacatttttatttgtgaagtatattttttattagagaatccaaatttagactcatatttagttttgctttatttactacaatgatatttattttccgtttaatcttttacacgattataaaactttaactattgtttcgagttgataattttttaatgttgaacaatataaacaacttaataagtacgatcgattaaactacatcgctataggaaaggtaaatttttgtgtgtgcataaaattactcatagtgaactatattgtatctatatacaagatttttttcaagatttgtaacgttatattgtatttatcttttggacaaataacttaatgcaatccaatttgggatataatacagatttttgatatccgcatttaagaggtcgagattacatactaattgtggacttgtgaatagcctataaaaaccactatatgtcaaactaaggtcattacaacctaattagagctttaggatgaaggcagcgaaactcaaatgagtcccaaccccaactctatcttttgtcatcacttcagagttcaaacctatatatatgtagctgaaatcagcaagagagttagattaatattgtgtttgtctttatataaaaataaaaatatatatgatatatatgttttcattaaaaaaaattgagagctctcttagccccaacaccgaaaggtactatggaaagacgacggctgctagttcatggataccccaagttgtgcacacacacgattaattaatgttgcacaatttcagggtttgcatgaccttggagacgaggtctttttcaccgttttggattggggtgaagggagctctcaattttccacttgttgttgttgttgttattgtcgttgttattgttgtttttattatatttttttattaagaaaggttgagagctctcttgactccaataccgaaagatagtaatgaaaaaaccacgactgctagttcatggataccccaagacgtgcacacacacgattgaataatgttgcacggtctcagggtttgcatgcacttggagacgaggttttctttttctttttggtttggggtgaagggagctctcaatttttctcattttttttcttattatgattattgttattgttcttattatattttttgattaaaaaaagtgagagctctcttggctccaacactgaaagatagtaatgaagaaaccacgactgctagttcatgga

SEQ ID NO: 115325 - DNA, 3103 bp, Cannabis sativa
tttttttttatgtttttgcactaaaaaaatttgtgggtccgccgggtccgatgcatgtgctgaaatgcgagagcgattgggttaagttataagaggggtatttttggattttagataaagtggtcatatattttcaatagtgatatgtattagtttagggataaaatattaggtatatgtaagtatagaaaatcaaatttccttatcttaattagccaaatatttaatactaaaaatactactatttaatatgcgcgaatcttgaactaccattagctaattattgttttattatactccatgcactaatagaaatagaagacgaaaggttccagctattaattggaatgagttgaaatcatgggattattttatgcttatataatgttttgcaaattcaactaacataacatgactgacaaaatcaaaagattggttttaaatagaagattcacccttctaccaactcattaatttctaaagaaactaatataaataaataattagaaaaaggttcaattatatggtgttaagattcataatatgcaaccacttgagactagctcaagtggccataggagggtgcatgtgtgttggaggttttgagttcgagtcccaggttatgtattgtgtaatatataagcgcttgaataaaaaaaaaaattcataatacgcatttgaaatattttaatttatataaactattaatttccaatcatttatatattatgtatttataatataggtaaaaggccaaaatgttactgagatggataatcatttagagtcaatttcaaccaagtttcttaacaatttacttatgataaagttgaatcatagatagatgctactagtattacttgcactatgatctctatgaagaagcaatttttttttcttggcagggacatttgtaacgtgtacgttactttagctgttttatggactgatgactggccttacacaccaacacaagtatttccaacgtgttttgtcctcattcacacacttcctagaataacttcccacgaagattacatttacattggccttgtttgcacacgttaataacaaaaattaattatatcctttattttatatattctattaaaaataatctctaatttataataataaaaaataaatcttaatttagattaattataaataagaataatctctaattgtaattagttatgtattttataagtctcgtattaaaaaagtatatatgacagtcagtaatcctgagtaagctatgcaatctcgtgtaactaggtaagttgtgcaataatctcacatcgcttgaaaataggggtgcacatgagctgagttggctggattagaggtgttttaatgagccaccctaatgattgcagtttggagaagctataaaccattcatttttttattatacaacccaatcctacttagtataataatataggaggtgggttaggttggtttcattaagttgagatgaatattttaaactttaatatttatgttacaaacatgatagaatgatttaacttagtggatatacaaaaaaacgatacatgtaaatatataaatgtgtgtgtgtgtaaatatagtggtagtgctttaaaaaaatctaaggtggccgtgttatcattgtcttgctatcaaagttaaaaatagtgattgattctcatgtgatattttggtagaagtaatagggtaactatggattaaatgttagtgatgtgttttagttatttcactttctaacgttatcataataatataatttatttattaaaatgtaatataaatatttgtatatattttgtgaatgtaaaatatattttatatataaaaattattttaaatttggaatgtctctcaataaatgggttgggttgggttatatagagtttgagtgtgtccaacccatatccaacacataattatatggcttatcactttttaacccgagctatgacctactcttaacataacctcttactataaaaaatgggttgagttggcccggttgaatggtttggctcatattttatgcacccctacctggaaacggtcaactgtgatgattcttaaattgtgtaggtatgagattacacagttgaagagagtttaaatggtgatgagaactacctatgtcaacaaggtgcatattgtttttggtggcccatcacttgagaactccaaagttaaacgtgcttgactttgagtaatcttagaatggtaaccttctgagaaggacaaaactcgttgaaaacacttgttggtttgcaggattagttgttattggtaaacctttatagaagaataattatatcttaataatatatatagttgaaaaatttacatgataaaccaaaaaatttaaaaaaaaaaatacgtcaacacaatttttttctatttttgtgctttgaatttttttattaatagaaataccccttcagtaaaaaataataaaccattctcttggttgttttatagtttatttatagttgtcatgaggtaggttttagttgttttatagtttattcatagttaccgtaatgttaatttttcgttgatttcttactttttgttgaaaaaagtatatttttataattttaaaactttacaagtgtatatttataagtaaaaaacctaaaattgtaaattaaatataaaaaaaatatttttaaaaacattttcttatataatttataaatttatttatgtgaaattaataattgtatttcaatgttacatttacttaaaaataagattataatatactattaaagattatttattgttattattgctatatttgtacctctatttagttataaaagtggtggacaacatccaatccattccaatcaaattcgatcgaaccgattcaatccaatctaattacaaaaaaaaatggatatccaattacaatgggattgtattatatgctaaaagttagattctaattggattggatcagttgttggatgtaaatctcaaaattcaattaaagacccatccaatctaagtatatgggaaacttataaaaatactggaatttgtgttaacttttacaaaaatactgtcacacggaaatctttttaaaaat

SEQ ID NO: 115326 - DNA, 1337 bp, Cannabis sativa
  modified_base (34)..(38): a, c, t, g, unknown or other
aaccatgcaatataaaatgttatttctgatcttnnnnnataagtaaatctgattatatgaaaggagttttatttagggcataaaacccaacagttatttcctctaacattctaaaggtgaacagagagttgcttccggcaaaggacacagcttgttggaactcttctttgaacggcaaattctctctaaaagttgcttattggtctcttaacaaagagaggtttgaggagaaggatgtattgagttctaaaatttggaagttaaaggtccatgagcgcgttaagctgttcttgtggaaattatgtcatgacgttcttccttttgggtccaaattgtagaatatttttgggaatgctcctggtgtttgtatgctttgtgggcatgatgatggggatacggtaagacattttatctccctctgtcctgtaacgcgttccctctggttttctacccattggagtattcgattggaggtccttcagagttgaatggcagggaggtggtgagtcggttgatatcaccgcctttcttcaatgcattgtcgcagaccgatgcctgtgaattcactgtttatggtgctatgttgtactacaaactgtggaatcaccgtaatgatatgtatcatcgcggagtccctttggagttggataagttaaatcgccagattaaggagttggcttcggagagtcttaatctggctgctggtgttgatatgcaagtgggggggagaagcgaaacgggggagtatcactgaggtttaccaggatgatgaaaggtgaagggatatgtggattgtgctttggttaaggaggttggagtcgtggcttctgttttctttgatgaagcagggaacttagttgcttttgtggcgaaaaaagttcacgtgctctcggctttccagggggaattggaagctctggctttcggggtggctcttgcgaaggaactccatcttggtggtgtggacttttcttcggactgtcagcagctggtgcaagccttgattgtgggctcttctcctgtttggtttcttacgctttcttttaatgagctttaccatgctcttgttgcgaacgatagtcatgttgtttggatttctcgtgtttttaataaggctgctcactcccttgcgaggtggggtttgtcccatccttgtaacggtctgttgagattttgggaggtgagtccccacgtgctcaccaattttttcgtttctgcttaatgaagtttggttatttagcaaaaaaaaaaaagtctccaacaactatatttttaatagctatcattcattcacattcataaacaattagtaacatcttttactaatttaagagtaa

SEQ ID NO: 115327 - DNA, 526 bp, Cannabis sativa
  modified_base (466)..(474): a, c, t, g, unknown or other
tatatatatatttcttttactttttttgattaattgttttgtaattacatttacatatataacactctctcaaacacgctatatttttactacgtccacactactttgagctaattaatgaaaaaatgtgtatatttagaaaaacataaaatggacacaatataaaaattacacaatttaacctaattataatttaaattataaccaaaaaaaaaaaaaataataagtttatcaaacccatttgttaatcttccagatagaaactaagattaggtaagttgggcttcaatctttatttttaatatattgaaagccaatcatgtcaaattctatcttaaaaaaaaataggcagagggacgattttaatctaattcaatttttaaaaaaaaaatagacgagatggaacgaatttaataagagatccaataagtattcagacaggctcggccctgggcataggcgggcnnnnnnnnngcctagggcccacccagcccagggacccaaattttttttttcctcttttaaa

SEQ ID NO: 115328 - DNA, 3486 bp, Cannabis sativa
taaaaaagtaaaaaataccgcctcaccgtatttttgtaaaaaaaatgacaaaaattagtatactatgtaaatttccctataataaaggtttcatacactaaggcaaatttgattttgtgccttccaaaacatatataattttctttttgaaaaagagtgttatgggattcgaacccaaacattgtatagtatgtcatacaccttaaccaattaagttatgaatatttgttatttaccatatacttaattttacttaaataaaaacttaacaatttttttaattttttattttgggccctcgaaagatgtgggccctaagcacagtcctagctcacctatgcctagggccaatcctggtttcatattagaatgatattctcgaactgcaatatgggactgggaccaatggtataaggtaataaagttctaacttttcaaagatttttatattgtggcctaaattaaattttatgcaaataaaatagccaaattaacttaaagctataatacactcaaaatagtaatgaatctttttatattacatttaaaatgttagtagggttgcactttgtacatgttatagctaattcagcatgccttgaatataaaactcgaagtagatgtagattcattactattgcgatacagagaataaactactataaatttactgtatctctcttataattaattaattacttttttattctcgccaatttagccagcgggttggcttagaagtctagtccagatatttgagttaatattttggttctttcgttaagagccacaactcaagaaggttattacaagatggttgcaacacgttctacacgtgttgagtgttgacaggcagactccaacaactagccaaacaattgggggcacaccagttgatggagttggaaccgggacttttgcaccccaagcgccaggagtaggcctcggaaccagctcctcaactcttcctccaaggccactatcaactgctcctgggactggcaccaacgaccagatcccgcttgaggagcctcacttggagatagatgaccctaaggaggccaatcctcgactcaaccaaactatggctgacttgcaataacatctgcgagactctctcgataagaaacatgaatagtttcgacaatggtttgtagaaaactggaggaaccattaaacgccaatgcgtaaagcaagagaagcagagagctaacctatctcaacatattagagaggcttattgctttaatcgcgaaactacttcccgtagaggtatttccgagttggtgagagagaccccttgtcgaccaactagtcacatgggaactagtgctcaaggtgaaacccttaacgctcaaaacaccactactacacctagtaactgagcgagtactaagcaaataccaagcatggagacctcccagagggaaagtacctttgagcaagagcacgagaggactcaagctcgtgggcacaaaccaatgggccctccacctagtgttgaacaacctcgcaacaatgagagaaccaacaggaatcctccaaaaagtccttctcattgttctcaagaaacagatcttgagaccttgcaacgggaaagggacctgctactcaagctaaaggaggtagtaggagacactacttggaaactagaggctatgagatctgatgggtaaggactaaagagccacttcatacttgaaaatacttttgagatgaaaggggtgaattatatcgttactttgtctgtggccctgatggctaacagtgtgagtacttccctcgagggcatggagagaaattaaacctgagcaaccaattcaattcttttcacacttataatctggctaaagactacttcgagggaagtatccactacattgctccaaatgaacactcccacagtgggtcatcccgagacgatgcatagttcattctagaggactcactaaagttgccttcacaactttgtgattaggagacaacaacaagatccaagtcgaccagagtataagatcagtctagaagaccaagagacttgtgtgacctcttaaccaagaagagaatggtggatgcaggaacttctagagaaggccctattcgggtaacagaagctccgactgcgatgcaaaacaccactcatggggtcaactgggcataactccacaccttggctgctttagtgaaggagatcacaactcttaagttttctgaatttgagttcgatagagagcaacgctcaccactctcagaaagaattaaatctcttccaatttctcttaggctcaagagccctttctggcatcaatacacaaggaaggaagatccattatttcacagccactactttgaagtgcagaccaatctacaaggtgtgagagacgatgttaggtgctgaatcttgcttgccacactgacaggcctagctcaaaggtagtacatcaagctctccattcgtttaatcaactcatggaaagatctagtggatgcttttggcaaccagttcgctccttcctaaaaatggcagattgagcccaatgatttgatagacatcaaaaaacaggaagacgagcaccttaaggactgcatcgatccaacggttcttagaggcagtcagtaagaccaaaagtcttagcgaggatgcaagggttatgagactcgtagtcgggctcaaggagatgagtcctttatggttcgactttcgtctcaaggtggtatacaccatgaatggcttcttagataaagcaaatggctttatctaacttgcagaagtcgtttcctgacccaagggctcaaagagtggcaataataagtcaccaaacactaaatcccctcctactaaagcgcaaggaaatgagaagaagggatgttcgaacgaaagaaagagaaccaacaacggtggtaagtcaggcaactcccccggtgaaaagaagcccaagactataggggcaagcccttacgagattatgagcctcacttcaccatttactccattctcttagctccaagagaggagatctatacgaccacacaatcaacattgtcattctgcatttaatgtagatctttggattttgcttcataatgtgaatcaatttcatcaaaattgaggtaaaaagcattcagacctacgagccatccaataagtaacatgtaatatataacgtcatgattaaaactcttggaggaaaacgaaaggacaccctatagcaagtcctaacttacagttaacctagtcttaacctcgtactttgcgacttaccgtcgacccaatacactaccgaacctgcaaaaattaagcaaacaaatagagagaatcagcctcaagctcctatactcacattataaaaatttgaaaaccaatacataaattaatatgcataaaaacatttaattttcaatattaatatttgttatattattttataatataataagtgtagattaaaatgtagtaatatatattattatgtgaataatatgtat

SEQ ID NO: 115329 - DNA, 3056 bp, Cannabis sativa
tttttttttttttgttaaaatttccaatacatacttacctattgttgctttattccaggccaaaatatttctaaaactgagacctccaaccttcttaggcttgcaaattttctcccaagcaattattccgtgagtagagctataagcattcccatgctaccagagtacccaacatgtaacattaatctccttcataattttcttcacaataaataaaatttgactccaatatgtatgtatagagataagcaccaaattaataagagttattcttcttgtaaaagaaagattttgagtgctccaccttctaattctcctaaccatgagtagatattttttcagcacatattgggaccccaaaatattgaaatgtcaagtaacttttttaaaatccagaagcatcaatcagccgctgcacttcactttcattcattccaccacaatacatggcagattttgcttcactcagaaatagacccgaggtcttgaaaaatagtttcaatcattgtaacatgaagtaaactgatttgaaatcaccattgcagaataataaaacatcatccgcaaaactcagatggttcaacataagatctccacatctttcgtggaattgaaagttagacattttcccaactattatgcaggaaaggtactccatgcctaagataaacaaaaggggtgacatgaggtcacctaatcgcaacccactttttgcttaaaaaagccatgcaactctccattaaaaattaaggaaatttgaaagcctctaacatcttctatgaagtcccattccatagtgtcgtaataacatctcttctatgaagtcccattccatagtgtcgtaagctttcgtgagatcaagcttaatcatacaactaggcttcaaactctttcttccatagtgtctcataagatattggcaaatcatgatattatgcacaatgaatctaccatgaacaaacccgtcgtgattcttcacaataaatctggcagcacagttttcaatctggagcaaatcatttttgtagccactttatagatcacattgcaacatgcaattggcctatagtcactgacaaagttggatatttactcttaggaataagaataagagatgttgagttgatttcttttaggatcctgctcgtatgaagaaagacaaagtagcttcacttatctccttcccaactacatcctagcaatcttgaagaaatagttgctgaaattatgaggcccaggagcttttaaacccagaatagagaaaattgctcgtttaacctcctccatagtgaattgcaccattaaccatcagttttgtatctctgtgacgagtggcccttgtctcacatctaccatgttgactaaaactcttccttacaaattactccccaacagattctaatattaagaaagaaacgctgttgtaacttctgttggcttatcaacccgaataccctcttcggtcttgactaaatatatcctatttttcaccctaatatcttgaagataaggatgaaagaaacatgtattctcaactccttcttgaagtcatttaaatttaggtttttggtaaagaaaacatcacattaatttttgtgttgcaacaaccttttttgagcctcactctcattaacaatcagctcttcattgagtaaatcacccttaaggggttcctactaattaactgtcgatgttctagttaattgccttccttgtttcgataatcaattactttatgttctaaccctttatagtgagcataattaacaggaacccattcataattcacactgaccgagacattgcatcccatttcattttgaaagcagaataattctagaaattctttaatagtggtgactttaattaagaccctagcgaaattcaatttattccagttcttagtaattgaatccaccatcaaaggtgtgccaaattgactaacaatcttgaagagtggtcgatctgcccaatatttaagcttcaaatatgtcaattgaatacatgttggaacttagagacattctcttttgtgaaatttgtctaagcatttcatggcttaaggatcaccgatttcttgtcaaagaaaacatatatcccgaccttatctactccctcgttagaccacacacgcctagcagaaccctccaatacagataaataggtgttattagtgtttttggagaaaggacacatggcaatatattgaaggtggcgatccaggtaataacaaattaagtactgttaatgggagaaagttgtggaaggactaaacgaacctaagaaaggtcctaatctaggttaagcttgaagactcacccgaaggaaaatcaccatctgagacccgaaagtcttgtcattccttcggaacccagagaagaccaaatcaactaagtttatagggagatacttgggagccgtatgaagaatctaaggcggatgctaattgcacaagaaaaactggaagcctgttgttaacgcagattttcgttaaccaataataagcctttttcgtaataaatttaatacaaaaattataagaaatcaataaagtataataagtataataataacaccagatattttacgtggtattgcagttaaatctgcatactctacgagtctatctttttcaagatatttctgagtatttaatacaatatacaattgatagtatttctgtatttctctcaaacatgttctgtctctttttatagtgggatctgcacctatttataggaataaaggttggtagttatttacattttaaattcaaattataaccgcttcatgaaacatggaaattgatcacgtttcatttaaacatgtgtagataataattggtaagtgcataactgcttattattcttatcttcaaatatggtagatgctgatttggacaatcgcacctcgcttaactcgtagatggtcaaatggtgatttggacaatcttatgcattccaacaatgtcatgagcaccagtgtactaagaaaacttaagaactgctctttgaccataaggcctcgcagactggacaatcatgtcttgcatattt

SEQ ID NO: 115330 - DNA, 2429 bp, Cannabis sativa
aacactcagataatttttttagcgacgggtccccaaaaaaagcgtttttgggaccgtcgcgaatttggccttttgtagtagtgtctatccctgtagatgaggcatatggtgagtaacatcctgtacctccccgtggagaagaggaacataattaggttggcctgtgtagcgaacttttagaagtatggcatgtatcctcctacttctagagttgtgggggccgagggtccatcagttggtgtggatggagccccaactgttgaggaggtatttccttgtggtggacatgttcgagacatggatgatgatgtgcctctatcttggatagcctgggctctagagaagagagagagggccttccgctagcgcttggcttgcaggggcccagttggagatgctactcttcagattaggcctaaaggctacagctctacagggcctactcccccttgcctacatcgagaggtaagggcaaggcagccattgaggattcaaatgattccacttctgaggatgatggtatttgatagttgattgcaccatctcttatattcttgtcttgcaatgaatatttgtaacttgtattttgactttgttactttctcctggcagatttgtcttctagtttaagaggtctagctagtggaccttcaaaggagtcttcaagtaatccattggccaaagtggttgggaccacccatgctggagatgtcatgggttcatctcttcctcctcctcctcctcctccatggtttgctcaagctaggcagcccataatggatgaccctctagtgaggagggatcagctttcgagcaagggtgccctgaggcctagtcgaggagcaggctcaatcgtaggctagagagccatggaggcagctcgtatgtgtatggatagggcttatcctactgtggatagcaagctataagagcttggtgacagtgagccagagaggctctcttctgtcaatcttcaagagttggccttggtaagttgcacatttacctttgctcactttcttatgttattgcaagttggctgaccataggggttgctgtagaaagttggtcggccatgagttatgttttggataggttgattggcattaggtgcactgtacaagggctgcaggttggccagtgttgtttctggcactaatcttgacctttttttgtttttcaggcctttatgaagctgagctttttgcgtggcaacttcaaggggtctttgagtgctcttttagagcagataaatactttggaggttgatctctaagcgaaaggcgagactttagctgatatggaggcttttggcctgtaccaaaatatgattttcggtttggaggccatgctcggtgccaggaatcaagagaacaccttgcaagttgctgacatctccaagttggagactgacctcacgaggtttgaggagaagctgagggcagcccatgatggccagcaagctataagggatgaatacgtcaacttgtcttcaaactcatatatgagttcaagctgcgtaaccccaacactgatctttcatacatggcagatgcttctttgctagaaagcacattggcctaagggagataactaatctagatcaggttggaagcgaaccagaccatcttccagctaaaaggattatccttagggaaatttgatgaagagatgttcagcccacctgctaacgaggtggtcggccagggctttgactaggtggctggctagcctatagaggctatggccgacccgcaattccgcgaaccagactctgctactttcgattctgccccacctacacctacatacatgtagtttttagcttattagtatttcaactttatggtttatcaatatagacattttatttcatgttctatatggcctacgggccttttacttttgaacactacttatttttagcctcaagactttcatgttcgtactcttggcctataggactctatttttgaacattactactatttagccctatttctttttattatggattgtgttaccgaccaggcaacctttaatccttgctatcttcttattgtcttgacatgtaagtatccagatttacatttctttatgccaagttgaagtatgattgcactagacttagagcaagattttatagcttatactaagcattaaaatttatctgcataagttctctgtgctacttcgatgcattgtatggtgtgggtgcccccaagtgagcatgcaaacttgcggtctcctggtcacttgaaattcaccaagtttcctagaccttgcctaggaattttcttggggtgctacatgttgtatgcatgtgaatctaaaaaaagaattactttaagaagttaatcttgttagcaagtggtttaggcacaataatttgaacataaatattgttttttattcattaattggtgttt

SEQ ID NO: 115331 - DNA, 1436 bp, Cannabis sativa
aataaagccgataaacctagcaccaaaactaaaggcagccaaagtattctctaggaagcactattcgaatttgtcgtaagcttttgacatatttagctttaagccgaaaaagccctctcgactgttaattttcttaaggaaatctaaaatttcatgggccaaaatactactctctaccttctcagaacaaaagcagattggaaaagggaaatgagattcttaagagtgggtctgagacgcttggctagcaacttagatatgactttttaaacaaagttacacaagctaatcaaacgaaaatcatcaaagcactgagggcccattttcttggggataagcactataaaggtttggttcaaggcctttacaaactcactcgtatcaaggaaatagataactttattagtaacatctttgcccatcacatcccgataatctttgaagaattttttaggcatcccatttggaccagaagccttaagaggaggcatagaccaaactaccttcttaatctcgtcaacgctaagggtaccaacaaggtcagtgttagtttcatatgagataattggctatctaacaaagcttggctcaagtggcaagaaaaagaggaagagaacacttcctgaaacttttggctgaagtagcgcccacctccatatgaccttcgatccaatcaacaccattatcagacacttctccaataaaattcctcctctgcttaataagggtggcagcgtggaaaaatttagtattcctatctccatcccaataccagttttcccaagatttttgcttctaaatctcaaatttacgagcctccacctcgccaatttctagcataatgtccgcctcaagttgaagattgttctgagagggaactcgtccttggacttgcaacaacagaccatagagcatttttagttttttatcacgaaaccaaaaaacctccttgttccacttggccaaacatagacaagtatgagagatacaacccataagctgaaaaactcttaaatccttgaatctcaagagctcaggcattcttaattacctccttacaactttcatccctagacaaggcatctaaatatcggaaaagggttctaaacctctccctgttcataagaagatcaagaaaagcagagcatgatctgactctttaatagccaatgaacgaaccccaggcttagggtaggctattaaccagttaaggtctccaacaatacggtaaagtatttccttaatgagaacttgaaaattccttccattagaccaagtaatatggttccccatacaacccaaattaactctgtcagagaaacttaataagccattcaacccattactgtcagctaggggtgtacgtcggtcgggttataacatatttttattaacccaatataaatatcgggttgcaaatatttaatcgtaacccg

SEQ ID NO: 115332 - DNA, 1603 bp, Cannabis sativa
tgtgggcttagacagggggatcccctctccccagccttattcatccttgcggctgatttgttatcaaggttaatcatggaattcaatgtttcggggaagattcggggtctcaaagttgcaagaaatgctaccccaattacacaccttatgtttgcagatgatgtagtgctctttggccaagcttctatcaaggaagcggatgcctttctccaatgtatgcaaatctattgtgcatggtctggacaagcagtcaactttcagaaatcaacaatattcttttcaaaaggtgttcctaataatcgtgctagcgtcattgctgagaagctaggaatgaaaaagatgaagtcagatgctacttacgttggtttgcctctgtttcggtcatctagaagatcccgagatatgcaatttttggtaaggaaagttcttaatcgagttcagggatggaaatcaagattactttcgaaagctgggagagcgtgtttaattcaatcagtgggaaactcgcttgccttgcactcggctgcagcagacgtaattccctctggtatagctgattctcttgatcgcagtctccgaggtttttggtgggggtgatcttgagactaagagaaccctccatactgtggactggggttctctttgtaattcgaaactccaaggtggtctcggtttcagacagactaaggatatcaacaaagcttttgttttgaaatggggttggaagatggtgtcggatccctctagtttgtggtgtacagttatgaaggagaaatatctcaaaggagaaaacttctgggatgtacaatgtaaagcatatgattccaggttgtggaaagcggtcctaaagtcaagatttcttctcaaggagggggtatgccgtaaaattggagatgggaggagtacttcgatctggtttgatgattgggtgcctattgggaatcatcaacctatgccgaaactgaatgcctcacagggagttaatccagtgagctcttttatcagtaatgagcagacctggattgaaagtagagttcggttttgctttgggcctgaggatgccaaaaatatcttgaatattgggttacctgcactcaaacaaaaagattcttggctttggctaggggagaagaaaggccttttctctttgaaatcggcttaccacttggttactaagcataaatcttctgattgtccggacaggcattggaaagtgatttggaatgccccaatccatgttcgactcaagctcttctggtggcaattaagaagtaatgccctccctactcgtgagaaactttctatggccttcaacatcccttctactctctgtcctctttgtgatgaggatatggaatcctctttccatctgttgtggtcttgtcattttgcaaaatctgtctggtttggaagtctgtggggaattaggacagatctttgccagtgtagtaattggagggattggatggattggtttgaatgtaacaatcatagaccggttgggcttagctttaatgactttatgataggtgcgttgttgtgaaaattctattgctttataattgcgcaagtgtacacaatcacaaacaagtaatacaatgat

SEQ ID NO: 115333 - DNA, 630 bp, Cannabis sativa
aagaaggctcatagatattccaacgctttgcttcctcttatacttagaacttttattgacgatggcattttgtttcggatttcttagaacacaaacatctccgtcgcatatgtatcgtttgggctgggaagagaagcacccaaagatgtttgagagcaaagccatattggacctttaaacgagagagaatatcagaagacgactcttctgttcttgtgttgtatttgattttgtgtttttcagccaaatgcatgttagaaaaaccagacatatatattggttatgacaatgagaatagagtcaatgttggtgggtttaattcgtacgaagattgatgtgacacgcttcaaattatggacttttcaaccagaccaaacgtgtcggtatccacttctggatgctctataaaactattgtatcataataatatgttatttattttatttttttgaaacggaataatatatgttatttcattgacccatgttttaagaattttattctaactttataattaatcaacgttaattttcaaaaaaagaacacaaaatttataataataataataataatctatatatctatatatatactagcaaaaagttacgtgtatactaaattttatgctag

SEQ ID NO: 115334 - DNA, 835 bp, Cannabis sativa
aattaagagtttttcattgaggaaaaatagttacagagtgcaatatatatacacgaaggggagctggaaagatgctaaaacagaggagggacaaaacagtaaaacagttatcaactaactaaaaataactactatcctaaataatagctgacagtgtaaccgaagaacttaatacacttaataataattatcaagttgacattcaagtgcaagaagcttcactgcagaaaagtcttctgaatagtacttagcgaattcaactagcttcattttgtcaaaagcaaaaaaagaatcatttggacacaaacatgatacacaaaaaagcaaatttgtatctacctcattgaaacgatcattcaactcttgaagttgtatatcaataacagcataataccactccacacgaaaatgatgtaaatttgtaacatctggtgctttgcgtagtgatcgtcctagagtcataaatatagcttccatgttttgaaattgttgcttgcatgctttcactagatggatagcattcacgacatcttgatcctttctttgtaaagtcactgacaaattatttgtaactcccaacaatctcatcattaaatgcaaagtgaacacaaattcaaatgagagtattgattctaacaaactattgcttctattttttgttcacatgtgatacagttactactgtttctaactaactattagttagttaattagttcatgacagttaatatcgtttctttgtaacagttttcagttcctttctatttctttaattcttgcctttgccttgtattcatcctctatataaatgaaatcatttctcaaggctagttag

SEQ ID NO: 115335 - DNA, 2066 bp, Cannabis sativa
  modified_base (2006)..(2035): a, c, t, g, unknown or other
ttttaataactatgcatttagggaaataattttagggtattgtaagtatgaaaattcaaatttcccttatacaattagtttataataataaactgacaatttaaggaaaatatgaattatttaaaactttaataaccattttaaataaatatattttaaacttccttttaaaatattactaagtcgggatccctttcttacattcaactttacacaaaagccctctttgtattgtttgttacaaaatagccataagtattacaaatacttttaaaaaattgatcttttccactgacggccaaaaggtagcggattgatatgtacaaagctagaagacttctgactcatggctggtctgatttcccctttcctttacctgcaccacataacacccgtgaatcacaaagactcaacaaggaaaccaagaaatacaaaaattacgaacaatataaaacattaagcaataacaagcatgcacttaaacatataattgaaataattattcataacataaccaaaaaattaacatttcaattacttgtctaataagacaagctatttctaatacttaataaagtatccatgaccctcatatccaacgagtcactaatgtcacgatcatttcctaatgaggcaaccaataagtaagaaacctaacaacggttttaaattagagttatcacattaatggcaattaccatttcttaatcagtcgtgcaaagtggtacaattgacttttcttacctcaaatccaagtttaggtgtgtgggccgacctgagtagaatactgcttgacgatcttgggtcctatgttacgataacggtaaatcgataagtatctatttcaaaatactgtctaatactcacataaaataacttaaggttttccacataatctcgtggtaaaaataccctaaaataaaatacatattttagctctaacttatgcttcatattatagagctcttcataagctttgaaacggtatatagaatgtctaaaattgacacttgagtgaaaagttacggccaaaatataaaaatcagcgattcttgaaaactgaccaaacagaattccagttggtatagccctgtaccatccgaaattctagttcacaacagtagggactcaaaaaatttcaggttttcaaagtccaaaaacttactctaaacctaatcaattgctcacaaacttcaaagaacagttctatatcatccatacaacatatccaaacattcaaaataaaaaatttactcaaaatcaccattgttaagtgattttttgagttcttaaactctaactcactcaactcaagctacaacaacaaactcaacctataattcacagtaaataaaaataatttacacctcaaatccaattgtaactcaaacaaacttaagtatgtgtgaatggaaagcctcaaggtgaacataaaatgcataagtctgggattaaagattgcccagtcaaatatatattcaaaaccaaaagaagataaaactaggattaaagaccgtttgtcggtcaatagttcaaattaaaaggccttagggctatacaagaacaaaaaaaatgtataatacaagcatgaaaaaagtaaagtcttcaaattttttcaggtgcagatgagttcaaagcagctgggtactaggcagaaacctcgtcagtttgaacattaggagtctccagaacaggattagccataccagcaacctacacggtaaacatctcgtcaataccttggctggtaagtacttctgcaaaattctacctattcttgtctgtctggcctgcaagcacctcagtagaagcttggcctatctgactggcaggctcctcggtagaggcttggctagtctagctggtagaggcctctggagcgttatcctggactggcctggatgcaaacaaagctgccccacaagcaatcaggtcctcgtagagaggagtatccatataactatagtatccctttatattgttaatgttgttggaaattattttannnnnnnnnnnnnnnnnnnnnnnnnnnnnnttattaacatcctaaataagaactttctaaa

SEQ ID NO: 115336 - DNA, 1099 bp, Cannabis sativa
aaaaaaaagaaaaaaagaaaagatcttgagccaccttcgtcagcggatcatgatcgatcatcagtcagattaattataacaataataataaataagtgaaagatcaaaccttgaaatctctgttaataagcatgccgactgtgcaaaaagcagttgcgaagaaacacatgaccaattgaatctccaagaccaaggagtatgtaatcctctgcttcgacttcttgtacatcaactctaccagcggcaatatgaggccgtacagaaccgacgcggctaccgtcatcagaaacccaatcacgtaagatttctccgactctccgttgggccggtcactgctcgtgtggagagccagcacggccgcaccggtagtcagcaaaacgacagagtttacagaatacgacgtgaacttctgcttaacaagaaggtaagcgaatacggctgtgaaagccaactgagatgcgattataagggacgatgtcgatatcgggagacgagccacgccgtaggcgtacatgtagtcgtcgaagccggtcagcaaccctatcacggctgagccgatgaacaaaaacggcttcatctggatgatcttgttggatgggttgtgactgcgccggcgttggtagtaggcggcggctaaggggacaaggatgatgggccagccacctgtctcgagccagcttgagagccagactcgtttgccgccgcggaggaagtagagccgcatgattagtggtcccccacagtttcctattgttaataatatgcagttaactataagcaggatccttctttgtttggtctttctgttctcatcttcctccatttctttgaagctaatttgttttggacttggagtttgctccatttaatttgacaagtattgttagtgtggggacttatttataatgatatgaaactgccacctttgacataacatttatttttctacaaacataaatagacataaatatgcctaaataattataataataagtattgctattaggcactagtggtgcctagcacttctcgacatgtcacgttgcgattggctagcgatgttagataaattaacaattaactcaagatctatttgtat

SEQ ID NO: 115337 - DNA, 2446 bp, Cannabis sativa
  modified_base (492)..(503): a, c, t, g, unknown or other
aaaagcatgagatacccaattaccctcttatggtaactagttacccttatggttactataagggtacttagttactctttgattttctcatatttttcaacaatttctttaattttctcacaaaataacctttttggaagaaaaaaaccatatttttacaccaaaaatataaaaaccataaaatttgtaattttctctagtattgatgattgataaataaataattaaaaatgtgatatttattgtgggctaaaatttggctcatattatcttttgtatttaatttagcaaaaattttagtttggaccaaatttaacacacattttacatcaacgttagagttaagttttaataaaatgtttaaaaaaaaatgacatacatcacatttcactacaaaaaaaattgttatctttagtgataattttttagtcacaacatagattttttgtgactaaatgtgacttttagtcataacaaaatattacttgtgannnnnnnnnnnnatttagatacaagttgttactaatttagttttagtcacaacaagtattgtaactaaaagtacatttagttacaacaaattgtaatttttgtgactaatacctttaaccatgaaccttttagttacactataggaataataatttataattagtcacaattttttcacttttcgttacaaattttttggcaactaaaagtaagattttttgtaatagctatttatttgagatgctctaagagttattatattaaattatatgagactcgatattagaccatatttatacatgctattagatatcagtaatacatgctaaaggtgaaatgttagttaataatattgtttaagattattatattggaattaatataagaaattaaatgttataatgaaattaattatttaggtggtgtttggtaatatttttttaattagttttctgtttttaaaattaaaaatgtgaaaatatttttcaaaagcatgttctataaaattattttcattttttaattttttaaatgataatcaaaattttgaaaaaaaaaaaaaaaattctcttacttcaatatttttttaaacatttttttttcttaattaatatttttggactccgattaaactcggacctaaatccctcccacagtcttggcgttgaactctgcctctgacccgaactcaaatccgattccagacctaaacctgacttaaataaaataaaaaaataaaaataaactttacagagaacacacttttgctttctgtttttaaaattaaaaaacaaaagtatgtatttacagaacgcatttttatttttcaaaaacaattttttttaaaaaaaaaaaaatatatttttattttataattaaaaattagaaaataaaattttcaaaaatataataaaaaataaaaatattatcggtaccttaattaaattaaatttattaattattatttcctagctagtaggtgaatcaataacacggagaataattaagaccctccatcaaaaattgttgtccccaaattgtgtccatccaataagattttgacaattcttttagtcaagcggccttcaacgtacaccaaaatatataagcacaacaaaatatattaaaataaaaataaatgctaatcattactttttttatattattattagtattattattaagtactcttatttaatttaatataataatttttcaaaaattttactaatcaatataaaatattatatataaagcaccgtgactaacgacaatggtctatgtatatatgtacttttactccagccttcaatataaaatctgtctctaaacacacaaaaacatataaataatattgttaatttagtgtaatatattatctgtgcaaattgcttttactttttattcttgattaatttttattagactatcgaaagaatcatcgattatattattattgaaaaaaaaattattattattatttgaacaacactttagtacataatttaagtacacgtatatactattactctttgataatacagtatgtattttttttattgatttaacattttcttattatttaatatatggagagaaaaaaataataatttaatttgttgaaaagtttcaataatgtcttctccttatcattctaacttttttattaagaattttgtctctacatagcagtacgtaattatctaaatacttggtttataattaaataattattttgtgttacatatatttaaattaaaaaagtattcatggtaactagccaataaaattaatcatgttatccgttaacatataatattatcggttaatataaaataatataatttttatatctttatatattaaaagtgtctatctaacggtatttcttggtttaacagaatataccttaaaaataaaaagaatattctgttaaatttaacgatgttaatag

SEQ ID NO: 115338 - DNA, 4035 bp, Cannabis sativa
  modified_base (3185)..(3193): a, c, t, g, unknown or other
  modified_base (3586)..(3599): a, c, t, g, unknown or other
attttagtgtttaacttaaaacttagactttatagttaataatttttattgtatttggatattgaagttaaagtttaaaatctctaccatattttattgctttttttaattatattattcaattataattattttatgtttactcaattatatttattatcttaatattatattaaggttcttaaaattaatttaaattatagtattttttaacttgaaatataaataatacatttttttttttaaatctaattatttgaatattagaaactaacaataataattattaaaaaaaaaaaattgaaaaacggtttggacgggttaacccgaccaaaccgatgaaataattgaacgggttgagctttctctaacttttgattggacgggttaagattaaatatttgcaacccgatatttatattgggttgataaaaatatgttatataatccgactaaatcgagcgacgtacacccctactaacttatagtggtgttgggttttttatccatacttttattgtgggctccctaaaatacgcagcatcatcacctccatattatgtctgttagggaccaacacattcaccacatttcaatgactttcatcttttaattttatttatcacttgaacttttagtcaaaccatttaaaagcagggattcataaaatattcattatgactcaaatagttgtttcctttatgaaaatgagttcaattctgatcagtgcacagagctaacggtttgaagcttacaattcatgaaagtcccaactcaaaaaatttatttgcccacaaaagatttttcaaatcaaacaattatacattattaactcatcattgcttttgagtaaccaatgctttattttagccatattcagtagtttctaaatattcactataaattaaagaaaaaaaaaaccaaatattcactataaatgagtctctaatttgtattagttgtatgctggccactaaaagggctgatattttaaattctatattgacaaaaatttctttagcttgtgccaatggttgtgcccaattactaaaattagaaaaaagtctttaaattcaacaatcttaatagttcagagggcatttttaacgaccttaaaagttcagggggcataatttggtacatgtcaaagttcaggaggcaaaaatcttaattagccttaaaataattgtaaaatacacatatttttttttttttatttttagaaccaccacaccacaccatctcatctcaaatatataataatacatatgtggctaattaggaatatataaatatttcttgatattttgacatatatcaaaatcatcttttaaaaatttgtagaccattaaaatttattaagatttttgaattcaaattttttattaattttattaacggttgcgtgatgataattgacatgctcgaacataagttagtacttgttaaagttcacaaatatgatttaatatatgaacaatcactactatgatgagcatccgttaatgaaattgaaagtaaattcttaaatctgaaaatatgtgattgatagttgatactatacattcatgtattttaaaaatagtgtaagcactgttgttctataataaatttacattttattttacgatttagaaaattaaaactactaaaattggtattatttatgtgtgaatacaaattaactaaaaaatacatttaagtatgaaattaataatttttttttatataataaaaaattagtacatgttactagctctactaaatactaatttgctaataagctacaatcagataattttattttttgttttggttatagaatttcaaattttaagtacaactgaaatgtaaatattataggtgactacaataagaattaagggtattcacatctaatagatttagacccaactgatccaatcaaattatttattggatattgaattttgtcatctgatccaatcgaattgagttatccgatccgatctaatagatgtattaaattggatcggtttcaaccattggatgcattgattggttttctattggattggattgaatccatccaatctattttagctaccatttaagttgatttcattaaaaaaaaaatatatatatatataattcaaaaactaataatccaatatacataataaacaatttaattctcatgatctcgtaataaaactgtcaaaaaataaaacttattcaatacgcatcgataattttattagcgtttaggaatatgagaattaatattttagataagttttttttttctttaatctcatgtgttaaatgtatattaatcaattatatatatattttttaaataaaatatattacatatataaaattataaatgtattttaaaaatatacaaatataattgaatgaccgttaaatgataattggattggtttggtcggttattcattggatcggatgtcctatccaataaccgatttaatccaattggattttcaaaatttacatctgatccgatccaattataattagatatccgattttattggattggtcagttgtaattggattgaatgactttctgcacatccctaacaagaaccatctaaaaatgaacttttgaaagaaagaaaaagaaagagactaagaaaatacttttataataattaaaatagacgaagttgatattaaataaatagacagttaattgactcaatacttagttgattatatatcaaaagcgccctaatatctcaggtgcattagagaaatattgaaagatactagtagtgtttagtatctttttatgtatcaatattactattggtactactaaatatcggatcccatataatttaatgtaataacgtttatggagtatcactagtcaaccacaaagtgacatgtctataagagctaagcaccactagtggccagtacattaaaagagttggagctagtgttaggtgtagttaaagatgatttgggctagctacgcctcgtacttggcggcttagcccccaacatatccttttttttttgggccaatatatatgatgtcttgaatccaactttgagtttatgtcaccactaggaccggtcttaaggtatatgggatttaaggcaaaattaaattttggggtccttatatatagttggctaattaggatttttgctccctgaactttgannnnnnnnnaatcatgctccctaaacttttaaggtcgttaaaaatgccccttaactattgagattgttaaatttaaggactttttttcaattttattacagatcgcgtgatgtgaacggaaattcaagaatacaattttggttcttgttaaaattcaccaaaataatttagtatatgaataatctcttgattagtgtccactataaaattaaaacaaaaatttttaaatggaacaatgtaattaatatatatacatgtatgtattttaaaaatagtgtaatcgagtgctgtgatataataaattcacattttgttctacaactcaaaaaagtagaactgttattattcacgtgaatgcatattaattcaaaaattagtaaattgttataaaataatataaannnnnnnnnnnnnnatgagaagaaagaagaagaagagagaaagagaaactaagaaactaagaaaaagggaaactaagaaaaagagaaatgttgattacaattaatggtaataaataaaagatttgaacatctacataattattaatatttataacataagatatatttttcttttgaaaaagaattaataaataatattagctatactaaatagcaattcgctaataagctaaactagaaatgaaaaatattctttgttttgaagtaaatatcatcataggtgacaaataaccatccaaatatgaacttgtaaaaaagagactactagaaagtgcttttatctattactataataaaagtggcaatattttagtccttaaccaattaaattactaaaagctccttatattttcaccatatgcattgacacattaggtaaagcatttggtt

SEQ ID NO: 115339 - DNA, 1976 bp, Cannabis sativa
tcaattttactattttagtgattatttatgtactaaaccatgttctccaaactttgatattaatcaaatcatgcccctcgaatttttacatgtactaaatcatgccctttgaactttcatccatattaaactttttttactaaaattgaacaaaagtccttaatccaacaatctcaatagtttaaagagcatttttaacgaccttaaaagttcaagagcatgatttggtacatgtcaaaattcgaaggataaaaattctaattagcctacgagaattgacaaagtgagcaactgaaattgactacaattttcaagggtgtagaactcaataatgactaaaattgccactaattctttggggggtgtaatgaccatttaatattttggctgaacaagtcaaacaagaggtatcagcagattgaattatagcttgtttcttcttcttctttgacataaaattaaaacttgtataacacaagacaataaagattgctaataatttgatattaattgtacacttgtatgtagggaaggaaagcttgatttgggcttggtgaaaaaataaacaactcaaaccacaaaatttgtgttggtggctttggtttgatgccattgcttaatttcattgtgttttttctaatagcattgttatatggcgttaaagtgcttagtacttttttgacatacatcatataatcagttaatagttttttataacttttattaaattaaaataagtggtacccaatattgaattgcattaataatgatattacactttataaaaatattaggcaccataatttccctataacatttctctaaacccccaacccaagttaataatgataagtattccataatattaagtttcaaaagtttagaaactaaaaatcacacaagttagaaagtaaaaatctgccaccacatgtaactaaaaaaaaaaaagacttattatgtattatgtaaaaatggattgcatcattattttgaacagaacattttttctattttatatataattggaaataatattgcatggtattgacattgaggtaatttgtgcaagaccttatcctaaatatcatttaaaaaaaaaaaaaaaaaactctttcttagaacaaccacaaaaaataggaagagcaagataggcttcatagcattcattggccactcatttcaggctgcaagaaaagttttcattataatataatcaaatgtgttgggacttgagaaagaaagacatgacttatcaatttttttttaattattatttttcatgtactgaagtattatatttcaacatatctttcataaacaacaatattggttcacctactatagtttttattttagccatccaaagattgaatttttatagccattgatgggttttttgtgcttgcggactctgtagatagccataaaaaatagagtaacttttggttaaattgaatgaaaatataagaatataaataaaaatgaaaagaaataaaatttaaaatatataaaaaaaaatattaaattttttgttaccatgcaatgaaatgatattttctttaatttcaaaacggaattgtcattttactaatggtagaaagattattctattaatattcaactaaataaatgaatgaaataaaaattatttcctttctattccattccattttattatctccaaccaaacaccacttaaaataggtttttcatccgataatttggtgattcattttttcttgagaaaacttaaaaaatgaaaaaaaaaatgatatctttgatagaatggaagtccatgatcaaatataatgtatgatatatttttgaaaattcatactattacatgtatgatatatcaaatctaaaattatataatactatatgttcaatctctctctatattactctgtgaaaacaaaagatagatcaaatctgaatgatatctcagatcctcttttggattggactgaaaactc

SEQ ID NO: 115340 - DNA, 3661 bp, Cannabis sativa
caaaaagctgttttttgactgtttgccaaacacaattttatcacagctttttcaaaaagaaacttttagcttttccaaaagctgtgccaaacgggtcctagtaagacaataaattataaaaaaatatataatttagaaaatttgaacaattatcaactaattgagaaaatgagtaataaagttcttgtttatataaataaaaagaagattggatgaataaatgaagaaatatttagttctcttattcaatacaaaaatgggttttttcttataattaatattaatagttttttgtagagggtgttgggaaacatattcaataaataaatcattaatgggtattaatgcctcttttaattggttgccaataatagtgtatttttttgaaaaaaaaaagtttgtatatattgtttattaaaagtaaataagtaataatataagaattatgtatatatattactatttttttaaggcactattattattattttacaaattagatttctcaaaacattgatattctgtttggaatgtactctataaaaaattattaaaaaacatagtaatgataataaatactctataattttttattttttcttttaaaaaatcatattgcattatttttcaacacaagcaattcttatttcttaaccatactaaccattgtttttatggttctgaccttatttattcaaatatcaactgtccaacttgttcatttaaataacttattaattaattccaacatttgttcacctctataaattttgaagaacaacccaaacaagaaacaacgataataataattaccccaaaaacttaaaaaaaaaaaacattaattctaataataaactttcatgtttcatggtacctaataactagttttttagctcaatctttaacttcatactttattgcttaacggttctataatacatttctctttataattgtatcacaaggaattcttattttggatattccattcctcaaaattagaacattccttttttattattattattatgttagttgaaagcataacttttaatgaaaaaaagatgtaagagatcatagtgctaaaaacataacttttaatgggaaaaagatgtaagagatcatactattattatatttaagattaaaattaatagaattttatgtagtagaccagaatcattcaggtagattttttatttgtttcatatttaaaaaaaaaaaatatacgttgtagctatttaagatcacttgataaattttcagagaattttaaataagttacaatgccgaaaataaagttcaaatagttacttacatgcgtataagaaaaatagatttttttttttgagaaaataagaaaaataattgtgcgtgtaacaaactatataaattactcagaattttttaaaaatttacaagtgatcctaaatggttacaacatatgcgatcatgaaaaaaaaaatagattaaaaaattcttctaaatgtcaaaatagattggagatcaaaatactcatttagagagtgcagtagactcacccaaaattaattatgtacttcttaattaaatgtatttttttatatataaaaaaagatgtatattattttggtcccccaattttcaacaattataaccaacattatctgttttgtaaattggggaaaaaatagtaccattaactcaaatttagttaacaataataataacaaaaagtaaattatctaaatttttgtaaatcttataaaattattataattattgagactctaaaaacctcaatatttagtagttcatatttattggtataactaatttttttaggctactaaatctatctcatgtttatataagtgaattagatttatataaatatggcaatatatatttatggatatatgtttgttattatttaaaatattaattaaagacatactaaattgagaaaatgccaactatattgtaatcaagattttattgcaggcgaaaaattctacaaacatatctgaaaaatgcacattttgctctttaatattgctataccaactttagtggttctttatctttaatacattttcagaaataaaaattgaaatatatattcaataattaaaccaataaatgaatattaaattatttcaaaaaataaataaatgaatattaaataatacccaccaccaccactatgttgtgaatgtgattgcttgtcaagttggagaaaatattgaagaaaaaaaattaataatttaatactattattattattttttttttaaaaaataatttattttgaaatataaagtcaaaagtcacaattcataaagacacaaacctcacttcacgttaaccttttaaagcctatttgttttaatcaattaaggcattggtttttataatttaaattagatagatataaataaagaaaatcatggttattattttttaatttcttgggagggggggacttatataatgattggattttcataaatgatttagttatttttatttgacatttttaaaagtcaatgcataaaaaattacaaatgtgattggtcaaagagaaaatccaaaaccaactctttaaattggcctattttatttttaattattattgttcctataattatacatgtttttcatgaagtcaaaacaagacacaataaaaactagagtttcattatctaaattttttataccaattataaataattggtaaaatttattaattataaacttaattaaataataaatcaagtgccttacaaataagcttgaaatattaaccattatcatttgtctcatattaaatgagtacatttcatatttttgatttgtcttacgttagctatattattaagggcattactattctttgtaatagctttaatttttttctctttttttattgtcttagagttgctaacagtgttgctcactttttagcaaaactattattcttttggcgattactaccctgattgtattagtatctctattaatgatatttttggcactatttcctctctctctcgatcttggtagggtggagatcctgataggcaaaagttacactagtgtatatagtctaggttatgcttgcataataagtatgggtattcattaaatcacattcaatatttttaggtgtattcatatctgatccaattatatattagatgttagattttactattcgatctgatcaaattaatttcagtcatccaatcaatccaacatctataagattttaaattggatcggttatgtccattaaatgtatttaaatggataattacataagacattatttttattaaaaaaaattatatttttacatttaaagaattttgttcatatttttacgagttttcataaaaacaacacgaacaacaagaaaattacataaaagtaacatggaaatgacatctaaataatatcaaaacaataacaaaaaataacatacatataataaaaaaatccaacaaattaacaagagtaaaacataaaaagaccgtattttctgtaaacaaaataaaaaaaatcgtaaaaatatttaaaattctatgaaaccgtatttttgtaatatttttggtgtatttgtgtatttgtgtatttgtgaaataatccatattttaaatatatttattggtttaatttg

SEQ ID NO: 115341 - DNA, 3167 bp, Cannabis sativa
  modified_base (37)..(39): a, c, t, g, unknown or other
gatgttaatgaaacatacatgatagtaaatctagatnnnggtaaaatatttccaacaatagcgagatttaaataataactattaataggtaagattggcaagacaacaagtccatctcagaataagtagaatacacaatcaaagttgttcagaacgagtaaacaaagagcttgctacttattgatccacatactcatgagtgtgttcaaggaatgataacatcatttgttcacctcgcattttaagcgttgaagtaaccgcctcgctaatacctttcaaacgacaaaagagaaccgcgagaagcattatatctctacacttacatttttcatacaaagatggtaaagaaagataacatgtactcgacaagaaccatccgatacaatcagcataaccatctatggataaagacaaagagtggttgaatggttatttaatattatctcatatgcataaaaatgaaacgtggggaatgttcacatttcatgagcgattatgaatgagtagatcccaaacaaataactgtcaccccgtgcatttataaatatggacaaaactcagggtaaaatggacagccaatctagagaaaaaaaaaagagattattattactgatatcattattttttgcattcaaatcccaaataagatggactcatggactatgaagatttaacttcaaaattacgttaaaaacttcatgttatcaatttattgggataatcaattctgtagttaatttattacaaaatggctaatatttttagttaacgaaaatatgcattaacacctcatatttcattgcacaaacaaagttttctctgagtatactttcagtctccgttgaaatttttgtgaatgttttatgtgcttcatttctatttttccatacctatttttgtacaaaattttgaagactctcaatcattgtagtaatgggcagtcttcttgttgttagtattgttgaatttattgactcaactatattagaggtcatcgtggtgcacctttttgttgggtagtgatatctactccaatgtcagtgacctattctttctagataaggtcttattcgtttgtctatcgtgtctagttcagacatgtaatgctcaaataattttagattgtatatttttgcaattttaacaaagttaatagtaaggtcttcttcatgtacttcaaagttaacattgatgtttttgagcaaatgaatatgcatgcaccatgaaaaatatttgggtagacttatgctactgctctttttgtatttttatgtcagtttgaaatgattgttatatctatgtgtgaaaagttgaaatatttttttgttagttgtgttgtaactggtttcacaaattattttaaatataagaaagcaaattctttataatgttagttataattcaacaataaattttaaacgtgtaaatagagtaatcaattcagagttttgttggagccagtttctaaatttctttttcttcgaatgtttctcttagtttaatgaaaatctattccattgattaatcattttttgagtctcttatttcaaaggctaacatgaatatgttacttttggcatcaatcgttgaggttgtaaataatgttcctctgtatgttgtcttcaagaatgtgttgtcaacgacaatggctggtctgcaatgttgccatccctttattaaatttgtaaatgctaggaatatgtacttgaaccaatttttttttgtatgtaacaaattttgttactgttcttagatttgccacttttagcatgtgaaagtattttggtagttgttggtatgagtcttttgaactgcctcttgacaactctaaagatttttcttgctctccaagcctttgataccccattgagacactaaattcttgtcgcaagtccttcataatgtaattttttgcatgtttcacctatattaagttgtacttttttattactatttttgaagtaatattgaaactttcttgcctatgatcttccattattacattcaatgagtattgtgctcattgacatattttatgaccttgaaaatttgtatttgtttcagttttgaatagtacacaagaaccagttacaattatcatctacacaagtaactatatattttcttagttttgatcttttagttttgatttggaagttgtggaccatagcataaaaacttattgcagttttcagaacgttcttatcattatatatttgtcattcaatgttgaatactgtatgatctgatatgtgataatttccatttcttcatcccttttttttacttcattttttttctttataataaaaccagcaacatcttcagctatttagaacatgtttggagagctttgtacctaattgtagtcattagaattttctccttcatattctaattgtttgttgaatgcttggttgtatagttgtagaaccagttcttcaatatttttgttttgtatttctcttggttgtagaaaggattttctatggtttgaatagttatttcttttattgttgtgatggaaaggagagacttagttactgttgtttgagtctttttctgagctcaatgtagaatatgagagaattgtcacttagcaactttattagttttaatcctggcgatatctggtagtatattttaatgttgttttcgttgtattttatctcgattttatcaagtcaatctgattgtttaggtgaagaattggttggaattaatattttagttattgtgtagtcctcgtaattgttaattgtccctcatacttaatcacacatatgatagtttttttcttacattttacatgaaaggtaaggttattgtaacttgattactagaacttttttttgttatggttgttatagttagaaccggtttgtgattagtagtttttactttcttaattaggaatattttttttattaattctttactatatatgctaggtgtttagtaattgtgtatattttttaaccggttaagtattattatatataggaatccatatttaatttgacactatttaaatgaatgtggttagttttatttgtagcaattgttaaattaacatatttattttgtatgtattctgaataatgaaatatatttattctatataaagtgtgcctatataacagaattctttgtttttgagaaattca

SEQ ID NO: 115342 - DNA, 4039 bp, Cannabis sativa
  modified_base (3966)..(3982): a, c, t, g, unknown or other
gtttatgatatcttatccaatatcaatatcgatccagttcgatgtatactccatacatctgatattagtatactttaccaatgccttagaaagaacataccgcatttcattgtgtaagtaaactttatcgctgattatcacgtcagagtaaatctagtatactaataaatcatgggacttagaactttaaacatataatcatgattattttccactgtgtagacaacactataatcataaataactatatgttcaagatttaatagaatatatacattaaacatataatcatgaaagtaatcatgtgaatcatgcaacataaaatgatttctggtcttttattaattagcacatctgattatattgaaataagttttatttagggtataaaattccaataatggtctactattttgactggcagagaacctagaaaaatgacttgtcgtctttacataaatgacctagcatttttcaggcagttctctcgtgttttctcgatatttaggactttagcatactatttatcgataagaaaactcttagttttaagtttaggtccctaaaaaggttttagaatattttttttatccattttaagtgattgtgatatagggccttcgttcagcgtataattttctatgcaagttcaccggcacacttgaattcggaaacgaggtaagattagcatagaatatatatttatgtatatgtgtatgtgtattattgcatgctgtttatatgattcatatgttaccaacactagtacggtagtgacactgagtgcattagtatagtatatgaagttcaaatggtacgattcggtgttacctacactagtacggttaagtacgtagtgtatgtggtacaacactcagtagtactcagggtacgattcaaccttaccaacactagtacagtagcggtacttagtgcatgcattacaaatcaggttgtacttctattaagaacattcttaatcatctgttaagccttgtgaatagatgtatgggtgcctaaatacaagtcgataatgtattatgtgttgtatgcttttcttactgagtctgttgactcacagatattgtttgcatatctaggtgaaggaaaggctaaggcttagcagcagtgagtctagagctcggagataattatacatgtcaagatggttcgacctgaagaattcagtctcgggacaacttcggctttattttgtagtcgctgggcgatatttttgtaaagtggattttgaatacgaacatatctttttaaaagcgggaatccgactttgtgtatgaatataagtatatagttataaaagtttaagtttaaataagaagtataaattcaacacgttttttgagaaacattttgattagtaaaggtgagtacagtaactaagtcagtgtagcgtgcctaaacagtagggcattacatatgactcaaagccgttaaatctggtgttatattcttttctctcttactgaattcattacttgaatcttgaaatctcttggtatattattttttttgattgtgttgcgtatttgttggtaatgtaaactgaattgtaaattattgattgttctattttgcacaacaaattgtttaaaaagaaaaatagagtgatattttttttaaatgtgtagattgggtaaaaaaaaataatggaaatatttttttaaatatgtacaatgagtttgaatttaaattggaatgttaaaaaaaatattttatattatataacaacatttaatataaaatacacgatataagagagatatgtgtaatgagtttaaatttaaattatatattatctcaacctttcttttctttgttatataaccacaattaatatcacatagacatatataaacgaaataaaatggtaatagtcattaaataattaataaaagtatcatactaatttgtagaaaatattacacaataatttctagtgtttataatgtacacttataaggcaacatttcattaagtactttttggacgttgtgtggtttgttgttatcttctatatcatagcttacgtagtctttttcttctttttcttctatctcttgctcttccatcatgtctagtgaaaaatagtcaacttttccatcataaatcttgaacaaaaccaagtatagagaaatcccaaatatggccattccaatcacaagccagctgaattgaagattaacaattgatttagctcggtgaagtgactcttctcctgagcacctaaccactttctgacctgtgatttcatctacactcaaaaaacagtccttggccaacaaagaaggtgtccacaacatcacacccatgaaaatgtcccaaattcctacgaaaaccacaacgagcgaccgcacaaaactgatgagaaaactctttctaaacccgattcccaagagtgctgttgcgagagctacaaggagtagcacctgcaaaagaaggtggtattggccttccggtcccatgtggtctgcggtgtgaaagtgcaaaccaccaaaggattgtgcataagttagggcggtgaggaatagggttagctcatagcgaactggagatttaaggcaatcgagtatgatggcaaacatcgcgtagatgaagaaggtgaagaagatggaactgtgctccatgtacgcaaggtgggggtatggaagtgttccgtcgttagggtttagaatttggtggttgtgagggcgaagataaagctcttcgaatagcgagatggagcaaaaaaccatggtggagatgagttctaggtattttgatttggaggtgggaaaccatgggagtgcaatgtaggattttgggtgaagagcatggagttttatgtgattgtagagatgccataagccaatcatgaggaaaaaaaggcctgatactacatgagacaataaatttcccatattctcaaataaagagggaaaactatataattttgtgtacaaattttttgtagttctaatttgtgtaaataagatcaagacctttaataagggagaagtagtgcaaagtgaaatagggacttaattaagttacacatctgtctctatgttgtaatttctttaattagtttgctatatgcatgagtcatgtacgttatattagagatttccaaatcttttttttctttttcttttttataatgatcgattaattaaaatgattttttatgttgttctcacaaaaattataattaatttttcatccaaatgatttgttttttcttaatacttgggaccacatatatataatttctgagttctttgttttaagaggaaaataaattaagttttatgttacaataattaaaaacagttctcacaattttttttgttattttttcatctctccgtaattttaaagggttgttataatttaataacaatattaatccttttattttctttgaaaaaaaaacctatattatgttttaaattcttaaatttcttccttataattttaatgctgattatacacatgtatataaaacttgaataaaataatgtatatgcttatgctttatttattcaataaaagtttattagacattatagtgtagatataaaatttattaatcattacctcaaaacataattagtataaattttatgaaaaataaattaagctcatagaaacagaagctttctaatttgaatttatatacatatatatatatatatatatattgttatttatcaaatctaattttcgtcatgtacaaatttatttaatatatatactaattaaattccatcaacttattataatcattttatggactttccaaccatgaatttgaatagttatgattgtccaaaaatagaagaactaactgatcatcacttcataaaggctcaaagtaagcaataaaaaattatgctgtgatttcaataaatgcaataacttgtattttttattgtttaaacattttagggctcgtttggaacgccnnnnnnnnnnnnnnnnnattgtattgtattatattgaattgcattttatgcaatatttttatgtaaaactatat

SEQ ID NO: 115343 - DNA, 1322 bp, Cannabis sativa
acttttctttgaacattcttattctttaatctgttgagtactcttggtcggcatatttgcttgttgatatatatatatttaaactttttttttttttaaaaaataaaagtgtaataatttagaccaactaaagattgtcatgtagaaatttacttaacatttaacagccaagtacttataacttaggtattattaccgtcaaaaattaaactaatgtatttatttataattgggagttaaacatatgtaattataccacacattattactcttgttattattagaataattaggatttatcctctcaaactatgacccttgcacagtcttgtcacctgaacttttttttgttataaatatttcctctaaattataaaaaccgttccaaatatcttcgcacagttgcattctgcttatttattaaaataatttgttgatatatagcattaacataatgttaatctaacacaattcaagagttgaaacaaaatataaatacatagattgcaatctaataataaattatgagattgtatatgtatttttagagctactatttgtatcactacaacattcaggattaataggggcggaatagtctgcccgtaataagaagaaaagtcacccctattgatattactaatggggtccgctgctattggccccagtaatatctcatcactaataatgtcttttaccagcggattaataatgacgggacccgtcactaatccttttgtcagataagaatctgagccaacataaccggcagaccccatgccaattaattcacccgtaataacattaagccaaaaaattagataatttaattaagtaaaataaaaaatacaattaaataaataaaattaaaatacaattaaataaataaataaaattaaataaacataattaaaattcatacataattaattattcacacataattaaggaattatccagtacatttaaatgttcacaacataattcaaaacctaaattaattattattgtcttcatcaaatacatcatccaaataatctaacccaagttgcaagtctaatggggttgtttgagcattcttctcagcttgcagtaatggatgtgaagggtaatatggtagttgtgaagttaatgactcaatagattgtcgagtttattgttgttgtgggcgagtgggatggtgttgttgaaggagagttggagatttttgttgttgaaacgaaccaggaaaaggttgttgattttgtggactcaaaaactgactcgaaaaaggcttctgcggtgaaccctcaaactgaccatactgttggaatttattttac

SEQ ID NO: 115344 - DNA, 2942 bp, Cannabis sativa
tatatatatttaataaaaataataaaaaaaaaacctgaataagattaagagaggtagattcgcctccgtagtaatcattcctatccatgtggaggacctatttcacaaagcaggaacatcaatacaaacgcaattagaagttggcaaacaacaatatcatatgtgagaaaatataatctactgctgattaaaatacttcagttcgagtctttattttatatcagttttaagttataacagaccaacagcagggccatttgcagtctaacgaaatcggccatggtttcatacttgtttgcttaacgaaatcgcctaatctctaaaacccatcttagtataatgacattttcattatagtagtaaagcagataaaaggtagaatttggctaagtgaattttattgtaagatcaagtcatgaatgtaaaggagtatccagatcggtataattgacctcaaaaaagcaaattgagtagtcgaatcaaatcgagcaacaaaatcagtccatggatccgtcaatcgcaaaatgaatagaagcctaatatgaatttaaaagtaataaagaagaagaagaataagaagaagtgaaaccttgaggccgtcaacggagagaagaccgctgaggatgcactccttgagacccgtgcctaagacgatgacgtcatattcttcatccatgggttcggatgggatcgcaggtagagtgtgtttttagggttttgatattcgtgtttcgtctattgactgtcttcttctgttatatcatatgcaacatatataagtggggtggtgatgatgaagatgattatgccattgcctcgccgagttgttatttttattttattttatttttttaaaaaaaaataataagttattaaaccaaaaaactaaaaaaataagaaaataaatatgctatgcgatgccttgcctatcttcccttccaagaaaacgttgatgctctcctctcccctctacttatactaatactacttaaaagtgattccaagacacctatattagatatttttttattttatttaaaagtgatacaattaataattgaaaaaaaaaatattattagttattaggtgaaattattattatgtatatctaaatagtataatttataattttgacgattaaagtaaatactgggacattgttggtcccaatattatgcaacttgtcactgaattctttgagaccgaaagcttaccacctggcctgaataatacacatctagttttaattccaaaaaagaagcagttctctactatgggtgatttgcgtcccatcgctctctacaatgttgcttataaaattctctcaaaggttcttgctaatagaatgagagacttgattgatcctgttatctcacctacccaaagtgcttttattcctggtaagcttatatctgataatattatggttgcttttgaaattatgcactacctcaaacggaagactaaggggaagaagaggttcatgactatgaagctcgacatgaacaaggcatatgatcgtgtggagtagaattatctacgtgcagttatgcaccggatggagtttgctggtaaatggattaatcttgttatgaaatgtgttacctttgtacgctattccaatatacataatagtcatattatggggccggttaccccatcacgaggaattcgtcaaggtgacccactatcaacttatatgtttatcatttgtgctgaaggcttctcttctctgatcagaaagtttgaagatgaccaaattatatgtggctgtcgtgtggctaatggagctccctctattacacatatgctttttgctgatgatagttatcttttttgccaagcatctaccgtcgcggctgtcagtgtgaaacaactccttcactcttttgaaattgcctctgggcaaaaggtgaatgctacaaagtcttccatatttttcagccccaataccgaagtaacccaacgacatcaaatttgtacaactctgggcatgcctgaagctactgatggctctctttatctaggcctgcctaacataattgttaggaaaaaaactgtcattcttggctttctcgtaaacaaagttatcaaccggatcaacagctggagtggcagatttctttcccgtgctggtaaagaaattctcctaaaaattgttctccagtccctaccaacttatgtgatgagtgtttttcttattcctctcgaaacttgtcaagaaatagagaagattatggctaatttctggtggaaaacatcgagtgccaaaagggaatggtattatttggatgtcttgagattgcatggctacacacaaagattcaggtggtatgggatttcgtcatcttcatgacttcaatcttgcgatattggctaaacaaggatgacggttgttatgcgctccaacctctcttgcaagccgtttgtacaaggctaagtattactccaacactgactttctcaatgcggagttaggcaacaatcctagctttgtatggagaagcatctggagtgcccaaaatcttgtcaaacttggtattagaagaactatcagttcaggaaggacaaccaccatattgaagcatccatggcatcctgaccctgataacccgtatgtcacttcttctaagcatggccttgctaaccaaatgatcaattctctctttgaaacgcattgtaatgcctgggatatctctcttgtcaaggatatgttcaaacaacgcgatgcagagttgatcattggcatccccttaagctcttcatttgtcgaagactgctggtcttggactggcgaaagatctggtgagttctctgttaaaagtgcttatgatatgttgcagaatcaaaaacatggtcgtcacggtgcaaataattcagggttctggcataagctatggcatcttaaaataccacccaaggtgaagaatttcatgtggaga

SEQ ID NO: 115345 - DNA, 2261 bp, Cannabis sativa
  modified_base (1990)..(1993): a, c, t, g, unknown or other
  modified_base (2203)..(2228): a, c, t, g, unknown or other
tttttttttttttttttacgttgaagagatgtgatggctggtgagtagcacgaaataccaagttccatgaatcgagctgaatgtttgtcaggctttgcctttttccctttttatttatttcatacaccaattcccaaccaaccaaaattactttccccttttttcaaattcaaaatatataatattaaaaataagtttttttaaaaaaaaaaccaaacttggtttcttattttcagaccacttcccattcttcatctttttttttttatacaaacatacaaaattagttatgcttattggtcatatattttgtaagttgaaagagtaataaattttgttggtgatttttttgtttaccttttaaaaaaccatttcatacaattatataatgattgtagttgattgatttgattgattcttgtaaataaatctataacataaaattctgaactcttcttctaaagacttagtcttgtcaaaataataaaaaaaagacatgattagattctattctgaacaatttgatgagtgactatgttatgtcttttctcttctcttgattaatgacctgaaatttaaattgttattctttgtctctttttcttgttttttgctttatataaattattttattgttgtgggactttgtaattgtatttgtaataagatgaaacattacaagcattacaactaataataattatggtttctagtcttcaaatataaagtttctatgtccattatactatgtcccccatttcattgtttttattatttatagatatttatgtttctcaaatttaaatatagggaaggaaaaaaatactgtgtataaacataaattaaatattaaattgggaatctataatggccaaatgaacaaaatgactcactatctctacttgaaaattaaatgctatactaaacatggcttattatgaaattacttcaccacattatttaaaaagttgtgtgcttttttttaaaaaaaaaaatatttgaaagagaagctaaggaagatgaaaataggatttttttttttttttttaaaaaaaagtacagctaaaaaatgagccaagatatatagacttaagtgaaaaaaaattatctcatatactatttttttttttaaatttacagtttgggttgctccagtgtaaaataaaataatctcaaaatattgaaataatttagaagaaaaataccaattttttgtagaattaagagaaaccctaaaaatagtagaacacaaaatgaactacctaattttagaagaagaattagtagaaccctaagatctattatattttcccagcactacaattaactcattttaagtgtttcgagaagaacaagaagaacaaatcatattcattttagcaaaaacaaatcatctaaccgattcactaacatttccataaccagaagtccaaagccaattcaaatggaataactgaaaaaaaatctagggagaaaaaaaatcaaacattcaacacaaaaaaaaagtgacacaaaggtgtttttattttgatgaagagaaagggttaccaattcaaatgcagagaaatgagagtgagagagggttaggaaaaagagaaagagattataatattttgtttgtcctaataaccgtcaaattaaagtgtcaatcatcattacatattaatctcttttttattattatttgaatttttggcggctaaatactcttaattattgtttaacttgcacttaattttttaagctcaaattttggttgtaaaatcttccaaactactaaactgtttgtaaatttacggtgtcatccggttaattgccaccatagactgcttatttgtatactcttgtacacatgacacgtttatattggtacacttaataatttttttcataagtcattttaaaattaaataaaattataaaaaaaaataaaaatcaaatatttaaaaaatacaaaatattataaatttttttataatttttaaataannnnattaggtgtaccaatataaacgtaccacgtgtataagagtgtacacataagtagtccatgttggcagttaattataaaaaatagataacaccttaaatttgctaacagttcagtagtttagagagttttactaccaaaatttgagcttgaagggttaaatgaaagtggtagcattctttaaaagtgctatatacagtagaacctctattnnnnnnnnnnnnnnnnnnnnnnnnnntctaatttgttataaaaaaatcaagtcccgatt

SEQ ID NO: 115346 - DNA, 3518 bp, Cannabis sativa
ttataattgtacacgagtaatcgtatcataaaagtatacactttatactataataactatataatttaaaattaatggttaatatttttttcctattaataggaaatttatgttaactcctacagtaatcttgttacatatatacatataaaatagggaaattatttcatatactattttttttaactttttttcaaatttataatttgggtttctaaaatagttgcagcgctagttgcaataatagttttaatatacaatttcataaaaatataaaaaaaaattattttgaaatgtaaaaataaaaaaacccctttataaacacgtagtaatttaattagctatgtttggtcttatttatttataaacaaaatgtaaattaataatattatcaattgggatatatgcggtcgacatatgtttggcacgtggaatggggcttattctatttgaactagtgaattcacagtataaggtaatttgcggtcaaattttttgaattttgatgtttggcacgacttcttaaattgaaaaatttgcggtcaataattttgctttgtacttctgtccatttggtttgttaagtactaaatggactgccacacggtgtacatttctgtacacgtggtaaattttgattggtccatctaatattgatgatataaatattaaaaaaattatacttttaataaaaataaaatttgtgactaaaaataaaagttgtgcgactaattataataaaaattattattcttacattatgacttaaagttttgtggctaaaaatattagttacaaaaattaattataatttgttgtgacttaaagtatgttagtcgttataatatttattgtaactaaaactaaattattgataatatatctaaatactatattttaatataaataattttttgttgtgactaaagaattgtaaatttttgtttgtagtgatttatatatatacacgacttacatataccaattcgtgttatttattcttcgttattatttaataatgtttccaatttcattttaaagaaaaaaataccaatctgcatggttagtacttagttgggagtgtgtgttaattatattatatattttccgagtcaatttataataatgtatagttgtttttgacaaaataaaattaatatacaattttatttattagaagaaaatggaaaaaggtggtgacacttacctttaaactcttaaaggtattacggataatataaagtgaaaagaatctggtttcaaaaaaataaaattaaaagaatcatacaaaagataataaattaagatttttgtttaaatataagacaagattatattactagaaacttcatttttggtgcctactacttttgtatatatatattcctatattaattgaaatagggtcttcaatatgtatatattttggttatatatattaaatattttgataggtcacacagtgcatttacttgtagtagttacgtatacaatacatgtttacggatagaaaaatgcaaaaaagcattcccggtataataatagttaatcaataatttcattgtagtcaaatgaataattatgagcttaattattagtggtgcttaacattttttagacatgtcactttacgattaattaacaatacttagttggaccaataataatattgacgcatacgtaggaaagaactatgcaacactaatgccctttaacatttctcaataattatacatgagtattgctattaggcaccagggatgcctagcgccttcttgacatgtcgcgttgtgattggctagcaatactccttaaaattataatattaaattatatgggacccgatacttaattggactaataccaatattaacgcacaagaaggtgctagacaccattagtttctttaacattttttattatacatgtatagctagacaaagtcaaagttaaaaatattgagtagtgtccatcatcttttgtataggtagtagtaggtgtattattataatttaatttacacgtacaggaaaggtagttattccagagagaggatcagcaagtttcaagtcggtgatcgcaaatcttgagtggcgagtgaggcttgacccttccatcaaacatggagatccacgctataatgcagctctctctatcatggcttccaagatctcctacgagaatcaacccttcatccaaaacgttcttactcacaattggaaggtatatatatatattgatcatatattaacacagaacaacaatacaacctaattaagagcaccttaaataaaagaggcctgcaatgttctattacagctcttcaagttaaactctatcattttgtgactttattttttttttggacatgcctctaattctaaacattacatcgacgttaattttctttacaatagagtcaattgtataaattttcaaattccaaaatgtttcattcctataatcctattgctccaaacatgatatagcatagctgccaaagaagcaaagcaaacttgtttccaaaatcttgggaattgtttagtttcataacttaaaaattatttttaattttaaaaattaataggggtcatatggctaaattttttaaaaactgaattttaaaaaactagaaaacaaaaaacattaaaatattattttctattttcaaaaataacttatttttgtctaatatattatattttacattttcgcccacatacccaagcccggacaccagaactcgaacccagacttggaaatcgacttagacccgaactgggaccctgaactggaccagactcgggtgctgtccaaaacctgaacccgaaccaagacccagacacgaaccacgagcccataccttagattcggacctcgacccagacccaaacccggacccgaatctagactcgaactaggaccacgacccaaacctgaaccctagacaaaaacccaaaccctatacccataccaagacctagacaaggactcaaaatcgaaccacggacctagccctgggtccggggcccagggtattagggtctggacgttctaggtccggttttgagtacggttctgggtcgggttcaggtatggattcgaggttcggagtctggggtttgggtctaggtctaggtcatggctctggcgttggggtctcagttcgagtccaggtttggacccgtgtctcggtgtggattggggttggggtttgaattcaagttcgggtctaggtctgggtttggggtagcataggttcatgtcatggctgtatcgactagaatattgattttttttagtaaaaaaaatctgaaaatatttttaataaacctcagccaagcaccattaaatttttaaaatgacaataaattattttttattctcacttttgaaaataaaattctaaaaaactgaaaacacagttaaacaacctcttgacctcttagacttagagatctaacaaattagactggaaattgagataggtttcatgttccactccaaccaaacacaaa

SEQ ID NO: 115347 - DNA, 3047 bp, Cannabis sativa
aaaaaaaaaaaaaaaagattgtccaattgttttttttttttgacccaactttttcatgtaaagagatatctattatctatatttaggagtaaaataaataaaaataaaaacaaacaagaataacacatgaaaaatacgtgctgtgattgggaaaataataaataaaaaagaaaagaaaattggaaaaatccagttggatacgtaggcattatatatatagctatctctatatggccttttattgcgttttgggtctgttttcttctctttctcacttccatggcttctcaatgagtcatgacccagcccgatccccactcggcttggccctcttccaggcaatcacttcaccgccgcaacaaccactccaattcacgccgccgcatactcagaacagctccctccactccgctcattccctggaacttccgccgcggttcttcttcttcgtcgccaccgcctaaagctgttcttcgtttctccgccagaaaactcgccgccagcctctggcatctccactttaaagaattctcttttggcgcatttactgataagtctctcttcactccaccaactcgtgatcgtcgttcttctggtcccctggtgtgtggatcaatctctgttcatttgtccaataatcgctatatattattgtttgataattaaattgcttcctatggatacgaatgtaaccccatagtgacgtaaaccttacttctcacctaattgatgattcaaaattttcaaatcatctgaatataaaattgaaaaaactcaattagtaaacccatttactgatggatcttaacattaaactttgatattctaacttgtcttttacatgttttgtgtaaaattttgtagcttgaatcttctttgccatattccaattgtgtgttgaagacaaaaaatggcagcaatggtcgttgctcaaaaacatcgagtggggtttactacattttaagcaaccaaaaaaatgatcacaaacagaaaaaaagtagtggtgtgtcaataatttcagccctgcaaacagaggtatctcaatgcagatcccgaattagggagcttgaggcaaagaagttgtccttaaagaagaaagttaaacagctcttgagtaagattcaagaagaaagaatcccttggcaaagaatagaacaccacaaaacttgtgctgtcattggagacttaatgagtgaattggcgaaggagaggaaaagccgccagaggatggaaattgtcaatgccaagttggtgaatcagctagccgaaatcaagctgtccgcggaccagttgattggggattatgaagaagagaggagaaacagagaacttgcggaagaagtttgtgataaacttgctgaaaggataggtgaagacaaagctgaagttgagaaattgaagatggaatatgttaaaggtcgcgaagatttggaagaagagaggaagatgttgcagttggcagatgtttggagagaagaacgagttcagatgaagctggttgatgcaaagcttgctcttggagaaaagtttgaggtgatgaactcactgatcttagaattcgagagtttcttgaggtcagcttgtggatccttaaatgagatggagttaagagaagcagaaaggatccttaaagtagcagtgagatcattgagcattcaagatcaattggaggaattctcatatgttcctcccaaatcaaatgatatatactctataatggaggaattgcaggaatgttatgccaatgaggaaaaagctggacactgcagtagtcctaatgagatcaatggttgtaacaagaaccttgttcaattgtatatgaattgcctcagcgactacaacagcgttatagatgaaggtaaaaccagatcttgtgcatccataagttgcacaaaggacaagtgctcttctcattcactagaaactttgaattcctcccttacaagagttaaccatagcagaattggaagtaatgaagatgcagtgaaattatgctctccaagttcagtatcaagaaagaaatcgaagcgaaattcatcatctattgcgaagactttgagatcagctcaaattcacaagagtgtctctggtgatgagggtgatagaagagtttcaaatgggacaatgccatgtgcgaaactgcggtcatccccaactaggggtgagccgaaaagaagagcacaatggatctcagcaaaattggtgaatccacacataactagagggatgaaggggcgcattgaatggccacaatcacaagcaatccaaaacaatgttgtgaagaccaaacttccacttactgaagcaacaattgaaagccaaaaatcacagttgcgccacattcttaaaccaaaagtttaggtgaattctgttctcatttgttttggttatgtgtaacaatttagccagtcatgattcatctcacaatttgtttttagggtattactacagagaaagccatcttcaattaaacacaaaactacacacacatctctctcactctctctccacagtctaaatatgtataatattatgtatgatttaagcttcataaaaagtaatatatctcatttgctatagtagtgctcaattattcaaaagaaggacaatttctgtgttttgttgagacataaacacatgttcatgagaaatatataattgtgtgcatgggattctgaatcatataataataaaaaagagctaaaaagatgtgaaaacaaattgtttcttttgtttgcatatgtggtggagtcccaccaacaaaccctcttgtctccattgtatgaggtactaagcatgacccatccgacacgcatacactatagtcgaagtgcctttttacaatgacatgatatcgttaaacaacattccttctcttcaaattggacatcattaaacattacttctcttcaaactcgacactgataaacattattaactatttatagcttttacatgattatatctagggctgaacattttgagcgggtttgacccgaacccgagcaacccacccgaacccgaactggtgaacccgcaaaaaaatt

SEQ ID NO: 115348 - DNA, 2252 bp, Cannabis sativa
aactttccctcctaaaccaactaacaaaactaacatttgaacttgtccaatccgagagtgccacatgtcctgaatattagacttatgtctaaaaataccacagggatatttctacattcctttttgttgtctcatgctttgcctcccctatccctaatttttttcttttgtgattgattatgttgatatttattgtccttaatttttattatgtaggagtgtaagaagctttttcttgtttacttatctgaaacagacagagaagttaaaacttcttgttgttccattacttgaactgtatgataatgttatggggaagtgatgatttcaaaggaaaagagttgtacaataaggctgagtttagaaaaaaattgatttctctaatccaactgatgcctgcagttccattactcaattcttcaagtgtaagtctcaaattttctttctttttttagcctgcatatgtagatattctacattcaatttctgtcaaattgaaatctcacttgtttcccacaccataagattcagaggtggtttcatttcatcccaatgaacacatgtacatacgtgaaggaatcttcttctgtcattttgttttttcttttggaagattagtcaactggttcaaagtcttgtcttttcaagatgaatttgtttctaggtatgtttacttcatttacaaacagtcttgtttgttgctaaaattttattggaagataacttttaaggagttaattttattaagaagaaaaggagaataagtatagggaaaagttgatatcttactcctactatactttaaatttgttttgtaaggcctagaaggaatgattactcatgaagacattattagagatagaagatcagattttgaaaactctctccgaagatgatacaaggagttttaccaattttgtaacctcaagaagaaagcggtaaatgcttctaataaattcacttgttcacttaaaaaataagggaaaagaaaaatttaactgcaaggttcctatagtgtcgatataggatattgaggatgaaaaagaggagagtgttgtgcaagatttgtgccaaagactcttccagggatttgttatcgcctagccacaatgactactatactttgtaggttagtctaatgtttatacttgctctagcaatttcttcttactaattttattgtatatatatatacagttgcaattgcttatgcttacctcttatttcgcatacttttgaaagctcagaactttaacattgaaaagacgatccaaatgtgggaaaaaaaaatgctaaaccagagagaaaagagtatggaataaacactattttagaggttagatagatgttaatattttacaactctataataatatgctagagtttatcggtgtagctgaaaagcaatgtagatttattatttctgacaccatttttagtttgtgagtcagaaataggtattggacaattactaaaaattgaagtatataatctaatataaaactaagcataggtgcattccattttaactaaccataattttctttaactcatttcatttttatgagtattctatctaacagattttgttagtaatgtcaaacacgtgtccatttcatttcattattgagaatggaaattgttgattaaattatatataatatcatatagttactatttttaagcactctctacctgatttgtgaggcagtagaggaagaccacagacatctcttctttgaatgtcttcttttgagcaggttcttaggcaagcttggtagcagttggtctcggtcttacaatgactggatcgtgttgattaaaggaatgaagaaaggaatcaaggctaagcttgttgcgatattattagcagttgcagtttactacatatggaacaataaaaatacttgtatttttaacaattacatttacagtttgagacatattgtaaatatgattaaaagagaaaaatattacagaacttgcagttttttgcaaaagaaaatgagtgatagtgagaggagatttttgttgagagttttctccttgtaagagttgttttagcattttggctttgtaggttatgattaataaagtcattctttcttgatcaattttttttctttttggcatatgtttctttaaatttaaaaaagggtgacatttttattgtaaccatatggttacatttttctttgacctgtaataccaggttactaataggtagacattcattttttagaattaattaa

SEQ ID NO: 115349 - DNA, 4644 bp, Cannabis sativa
  modified_base (26)..(26): a, c, t, g, unknown or other
  modified_base (229)..(233): a, c, t, g, unknown or other
  modified_base (4593)..(4619): a, c, t, g, unknown or other
ttgttcatattaaatcataaagaganatgtagatagagttacgtacgtggaaacactgttctgatttttaatatttcataatagttattagttgcaatacagttgcattacagttatttcatctgattgaaatattcgtttgatgtaacatttggccaatcacccaacaaccacccaaaaactttcgtttgatgcaaccttcggccaaccaccctgcaaccatcgtctnnnnnaaaccttcgtctaatgcaaccaccgcgcaaccacacagcaaccaccctgcaattatcgtcttattgtgtaagtgatagtgtaagaggtattttggtaattaaaatcacataaaatgtataaatattgtccacaccttatggaggtattttctgtaaataaagtgtcaatttatattttctatgcaataattcttataattatctataaagttttaaaaaaatactaaatagtttacataatcgaaaataagatgtaactgttttttctatatatgtgataattaattatttgaattttattttttgatattataaattatttaaatttatttaaaatttatatatagtcctaaataattataatatacaagatcataaaaaaaaaattaaaagactattcggcatatcaaaataaataaagaatctttctataattttacaactctacattaaaatacaatactaaaaattaatataaattacaatttttttttcaatataatacaatttttacatctttaaatacatattcccttccccttcaaaagaataaataaataaataaatacatcttccatcaaagatgttattaagtgtagatgaatatgtccataacaagagccaagccaagaaccttaaggcttattttagttattttaatgtagtgccgtttaaaaattcaataggagtagatgcagatagggccacatgttcacatttatattagggaaacaagttaccatgccatactgcttataggtgtaaatcggtcagtttggtcggattatagtatatttttaccaactcaataaatatgtcgggttgtacatatttaattgtaacccgtccaatgaaaaaataaaataagtttaactcgtccaataatttttgtcagtttggtcgggttaacccgtttaaaccgatctttatttattttttttttttattattgttaggtgttggtgttcaaataattaatttgaaaaaataaatgcatagtatatgcctttcaagattaaaagggttgtagtttaaattaatgttaaaaaataaatataaattgaataaatattaaagtattaaacaatatttttcaaaaaaattaaataaaaaattatactcatgtgtagtagctaaatttaacttcaatattcaagtataatcaaaattatcaattataaattttaaatttcaaattaaatactataaaatacaaactttaaatgtaaaatagtttaagtattaattataatttatatattctatatattatattatagataattttagcaaaaaatatgtaaatcggtttattcgggttatttgagcggtttagaatattatttaacacaaccaatatatttattaagcggtttgaattttccataaagttattcaaattatattttttatcagtttactcggaacatttctaaatttttgtaaacagccctaatagtgcctaatatattggcatgtggctctaatcttccccctctagccgtgtaagaatttatgttccattcccaagccgcctgacattatatgccctttccttacacgtatcaataactttctctctctctctctagtcagaagaagcttcaaagtttgtgtccttttaggaaggtaaagtcttttctatattaattatatacaagcttaacccaatccaactcaatcccacttggcttcacatctatgacttcttcaaactcgtagtcataagggtactactattacaactctgctttattatgtactgactttgaaactaacagaagaagagaaaaaacagagagtttgttaagtgtggagaaaggagaagagaactgtgttgttgtagtcttttccttggtcttttgattatcttatgagtaccatggagcgttatgagattgtgaaagatattgggtctgggaattttggtgtggcaaggctggtcagggataaggggacaagagagctttttgctgttaagttcattgagagaggccagaaggtcaactcctttatctattttactttttggttgggaaagtttgaattggttgtgtttatcattctgtgatttgagatttttactgtttcccatctgggatttagttcgtttaaggattttgtttatgggtatatttcagattgatgaacacgtacaaagagagatcatgaaccacaggtcattaaaacatcctaatattgttagattcaaagaggttagtcatcaattattctctcactgatattcctttatggtcattaagcattaccatatgaatctatgacacataattgtggtgcattttcattttcttttttaatatggtcattaagcattacaatgacttgagcttaaagtatctttagaatggcctacatcttaaaaattgggttttgtaatcaatttattttaggtacttttaactccaactcatctggccattgtgatggagtatgctgctggtggagagctctttgaaagaatatgcactgctggtagatttagtgaagatgaggtaatggaggaaatttctaactaaacttatgtttttacaccaaatgaaatcttaatgaatgtaagcacttaagcatctttttgttctattgaatcaggcaaggtttttctttcaacaactaatatcaggagtcagttactgtcattcaatggtaagaattttgtttgaactatccttttgtgatagatatacatacatatctctaaagaactgcattgattatcaactttgtcattgtctaattatttaatatatgacttctggcagcaaatatgtcatagagatcttaaacttgaaaatactctcctagatggcagcacagctcccagagtgaaaatatgtgattttggatactcaaaggtaactgaaatgatataaaaagattaagcatattagatttttaagttgattaattggtgaactttgttgtgtatatagtcatctgtgctgcattctcagccaaaatctactgttggtacaccagcttacattgcacctgaggtcctctctaaaaaggagtatgatggaaaggtactaactccattcttaattaatttaacctcattttcttcaaccatggcatttagtgagtgatatgatgttaaaaattatagattgcagatgtttggtcatgtggggtaaccttatatgtgatgttagtgggtgcttatccgtttgaggatccagaagacccaagaaactttacaaaaacaattggggtgagtgagtgattttgttaagagcacttctaccaatttttttttgtgagtttttataactaaagatttctgggatattatgacagcggatacttagtgttcattactcgattcctgattatgtcagaatctccctggaatgtaagcatcttctatctcgagtatttgtggccaatcctgaaaaggtaaggtacactaataaattgatgtaaatatattttgaactctatttttgttacttgctaagtctgtgtttttttaacagagaattactatcccagaaattaaaaaccatccatggtttctaagaaacttgcctatagaatttatggaaggagggagctaccagagcactgatgttaataacccatctcagagcattgaagaagtggtttctattatacatgaggcaagcaaagttgttgaggctcccaagcttggtgggggtttaatgggagggagtatggatcttgatgatctggatattgatgcagatgtagatatagatatagaaactagtggtgactttgtgtgccctttataaaatatataattaccatgtaaataaacacattgtcacaaacatacatgttcttctgttgtacaatgtacactttggctttggggaaactggaaaggagggattccctttttctatgaattttttccctctgttagcatagttttttttggtgatgtccattttttttttggggctaaagtgtgtgcgagtactaaaataaaatcgtattggttaggtagttattggcttccattatgatatgtgtacactaaatcccttgacaattagcttgcattgcataaatttataaggatttataatattctttagccaaaacaataatttttcaaatactagtattaaaggaaaactattattgttattacacttagtgaggcaatggaattgaatggagaataaataatttttattttatttatttgcttggttgtatattaaagtattagaatgtcattctaatgaattttttttataacattttggtgaaatgactattctgttttgaaatagaaggaaaaactattccaattcaagatgagaaataatttaataatttttatattgttataaaataatataannnnnnnnnnnnnnnnnnnnnnnnnnnaagaagaagatgaagagagaaagag

SEQ ID NO: 115350 - DNA, 3371 bp, Cannabis sativa
tgtctcggcggtccaagccatccattattgatagcaatctcgacagtccatgcctgccgttattaattatgcaacctcgacggtctttgcctatcgaattaggtattttgaacacaatttagcactttgagacacctatattggcggctcaacccctcaagattggtcaatctcgacagtcttcaagcagccagtcaagatatgctaatactgtaaaaaaatattattttttaattccccttgcaattaaattgattatatacaccaatttacaatacaaatataatataagatataattttagtacctatcatattaacaaataacaatcacagaataaacaaaactgaaattgagaaaagttttctttatttctataatattttctaatttcataagtacatgtcatctcaacaaataacaaacacaacaaacaacatacaataagtttctttcttatatctccacaacacacaaattttgcgcaacttgcttcactaaaacaaacaagttttaaccttctgttatcaccacaatacacatttaatctctataattagtattatatcactgaacaaagaaataaatgattctacatacctctaataatgaatcattaagaaaacttcatttcactttgtaaagttgttccgtgctaatcaaagccacaacctacaatatcaagtagggatattggcggcaaaatcacctgagttttatattttttaacacttaactatataaaccaattttttaacggcaaaatctaccaagcgcacattctgtttcgctctttacacttccgtctaaaagtctcagttaagtgccacgatgaactatctatgtgtacacaagtgtacacgtggcacgtttttagtggtctacataatattcattgtttaaatattataaaaattttgtaaaaagtatttaaatttaaaaaatagttttaaaaaataaaacaaattacaaaacaaaattattttttttcttttttctgttctcttttctttttcaatttctctttctcctattctctggaagcatctagaccaccattcttcttcctcctcctcctcctcctccttcttttttcttctactcctttaatatgtccaaaatcagaaatagaaataaattaaaaatcaccacaaccactaccccaaaatcataagaacctaaaccaccactcaaaatcaaaatcaccatcaccctaaatcgtttatcacaaagaaaaaaatccaaaaccccaaaaaaacctatatccaatatcacaaccaaatcaaaaccaagaacctgcaaaaagagttacactcaagcgatgatggatctcttcctgggcgagatagagagcaagagagagagagagagcatgggagaatattgaggccaagcggggaaatcgtaagagggagaagggttctcgggggtttgggtttcacatctcggggttcttcaaggtcaacggcggcagataaccacttgaaagagaaagcacaatgagagcgagtggggggatctcggccttagagagagtgcatagtaagtgtgagaggggaagaagaagagagggagagagagggagatctcagcctagggtttcagtgttattaattgcaaaagaaggaatgatgaagaagaagaaggagatgatgaaagaaagaagaaggaggagtgggtgtgggtgtgggtgtgggtgtgggtgtgggtgtgggttctgtgcgaggaagaagaagaagtaaatccaaaaaaaaaaaaaaaagaaaaagagaaaaagagaaagaaaaaagaaaaatacaagattattttttttgtaattttgttttgtaatttatttcacattttaaaattattttctaaattttaaatattttttacaaaatttttatgatatttaaataattaatattatgtggaccactaaaaacgtgctatgtatattattgtgtacatgtagatagtccaccatggcacataactgagactttttgacggaagtgtaaaaagcaaaataaaatgtgagtttggtaggttttgccgtcaaaaaatctatttatgtggttaagtgttaaaaaatataaaattcgggtagttttattgtcaatttccctatcaagtatattaaaattttgtagaggcaatatacattttaaacttttaaaactaaattttttattctaacaactaatgtgcatatccaaactcaaacttcccaatttaataaattacacaaaaaagtaaaatttaatcaacaaagtacatttactataactagaaaataaattattaaaaacattagccatagtttcaccctacactacacaaaaaatattaaaaaagatttataaatcatattatatttacatagctaataaactaagaaaatataaacttttaaaataaaaattacactaaaataactactacacaattgtagaagaaaaaatttagacaatacaatatatattatataaccattaaaaaaaatcttatagatatttgtaaaaaatacaattgttttttttaataaatcagagaagttttgtattgtatcaaatatctttacaacctatccatctttgatttagaaaaactaatctatttacaacaattcaatccacctcttatcctccttactaacttttttttgtcgaaaataatctatttctatatttaacatcattttcactctttttacaattgtatcaactgtataacactttaaattctaccagctttcatttcggttttgccataattggtagatcaatgctgcaatggcagcaaccatcaccctccttcggctctttgagagctttgatcgggccagccacctgaagagatgtgaaatgctacttgctcttgtactccatgctagctaatttttcatttatgttagacatttcaagctaaaagtacactcaaaaaataaatgttcaattgattcctcatacttttcacatattacacattttgtatccatcacaacattaaactttttcagtctagtcttcgtttggagacgctttagcaccgaaagccatagaataaaactatgcttcagtacattgagtctattctaaacaacatccgcccaatggacctttggttggtttccaaccagcatttgatagactttattaatgttgtatgtacctgttataaatggctggacaatacgcttcaaataccaactccctaagggtgggactttataatcccaccaatctattccttttaagaacacgctatgtatccatctcacccatagattgtcttacttggatgagattgcccaaacatatttcccaatagcagctgtgttccaagttataatcttcctaaagccgagccccccttctttttttggc

SEQ ID NO: 115351 - DNA, 1021 bp, Cannabis sativa
tgggtatattttaataaaaaataatatgagagtattttttattaatggatacaaaaaaagaagtatttatcaacttatctcaatttctttaggatatcttcatcagtcaaagacgactttccttgtacatggggaaatggatcttacacgcctaacctatttaattggtctccgaaaagtgaattcttgttgtctctgaacatagggccaactctgaaaatatatgggcctaaaacgaattaaattttggaacctccaaaagaatagtgttatgggatttgaacctatgaccttggacattatggcatccacctcaaccaactaaactataaatatttgtggcttataatatacttaaataaaagtctaataattttttgttatttttttattttgggcccccaaaaaatgtaggccctagacacgtgtctagcctgcctatgcctcttccctctattatccgttgtgttgttgtttggttttcccactattttcaaattctttcattttacagcacttgtctcttttccctgtaccctaaccgcaatcctaaagaaactaatcactttgtaaaaaaaactagggtatttaacttcatcatctatatatccacactctatttttcattaacacaatactatattcatcttcctatcataacagtggatcaacaatgacagttcatattcttactaggacatatagatctaaattatatatgtaaactttctacagtaaataagtaaacatataatagacattacgtaaaataatatcttgtaattctattggaatatttgctaatatatcaaaatcaactatatactttggtggtgttagtgcatgttgtaagaaagatttattagaaaccactaacatggttgaagtcaattttttccttaaaaacatctagggataaatatatcttagttaaagttaaaaaacaaagcttcatggttggactattagaatattttatatatggaagttattttctaattaaggaaatgattttctattt

SEQ ID NO: 115352 - DNA, 1593 bp, Cannabis sativa
  modified_base (1528)..(1528): a, c, t, g, unknown or other
ttatgtattttgtgtattttgtataaaagtttagaaacaggatcccggtacttataaatgattttataaagttataaagtttaatacttaatataaaagttttatttaacacgattttcgagtaagttctttgattagaaaagatagcactgtagtgaatgaagaagaaagaaaacttgccttgggacctattttgttcattttaattttataaagtaaatagtttcctcattttatttcatattagttttgggaaaccaattgatgtaattaatccctataaatagtggaatcatgtcactattcaaggacacaaaattcattcagaggaaacaaacgagagaaatcaaggtttaccagtaggatactcagagatcattgtaagagcttttgtgagagatcgaggaattctttttcatcttctcacaagtcaatacaactaaagagtaggataccatcaccaagggctcaaacctgtataattctggtgttttctttactttacattattcatatttgttatttcaattatacttaaatcgctttaatttgactcactatcgttgactaaaaaagtcaggtcaacacatgtcatattacaattttctccaagtcttgaaacaagtgaccaagagtgaaaactcttaatcacttagggggtagtatatcttataccacttcaaactttattaaccttaagtatgagagtaggaagtacaacttgaaactggaccctcagggatctggaagtaagcaactatctaccatatttcctaagttaataagtttactaagtcaattgagaagttcaacttcaaacttaattaataccaagtatcggaataggaagtagtgctaaaaactagagcctcaaggatctagaaataagcaactaccttaccatatttgaagaacaaaaagtttgctaaattaactcaggttaattaaactcaaaagaagtccagacttcaaaatcaattaattcaagttaataggaacaaaaattttaagcgtctgaaacacttattaaactttttttaaaagaaagttatttaatttcaaggtttaggccattggagtcgtgctccaagaaatttataaaaatagcttgtcaaaataaatatatagtcagccacttggttctttgtatcgttggcatgcttctccatagctaaaagttttgcgacaagctcgacaaccttcttgtgttcgttatccatggtgtaagcataatcgacacaagctcgaatgtaaagaaagtaagtcacgtgatcataaatatgagaaagccagcttaagagaagacaagaaaatattgttaccctgaagctattaatgaatcatctttaggaaatgatgtgtggaggcttagaactaaccagcttcctcaactggatgttctacgccttggatctaattaaggcatctccaccataaggaagccatgtgccctgcgcacgtagctgcgccacaaaatctaaactggggttcggagtgttggaattatattttaccaggaacttagatntactcacaagtatgtttatttaacaacctaaaattgaacttctaaaacgatgaactaaacacata

SEQ ID NO: 115353 - DNA, 1202 bp, Cannabis sativa
tttttatgttttcatgccatccaatcaaagtgaaaacataccctaataattgttgcagttggtttgcgtttggtagaactattgtagtaaagtggtataaatgtatagcattattgttgtcattgatcgatgcatattatgtttcattaattaatttatgtacatcaatattcatacatatatatatatatacttgcatgcagagcttgtgagcaagttaatagataaatttgatggtgaaatgttagatgaaaaagacatatttggaaggacagctcttcactacgctgcatacgttggaaatgtgaaaattgtgcaactatttttggagaaaaatagaaagcttgcttacattaaggaggacaaagcaggcatgtcagcactacacatttgtgcaatggaagggcataatgatgtaattaccacactggttaagtattgtccagatgtttgcgagttattggacgataacaaccaaacagctttacatgtggccgtcaaatgccgaagggaaaactctgtatggctttttctacataataagagccaatttgatggtattatgcctaatcaacaagacaaggatggaaaatactccattgcatgtagctgctcttagtggacaccttgagattctagtgatgctagccaaagaccccagagttgaaaaaaaagttatcaatcatatggggatgactgttgttgacattattagatcaagtacacatctgcctacctataacaaggtaactgtacgtaaaccccatagctaatataactcatatatatatatgcataatatgatatcatgcatgatctataggaaataaagaccggttttctaattcaagaacctgagtccaaatacgtacggaaacaattcagcaaatctaattattaaaatacttgtatcttaaaatgttagaatatgattccatttccattattttggtagaatatatagaaaaaatttaataatttttgtatgcattttaaatttaattatttcattctatttttattcttattctcatgcattctcattctcattcccattcttattcatatgctttcattcattctaacaaaacgcttaggttgcatttagttgagaagaatgaacacataaaaataagaatgataaagaaaatataaattaatggaataaaataaaatttaaaatggataaaaaaaattgataa

SEQ ID NO: 115354 - DNA, 2058 bp, Cannabis sativa
  modified_base (75)..(88): a, c, t, g, unknown or other
caaaattatgagaactactacatggcatataaatgcatctctgaattcaataataacagtataataattatttannnnnnnnnnnnnnattttcataattaaacatgattaggtactaatttccaaattaaactaagcggtctttacatgaggattgaataaaatactttatttcgaactttgagaatgattctcccttaatttctttattctaagacttgttctctttcttaaaagccttttctcgagccatcaaatcattactagtgctttcatcaatctattatgatgatattttcatttcctttgacatcagggtattttgtatttcctctatggttagatacttcttaccatgcatcatgttattcacaaaatgctcatagttctctgaaggaagagaattctgaactatgatgttttgatcttcaccctctactttgattcaaatattcttaagattaagaatgatcttattgaaattatgaaggtgatcctaaatgttcttaacatgtatcatcttaaaagaatatagcttttgctttaagactagtctattagcaagggattttatcatgtttaatttctctaattttagccatatgtctgcggttgttgcttctttggagacttctcccagaagttagtagccaagattgagattaattgagctatgtgccttttccaaggtttatgtcttctccttctttgtcaaagtttttggcatgttcttctctccaagcaaggcatattgtaatccttcttgcatcaatagcatgcgtattttcatcctccataactcaaaatcattcttgcctgtaagcttttctaaatcgaacttagtattccctatcccaatcgacagttcaccaaattcttcaaactatgactaagaatttacttcaagctctgagctctaatactagttgttatgggatctcacatttgatcttacacacttggttacacaagaacaaataatgtctcacaataaactagctacaaaaacctcgttttattgatgaatacaatgatttgtacaattgaatgaatgttaattggtacaagtagtggatgccttttatagacattgactctaacatgaaagaccaactaactcagctaagagttttgaacatagctgccacataccccaactaactaactctagtaaaagctacctataaactgtcatttatacaacaattccaaaagatattttgaattaatgaaatatataattatagaagaaaaaaaaagatactaaacaattgtagcacagtattttccctccaaacaaattagacacttatagttcaataatgtggtctctacaagtgctttgctcattagcaaaacaacaatatcatctcggtgttttgactgtcaattctgcttatcacttagaaaattccacctctcctcacccatcgtcctcctctcctaacatttttcaaaccctggtggaaggcattttggtcttccactgttcccccaagattaaacactttatttggagggctttccaccatcttctccctccaatctcaacctccactctcgtaaagttcttgatagtccttactgctctttgtgtcccaacaaaattgattccaacactcattccctagttaattgttccagagcaagtaagtaatggaaacatactcgttttagtattttcttcagcaataataaatttagtgacattaaagattttttgctaaaagattttgaaagttttcaaaaagaggatcttacaattttttttggaatgatttgggccatttggaattatcctaacaagtttctttttacagaaaataagaatttttatatagatatagaggattctatggtctcttatctataggaatacaaagatgctcaatccaaggttttacaatcgtcttctcaaccattccacactgctgcccctcatcacagggacccaaaccagcttgtaaagtcttttttttggcaagttagttgacaaaatattttttcatttatggtaagattcctttgcatacttacccgaattcttaccttgtgatt

SEQ ID NO: 115355 - DNA, 934 bp, Cannabis sativa
tcttttcgtcttctctggttctccgaattagggtttctggttaaaaacccccaatttaatcgatttcagaaaccctaatttgctgaaaatcgtcgctttgatttcttttttcttcttcgattattaccgtttggcaggagcaacgttttgctagccactcatagctgccggccgtagatgaagcacgagaagaagaaaaagaagaggagaacttcccaggctccaaagaagatcgaccctgtgaacgaagagaagaaggtggttcaagcgcttgctgaagctttctcttccgcctctttggatgatgccatctctgcttaccgggaagccaaaggtgatccggataaggctgctgagatattagggcgatccttgtatgagagttctgacgatccgtctacgagctccacatcgggtgaatgctcgggctctggatcgtcagatggttatgtggagatgagttacgttgacaattttgtgaaggagaaggattctagagcttgtaagcagaagaggcaaattgcggccactggtactgtgtctacagttctgggaaaggagtacatgaattcgagcccgagaaaggatccaagaacgatgaatatgaagctgaagggttttggtaatgggggtttcgacgaggagaaggctgaacagtttctttgttctatgcttggagaagagtctgagctgaacttggcgattgttagagatgttctgtgttagtaattctgtcttcttatttatttatttttattcaatcatggtgtatgtacggatacctctgggaaaatgacttggatttatcttattatgtactttgaaattattccctttttaaacagaaaattatacatctttaaaagccttttggaggattgtatttttgttttgcaagttattaaacagaaaattatatatttatatatatata

SEQ ID NO: 115356 - DNA, 2950 bp, Cannabis sativa
ccaccgctaatactattattagcgttgaagccttatttcgctgttaataaccattattagcggctatttaataacgacgaactattagcgggggattaccgtcgctaatagtctttagcggccaaaaatgggtttattagcggcggagtggtccgccgctatttaaggtaaatgttgtagtgtatatctatgacagcactcccactcaattataccactgagtttccaaaatgtaagtattggctagacagtaaggtaagcttgtagcaaacaaatgaaagagctcaagcataattagcttaaagcttaatcatctcaggattcatatctaatgaccacttactaaaagtataaataaccttattgttgattaccacatccatataactccagtgcactgataaatcatgtggctaaaaatattcgaagcatataattataattattttttactgtgatgacgtcactataattatgaataactataagttctaaatttaataaatttaagtattaaatttataatcatgtaaaataaacacgtgaaccaagtatttaactaagtcaagaaagatttctatttcttttattcataaataataaaattacatagaatatattttatttagggcataaaatcccaatacaaacttagtcagttcctttcatcatcccacgtgcctcatttacatgttgttcagaggatatttcagtatataaattctagtcctagtttggggttgtttttccctaaagattttgaagttaaacttaaactttacacggattcaaactggggatcatgtcaagcaacaagaagatcgatctctagcttttgtattcttcttggatagtctttagttttatagaaaagcaaaaaacaacacaaagtgtcgtgatcatcaaccgaagacgatattgtgttatggacaacaccacttgtaaactttttggttgctatccatgttaaagaaacttaaacaagatcgcattatagaaatgttatgtgacaacaaggtagcaatccacattgcggccaatacaatctttcacaaatgcacaaagtatatcgtgatagattgtcatttagtcagagaaaaagttcaatctagactcatcaaaaccatctacattgcttcaaaagatcaactagttgatatctttactaagactttgtttcctacacaattcagctacttaaaagtaaagatgggacttcaatgcatatgtagtccaacttgaattggagtatcaagattagctagttcagtaagagtaagtgagttgttagttagagcttactgcaactcttgattctttactcagtatactttataagtactaaaagccttgtacatttcattttgatcaataataagaaagctcatttcctcctttctttctttgtaataataatatgttgataatggtcttaaagtcatgtgagatttgaaattgtggttactaaaatattataaataaagacctctatatgaatttcattttgtatcacttagtttctatcaagagaagacattgtcagaaacattttaggcttgataaatttttaaaactattttcacttcttttcttatttaagtgcttgtgatagggaaaataagtttttggacaaatgtgtaaaactttgttcaattttagtgattccttgtcacttttggttttggtaataagattgttctcacatcttctttatatttttattttatgcactttgcattgtgttatttacttgttgcatattgtaatgaattgtgattcccctcttcatctcttattcttcattttacatgtaattttgtaatagaattgtaacattatttaatttttattataacccttgtattgttgagcatagaattgtaatcttgttgattttatattttcattgaagattaatatttcacaacaccgtatcatgcttaagtatatatttttcatgtcatgtcatgtctatttataatatcgtatcgcacacattgtgtttaaacttatatttcttcgtgttggattgtactgctttctaggctcgtgctgatgtcgtgagtccacctgtatttacaacactaaataaattacacattctaattaattagaaatataaactataattaacaatttgaagtcattataaccaaccacatctaataataaacataagattaatagttctaataaactgagaacgcttatacatataaatgtatatactatatatacaatacatattgcagagaaaaagaatcaaattaaacacatatgaatacatcaaattttctgtaaaaacacatttatatgagagacagctcacaaagaaaagaatgaataatggaagaaagatttaaatggagagtaaaaggtaaataaataaatatatatataaatatataaatattcaaaaaacattgcagcccttccgatttgatttatgcttcttggactttggagggtgtagagccaatttgattgcagcatcaaatacacccttcacattctgcatttataatcacaaaattaaagtttgtttataattataatcaaatacatgacaacatttatactaataaatttctctatctattgtatacgattctcatctatatatattctgttaactaagtactttgtggaactcaataagttataaccttgagtgagttataaccaagtagtaatgagaatgattaattagaaattataattaatttaagtaatatttgagttggggcatgaccgtatgagctattttaaactatgatgttaattttttgataaaaaaaataggtaaatactattttagaaacacaaagactatatattagttggactcattagtataaaataataccttaagtttaatttttattaatttttttttaggataaatactattttgaatcttgtgttttgcaaaagttaccaattggacctt

SEQ ID NO: 115357 - DNA, 3432 bp, Cannabis sativa
  modified_base (26)..(26): a, c, t, g, unknown or other
ttacattgaaacagagttttatttanggcataaaacccaacagtttggtagttgtatgagagtttcttgaatctgacgtgtatatttttcttgctctgccatttttctttgttgatctaagaccacatgtctttgcctcaccacctcagggtctttctcgtagtacttttcttcatagtttttgttataactgtcattttcgttctcatcaaggccttccttattatcctcttcgtgggagtatcatcaataggattttcctactaggcaaatgattggccacctctgatgcttcaccaaccctcataatgtctgcctgaagatctaccgctggggtcaatttatatcatcaacaacatcatcctcatagtcttgatgagcatggggtctaaccacagtgtttcgggttgcaaccattattgtagatgacaacaatggagaatactttcctcaactctcaatgaaagtaccaaaaaatttatcgagattatcataaactaagttaataaaagattaagctaagaaaagataattttaaagaaaagaagacaaatattttatatggttggggcgttaatgagccttagtccatgaatcaatattattgaagctctttggctatgaagtattttacacatgtgttcttgccaaatttttgtagagtttctagccaaagttttttaaccctttgcatggaggagtaaagccttatttataggttgaaactaggtttttgggtgaactcagacccattatggttttatatatgaaataagcacactgtcggtgtaaaatacaatataatattgactatgggcctagtaggtgagacccaattgatgaataatcattgtccgtacaacgtagtactatttgatgttgctaggtggccatgtactgccgatcatgtacactaaaagtcagaggagtgggcgttagacaaaaaggcatgttactttttgtgttgtgcgcctttctcaggtctgacacgggagacaaatttgtaattctttggaatcagaggtgtgccacgtcgaaccaaccccaaaaggttgatcttcgcgataccccttggactaccctttcggaatacccacggggtatccatttatgtcttttgggacacttggtaactcggttgagtaagctctctaggtttgttggtccagttttgcccgcagtcaagccttaatccaatccaaatcatccatcttccggcttcattcttaggtcggaccactatctgttttggccttgagaatgggcccgtaaattgatttaggaacactgaatgcacacatgttgcctgtccaaaaatgcgaataacacgtacatataaaataaaatgtcttaaccataataaaaaataaaatagatgaaccaaacttcaaaacatatactcacttttatataaatgttataaattagtatatttctgtcttcaacttttgacactatcccaaacaaaatgagacttttacccttaaattatgatgctagatcatctgaattatattgttcgtaacaaattttcctcgaactactaaataattgcaaattttcctaattggttgcatatcgcttagttttttaaataatttattaatgtgatcacaagccacacttatgattacagtacgagagtctattcaactaatttaaaactagttggaaccaagtataatgacgttaaatatttaaatattgaaccacttgaggctagctcaagtggccatagagagtgcgttgtgttggaggtcctgggttcgagtcccagattatgcatgatgtaatatataaacgcttaaataaaaaaaatatatttaaatattaactctaaaattacggatacagtactattctagattttattgttagagtattatctatgtatttatttttttatgcataaactcttaatttacaatagattatctctggatcagtattcggaaactatttgtaaaattgaacataatgcaattgaatggaaaataaacattttacaaaaaaataataataataattcagggataaaattctattagtataatttaagggtaaaaatcctatttataatgagaagagtaatagaaattaggatattttgatttatttttgtaatgaacattcgaggtggaatctaattgcctataagtttagtccatgttattaaaattctatgcataattgcatatggtttgtccttatagtatgtttttttttttttgaaggaagaatatgtagttaattaccataactaagttttactttcttaactatgtaatatgttttcaattttttttaaacagttgttttgatgttaattgtgttttcagcaagagttttgctcctcttcgcttgctatggatgatttgaattgatgaaatcctatttttattaaaataaataaaaaaaaaattgtgatttgattttttaattatctttattttcatatttttaagttgctcaaaataatcagcgtcttaaaatgaagtttttgcattagtcaacgttgaccaacgctattgattttggttcaacgtttgtgtccctagaaaattgacgcaattgatgggccaattgtgttagttataaactgacactagatagtacaagtagcggtaataatatttctttaggtaacgtttggttagaaataataaaatggaatagaaaggaaataacttttatttcattcatttgtttggtttcattttaaagtattggaatgtcattcctattctagttatgtttttattccttccaatcaaatgctacctaattgagtatttattatgtgagtttgagttggagagagtagacttggatggagtaaactttgagagaatatgaaacccaagtgttggagaagattaacattaccaccattttaatttaaaaagtaagatccacttgaaaacacaaaccctttggtcattaaatttaagacatttctattcctattcttatcaaatctaaacctcataccaaacgtcgtgtatcacctcagtgagcaccactactctttgctccttgacatctacatctttatagagtattatgttgtcttcttgggactagcatataaattgagccattagaactccctataaatataagttaaaaacttttttaaaattcactatttatgaattatatttatggaacattattcattattctaaacatatttttattaattattatatcttttatatatataaaaaaaaatacatatataataatatgggtgactattcaatagttatatttttattgtaaccgtgatgattacattttttttactaataatagcaaattaccaataagtaatttttttttttagaattaaattaatcataattaacaattttcctaaaataattaattttaatttaaatatttaataagaccttttttagcaattaa

SEQ ID NO: 115358 - DNA, 4123 bp, Cannabis sativa
  modified_base (50)..(51): a, c, t, g, unknown or other
atgacaactaatatagtcatatgttacatattattagtttattacacatnnttaatctatatattatattattattataaataatataacaatttatatgcttataaaactcaaattattatataaacatatcacttataatacatgtttcgtaaaattaatacgtaagtatatacaattaaataaagtaatataataataaagacaatgattattataattcataactattttttattttagtttttaatgcaattacttaatttctcttctttctatttaattgacaagttaacttaagtattttataatctagttaaagcttacaaacctaatttatgtgaaaactccctatattcctatggtacgtttaatcacaaagaaagaatcaagtaaatcaactcataagatctacaaataatcttaatactttcatcctaattaaatcaatttacatatataataatcagggcatattcaaatctcacttttcagaattttaattcgaattcataaataacgattatagatgaccaaccaataattgtaaaattagaacagattgtatgaaattgaaataagaaaagaatatgaaattaaatgataacattaatctataaaataaattcaagtggttcacatagtaatttttaataaaattagctattaaaatcattctaaaacaataaaaattcaagtaaaaacataaaagatagagatagatgagaaaaaatattgtttagagtcctccaatagtatattctgctccaaattgtcctctgatgctcaaaattagtctctaatttcgaatggtctccaaacttagccaacaaccctctttaaatactaaaaaaaattcaagtttccgaaaaatcaccaaagccgcgacaatgcttagaaagtcgtgacattcattaataactcgcgtcatttttttaaatttttcatttttatttttgaaaagtgaccattcttaactatagatcacgatttttgaagctaaaaatgtgaactttaataaattttaggcaataagaatcaactaagcattaatggagttttcttttttcttcaaaattaaccattttcatctcaaaaaggcttgaagaacactaaaacaaccaaaaacggaaatctctcaatatttttcctaaaaaacaaacaaaaacaaaaacaaaaacaaagcataaatctgaaaaataaagtgataaaaaaaatactaaaacacacactaaaatagactcttaaacatgcataaaaataaagccaacttctcccaaacttaacttttactcgccctcaagtaaagaccaagttaaactaataaaaagataataaagaacacaagtaagccaccaatgctatctgtatacattgcctttcctttgaaattacaattgtaattcttttaaccagattttcagctcaactgtcttaaagttcaaccttatagttcaatagacactacaagaaatgtcacttttggtagcacatttttgtgatggcaaaagtttagtattgcactggtaaaatagaatttacttctgatgtgttggcaaaagaggttgacaaatcaacgttggtattagaacttttaccagcacaaaataaaaagcgttggcaaaaataacttatctagcacgtaaatgtgctggtaaaagttagattttagccactgtaaatgtgcgctggtaaaactttgacctttttaccagcgcagtttgcgaaatgtgctggtaaaagtaaaccaacgtagtagcaaactttactgataaaagtgacatttcttgttgtgagagaaataaataatgtctcacaaatgaccataaacttggactccatcacatatgctcaactcatgccaataattccacaaactaatttttcaatatgcttgcatcatttaactttctctactcaaaaagactttaaaatgttataacgtgagacttaagtaaaggtagataaaaatatcattttagactcaactataccctaagcttttcatattccaagaaccacaatttcattacaaaactattctgatccccacttaatacaatgcaagagagatttatatattttactttacaattcacacccacatttattttcttcccactttttttcttctcttttttctttttttttttcttttttttaaagaagaaaaattaaagattgcaacaaattaaaacatcactctttttaagctttaaactcttcaagacacaatactcaattattattttctcccaaacttatttaaaaactcataatataattaggacaaaagaaaataataaatgggtcaatttttagctcaaaaagtgtgtaacaaaaaaatcggtttaatgctcaaaagaggtaaactagagataatcaaaaaataggttagcttaaaagacacaaatgctctaaaaaaattgcttaaattatttttcaaagcataagttatcaagaattttacctcaaaggccaaacaatgcaagttctatcaaattcaaattatcataccaccaaccccagtcaagcatatataatgaaatctaaaatatatagcaattgtgaaacatattaaaaatttcctacaaaacttttctattgaagtctaaaacaattgaactaagtacacggttattagcaattttcttttcaccaataaaacaatgcaatataaacaaaaataatggcttacaactacttagaaaaaaataaacactaacacaaataaacaaacaaacaacaaaaataactaactaaaaattataagtctatcccccaaactaaagattcacattgtcaatgtgaatcttaacaaaataagactcaaagctttaccgaagatttttccaatgctgatgcattctttgataagccgcgacattctaagtgaacttttttttcagccttaaatttttttaacgtatttcacgattcaagaaatacaataacaacagaaataactttcaaaaataaaattaaaataaaaacaaaaattaaaaggaatccaacaaacaataaaaaataaataaagtcatactaaaaataaaattgggttgccttctaaaagtgctaactttaacgtctttagctagacgctcactcagtcactcctttttccagctcaactctggtcaagtccatcacacacatccttaagagccataatgtcaataggaagaagctcacttgtaccattggaaacttttaaattatctccaatgtcataaaagccttcaagttttccacagaacaacgatttcaatcgacgccaaacaaaatggactcgtttcttagtctttttctttcttctttttaatctcagaccatcatccaccacatgaactctacaacaagtggacatactagttacttcaaaaatattaaattttacctttttattttgtactcgcagcttcaaaactgctccaaacccaggaagaaatcacgaacaaaaaagaaggaacaatgaagacccttccggatgagctattgaaatacttccaaaatggcattctaacgggcatcaaggaaggttatatgctgaagtgacgattctctaacaccaaatcctacaatttcagggccttttcccctaagttagatagtaagagtgcccacaccaccaaggggaacataccttttgtctgacgaccactactctgacagctacagtttgcagaggcaacacaatgccacctatcgacatcaagtggtccataccgtacggaagatcatagccctacgagttaggcctcaatccgtgggtcctaagtcaacataatatatgtatttactccatcagtgggtcatgttacacgcaaaccctagtgggtcccggatgtatccatattcagaccttagcctataaatactacatgttccattttcaagcaaagagtgagaaattcattactaatactccatagaaaaacatagagattcttgagctttttcaagaatatttgtgtaatatttcaaggctatttaacccaatacagatgacttgtagactaggtgtaaagaccgcatatgattaataccttgaattattaaataattagggtttatgtatgagattttattattattgataataatacaattatgggaatttatt

SEQ ID NO: 115359 - DNA, 3133 bp, Cannabis sativa
atgtatttaaaattaaatttaattacgaaaatttcagttattcacgttttttagtaaactctctgatcagcaaatgaatgcatgatattttaaaattatgataatgtacctaatctagtagggcattatagttttcctattgatgaatatcatggaaataccctatgtatcgataaaaagacaaaaagaagattgtaaaaaaatacaatagaaaatggcaggctatttttttgggtttcttcttgttaaaagtggtagaccactgctagaaaaattatctactgttttctactgtagattttctaaaaatcacattcttaactcaaaactaccctaaatttcacacaaagctccagaacacctatctgagacataatgaacccagcagaaaaacacaacaccgatgctttataattaatttcaccattgttgagctaagtgttagctttaaaactcaaacctagctaaagctcaactataacgacaaaaccagccaaaaacaactcaactcaacttaacaaagtatctcttaaacatcccaagctcatacagaaagcatttcttaaaataacatgcttaaacctagcttttctaacaaaaattcacagagaaagaaacaagagcttaccttaacctttatgttcacttgctaagctaaattcctactaaaaatcttgttgagataaagaatttagattaagaagaggggtagctttcttggtttctaggtgatgtcgaaagagagaaggaaaattaaagagataagggttatactcaatttgtaattatctaacccaacacttgatattattcaactaaaatcaaattaaactaatttataaataatacctagaaatctctttaatttactaataaaacaaatgaggcaaaagattaatatgccctttacttcaccaagaagtaatccattaacgtagcggtaaaatggtctgaatatataataccaatgaatccttacaatctaaatgtctaattatcttgccctgctaattctaagatactctatagtatctaaatgactctagtggccaaactatcacattctactattaccagacataaaacatgaaattgttaaaattcacatatatcaaatataatgcatctagaattccaatatatctccataattgagaaattatttttatgtagcccatttctgactcaagcgttattttctactaaaaaggacataatcatacaatattaattaaatctcttaatttttttgctaattcccatgatttaactatgtgtaccttactcaactctatagtgtcgttttgaagaacttttctttcttatcaaggatttgcactacttgctcctcataaaataagtagttctatccgagtatataagttagtttcaaatcatactttcttaacataaaatatagaaaaaaattaaatgttgatgctaatatttatcatatgacttgatgataaaccattaatctaattttctcaaaaagctctaaaagttttagaaacctagggcatatattaccattattcccaaagtatttcattcctttcactggtgatattggtagggagacatgatctccatacttggaatttctattgctctgagcttcagatctacatatccttttctgtctgctttgaaaagcaaatatcttggccttgaacttctatacagtctcattggtgcactaaattgactccataactaggtatttcctatccctggtttcatcttagtgaattaggaaatgacagtacttcgtactatttaacaacacataaggaaccatccctatcataccctgatcattaatgatgtaagaaatttcaatgaaaggcaaatacttgttccaaaaatccttgaaattctttacatagccttgtaacatacctttcggtatctgattcaccttttcaaactgattactttgagggtagaaagttgtactaaatttcaactttatacccacgaccctttggagacttctccaaaacatggagttgaatttttgtatcctatcggaaataattgaccttagagtgtgatggattcatattatctcccatgcatgtatataattttccacactacttttctatatacgttgttttcaatgataaaaagtgtgttatttaagtaaactaatgcataactatccatatgtgaccaaacatactcatggttctagataatctaaccataaaatctatagagacatcttcctatttccattcgggacatctcaaaagttgtaataatcccagaggtcattgatgttaagcatttaaaaaaacaatcttccatgtccctctgcataccacactacctgtggtagggttcaagtcctggtatatcttggtagtacctggatgtaatgcataagaagtggcaggaacttcatctaggatgtttcttctgagctcaacaatatttggtacacaacttgatttttgtaaagtacatccaattgtcagacattgagaaatatttagcctggcttgctaaaacttccttttaagtttccactaattcaggatccaccaattgagcacttctaatacttactagcaaatctgatggaaatttcaaactattaggtctattgaccatatactcaatacctaactttaccatcttaacaaccaacttgggagagatcctagttagactgaaaacctacttggaacctttcttgattaggacatttgccactacattggtcttcctggcgtgataaagaatttttcactcataaaccttgtgtaactccaaccaccatctatgcatcggatttaaatccttctgagtaagatatacatagaacacttgtggtcgatataaatctcataattttctctgtagagataatgacgccaaaactttagtgcaaaaattatagcagtacagtacatcctaggtcttgagttgagtaacaatgcacatactacatcaattaataagaagaataggcaaaaactctatcaacttgccttagaatgcaacccaggccttgccgagatgcatcacaaaagaccactggcttttcttgatttaatggaaaaacttacactggagctgtaatcaattgttgcttcaactcttggaaacttgtttcacactt

SEQ ID NO: 115360 - DNA, 2999 bp, Cannabis sativa
taacaatattacagtgccacatagactggctttaaacagaaagctaaaacggaaaattaactaactaactgaagcctaactaactctaacaaagctcaactgtaatgttcaggttggagatgaggacatgtgcattgccgttgtttctaggaaccatcatggtcctctggattgggtgctcacgaaacacgtgtgcttctctaatccactttgtagagaggtagcaacgtgctctttagtgggagacgtcgtggtgcaaaaaggtcataagtatgtgattgtgtaaagtgactttagtggggttattgactccctaaatggcgtctgtattagatgggagattgataactacattagccattgcaaaagaacttcttcttttttttgttggttgtttatttttaaaagttgtatacgataatataattttgcgacccataatatgactaaatgagtgtttttcacaattgttatagtatgttgtaggtctctaacatgcctaagaatattatttgtaataaacaagaggtttaactttaattttgatatatgaatgattttattttttcttaaaaaaaaaaaagaaaagaaaaagaaagaagaagaagaaagatttgtcatcacttgtgcaaccaagtggtggtggaagcccgatgtttgataacataggtcatgaattcgatctgggcataattaaggtcaataatgtgtatatttgcacatatatagatgtatggatgattattcaattgatacattttaattataattataataattatattttttttttaatataatagcaggttatcaataggtaatttttttttttagaataaaattaattataattaagtactttcttaatataattaaatttgaatttaaatatttaataaggtcatttttagcatcaatatttataaataattttatttttatacagaagttcctattataatatttttaaatagttaaaatatttaattataatatttacaacaaaatttggtctttttcttttttacaaaaattagactttatcctcttgcaaaataaatttttgaataactaattatttttaaaaatgacatttatttatttatttattttttattgcaactaaaagaaataagtatgaagcctcaagttgaagccaaagtggtatatgtcaaagttcaaaggaaattgtaattagttaaattaaatagactaaaatatatgaaatgatttggatcaataccatattttcgtcaggaaccactggagtaataataattcttcgacccacaatactacgtcattttgttcattaagcttaccataactcttaccataaattgcaccgtgcttgagtttctttcggcaaaagaaaaaaaaagcaaaatggccgcccttactttttttttgaacaaaaaggattttattcaaacaacaaacaaacaaacaaggcaaaaaaccacaaagactcgcaccaactactgaagcaagcagcaaccccaacccgacctccctaccaagacttgattacattaataacatacttatttctgatacactctttgtaaggacctttgctgatgatcctaagctgaactattttccttatctccatgctcaacctactaggagtaccacaacaaagatcaaagatacaagcatttctatttttctaaataaagtacaaagtggcagccaagacagcattccataagcgaggaaccaacccttctttcaagttacaacaggtctgtatcatttcagcagtcgatgttggccattggaagtcaccaagccaagagttaacagcagctgctacctgtgtcaaaaatctgcacttaaaaaagacatgatcatgggtttccatatcattttcacacactggacagagacggctaggaatagccataaacctttgaagaaaaacccgagtaagcaggtggttatttgctatctgccagtaaatgaatccgtgctttggcacaacaagtttgtcccaaattgcccctgcaaaaacagtcttagttccctccactagcagattgtagcaacgtttagtactgaacttattctccgtcacagcttgattgagaatcacaacattaatgttgtcccttatattcaatattttcttgaagtaccaacttgtatcaaccttcttcgggcaattccatatgtcattgtttttcaagtaaatggagtttatccatttgacccaaagacaatccgtcttgctagcaagagcccaaagatacttagccaagagagtcatgttccactatttcctttctcaaaacccaacacctccaaggtctttgggaagacaaaccttgtcccaagaaacccggtgaaacttacttctgttccctaaaactccccatacgaagtctcggcaaaataatgatttcttaattatttaatggatagaattcttaatttaaacatagagttgaaaataataatttctttcgaaatatccaaattaaaaacctccaaaatcctactatgctaaaaaaaaagtaattttccacaaaatcatactcaaagtccaatactaaacttaaaagaacaacttttagatgaagattgagatttttatacaccatacatgtgttgagattttatacaccatatagccaatttttcattcagcctattttttgatatgagaaaatgcatacgtattttgcatttcattacatgatcgcaaatgaatttttattctttaattcttttaaattaaaaaataaataattaagtgtaataattttcaattaaggtttgtaaattttaaattataagattatatgtgttataattttaaattaatagaagttttgttataaatattttaataatttaagtgcaagaaaattaattactaagagattattttgtggtaataaattacaaaaaattaattaataattaaaattaatttaattttaaaatataattaatctttattaaagttttataaaaaaaaaataaagtatcaa

SEQ ID NO: 115361 - DNA, 1889 bp, Cannabis sativa
ttgccggagaatagcgacaaagacaaccacatcccgaactgttcggacacgctgctgccatatgagatcatttcttgctgaccaaatggcccagcaaatcatcacaattttgcataacacctcgctgttcacactggtagtagaggattccagccatgacagtaaagttcgtgactccctgccagcaacagtaaggcccgaaaactcccaacaagaccaagcaaatggacaagaaactaaaagatgcaattccgtttccacgaagacaccacacataggacaagtgttatcattcaaaacctttttaatacaaaaattcacctttgttgcaaggcaacttgaagctgctctccacaccaggtccttagtcttaggtggtaccttcaaagcccaaagtttcttccaaaacaaatgaccctcggggttgtccaaatgaggtttttggtcttgtagcatcctatatgcactacgaatagagtaaaaaccatttttctctgcgatccagtaccaagtatcgcccccacctgactgagagatgggaataccaagaataattgcagcttcagtaggcgaaaataaatcacacacaacatccggatcccaacttcgctgtcctatttgaaacaagctattgacagtaaagttttcaagcccaggaacaatcggagaaggagtaggtttatccatgacaggtaaccatggatctgatgtaatctgcacggtcaagccagtcccaatttgtttcctaagaccaagtttgactgtgtccttagcagcaaaaatgctactccagatgaaactcggattagaacccagttcagcagtcaagtatgtaccattgggataatatctagctttgaagactttgctagctagggaatcatgtctaagaagaagtctccatccttgttttcccaacattgcaagattgaaatctctcagattgcgaaaccccataccgccttccgctttgtgtttagtcatcctatcccagttcatccaaactataccgctcccgttaccattagagttattggatttccaccagaaactcgccatcattcgctctatttctttgcaagtaccaatgggtaaaaggaagacactcatagcataagacggaagcgattgaaccacagacttaataagcacttcttttccggctcgcgagaggaatttaccctcccatccattgattcttgtcctcattttctccttcaggaagcccaacacagcatttttattacggccaacaatactcgggaggcccaggtacatgttatcagcccctgcttcttgtatattcatcaaaccgcatatccgactcctaatgtctcttcgggtgttagagctgaaaaatgccgaggatctattgagattcactttttggcctgaagcttcttcaaaagtatgtaatagcgagaggacacgagttgcttcttcctctgttgcttggcaatacacataactatcatccgcaaatagtaagtgagagataggaggcgcactcctagccaccttgcaccccgtaagtagacggttggcttcatagtgtttgatcagagaggacaatcctttagcacacacaatatacagatacggagataataaatattaatattaaaaattattttttattattttgaattttttttattttcatttaataataataataataataattaattattgttgttgtgatagttaagatatagttaatgatcgtatttatgtatgttttacttcttcatatcaatatatttaaaaaaataaattaagtttatggcaaattagagagaggattttgtttatatatggttaaaaataataaatttcattcatttaaaattagtttctgtttttaagttattttatggttttttttt

SEQ ID NO: 115362 - DNA, 1399 bp, Cannabis sativa
acagcttccgaacacaatcacagaaattgaaagatttacataaatagcataatagacatacttgaacttaaatatatttctacaatatgtatttaatagataataattaaatctcatgcataaaccctcattatttaatattccaaggtattaatcacaagcggtctttacacaatacttcttagaccctgttgaactaatggtgcgagggatcaatttgatattttgaaatggtggctcataaattcatcaaaatattctacactgtcaagcattgattgtgatattttagcgattttggtcaccactaactatagcctctgaggcaactttctccatgggattgaattttagatcctttcacgagctcattgagtgtgacgacagttgaaactctaatatgcttgaaaaattggtagagtaaatcacatcaacccgtcattgtgaaagagtactatgatagcagatcaggcttagctagaaccagtagatatttttgagaacgatattttattacacttttatttaattttctaataatacaagtaaatttacaatcatttttacactaatgttttaatttttaattgacatatttgcaaaaatgattgataatagaggttgtgcctactcctattagctcacacggcttagcctccatctccactacgcactctagtactattctagtattttcatcctcttctacaccatgcacacttctttagttttgttttgaactttgatggtttgattattatggactatggaatttgttttgtttagactatggattttggtttgtttggactatgcactttagtttttggaatatgaattaagattattagattaattttatttcttagaacttttaattagtttagaatactgtattgtaaaatgaaaaaaaaaaattatcttatagtggaatagttgctgaaactttgagacatttttatgaaaaaatgtatgaaaaaaataaattaaaaaaagctccaacccaaacccgatccactttgaacctacaaataggtgggtttgggttacatactatataaatccaaaatccgaactctataaaacttgcccgatgtgcacccatactttaatttatattacaaaaaatatatatatatataaaaataatagaataataacaagacgaggatcactcattaatattaaaaaaatatctctataattatgtagttaccgaatagatttaataagttaataaagcactaaaataaatatcattttttttcactgaatagagaaggggtatataattttagtaggtagtggccaattggttaaatacaattttggatcctgtgttttgcaaaaattactaattggaccatctgttttgttaaatgacaaaatagtaaaaata

SEQ ID NO: 115363 - DNA, 4552 bp, Cannabis sativa
  modified_base (4503)..(4522): a, c, t, g, unknown or other
gtttctctagggatggaccacgtttcaagaggtagtcgttttccttagataataaagaggcccacactgggactgaggggaggatcgaaggatatacaaatattcgctcactttctataattttacgacaaaacttatcatttctcgacgatctgacgtactctttctcattccggtgagcaaggtttgaccgacgatcatcgcataaccatagacacatgaagtatttatttatatttcttattttcttttctacttcgcactataagtttattaacttgatcgtcagagtgccttcgaccggcaccaccccggtgtcctaaggtttcatggtcatcctttgtctttgttccgcaggttgtcggtgcccacaaacgctcattccgatcattgtagattttagcgtctacaattattaataattttttttcgttcaacaaccataaaaataggcattggtaaatcgaacaaagacaatgcgcaatccatttattctttatctccctctacatttattactttcttctctcatttatgaatacaaatggtcactctcactttataattagcttccatgagatgaaactcttaatttattctcttgtgtgtactgttctgtgttttcaaccaaaaaaacaccaattaaaccctatggctaaggttaatttagagatttagactaaaccaattattagatgagtacaaaatataagaatatataatatatacttgttgttgttcttcttcttcattaggatgaaatcatgggtgaataatattattcaagtcaagataaaggttaactcaactctgtttgtgtttttgagcttgtatctaagtatttattctctcatttagcttcaacgacatttgctactaattttggatacttttacactaaccaagattcagtcactcccatgtctctagtactctagcacatctttatatgacaatagtttgatataattaatgtgggtatatatacattgtatatatgcacagagagaaacagaaatatggagaagattgaaagccaaaacacaaaagaaagagagagttgacaacctctttaaaatgcaattatagtttcacttttccaatgtgttaaagatttacatttcgtaataattttaaataaaaattcattcaaattcaaaaacaataaaattaattaaaaatgttaaggaatagcatcttttgccaatgtgctgtattagcattatgccctcaccaaattgcagctgctactgctgcacacgattgcagccaattccttttctctttactgctgaattatcactcgtgtgttatttttggattgctgaggtgtcacattttcttacctgtccttatcattgcaatcattacgaaatcatttctgttagaatatttcctttgtattgtttacaactgtaaagagtcgttggatgtatttcctttgtacttatcttgtaccaaattttctataaatgcatttactctgactcatattgaaaatgagctgagaattaatcaaatagtgaataccctattcttaacttggtatcagagcaagcaaaaggcctctgccatgtcgaccccccaaaaccctagaaatgacactccagctcccacaatagcctctgaaggatttgttgtacatggttcaacaaccaacagaaataacacacaaccattaccgtcacaaaatgtccatccttatcctcagcaacttacaaccatgaatcaacccttcagcttgaagctagacagaaacaattatactatgtggaaaaccatggtttccacaatcgttcgtggccatatattacatggtcatctccttgacacacagccatgtcccttggaatttttactagtacaagtcaccactgctgatggagaaatcaaggaagaaactcaggttaaccccgagtttgaacattggatcattaatgatcaacttcttatgggatggctttatagctctatgattgagagcattgcaactaaggtaatggggcctgccttagctgcagatatgtggcatgccttggatagcctatatggagcttacttcatgtaaaaaatggatgacactcgcacactgattcaaacagtgaggaaaggctcaacacctatggcagagtactttcgacaaaagaaaaattgggcagatatacttgccttggctggggatccctaccctgaagcacatttagttgctaatgttctttctgatcttgattttgaatacaacttggcaggagctccaggacattctcataagcttcgacagcaaaatcgagaggctttaaactctcaatgttgtaaacaaagcatctggagctataccacaagctaatgttgctgctaaaattaactcaggaaactcaggtggttgtggtcgtggtttttaacaccaaaaccataactacagtggtggtggctggttctcgaataactgtgatgatgtaggaaggtatagaggaagaggatgctccaatggtccaaaacctacttgccaagtgtgtggcaagtatggtcacttcgctgtcgtttgctacaactgctttgatgaaagcttcatgggagaagatcctaacaacccttaaactcaaggcaaaactagacaaaacagtcacaatgccttcattgccacttctgaaatccttaagaatgatgtgttgtttgccgacagtggagcaagtagccacatcacctctgaagcatctaatctgagccaaaaacaagagtacactggtaaggaaatggtagctgtgagcaatgataacaagctcagaatttctcacattggtaatggtgcgttaaacacacaaaatggtgattatcttaagttaaaaaagatgttgcttgttcctaaaattttaaagaatttaattagtgtgtcaaaactgactacaaacaatgatgtgctaattgaatttcattctaactattgtttggtgaaggacaaggtaacaaagagggtgctgctccaaggggtgcttagagatggcctataccagcttgtccagcctcatcttcttccaaattttgcaggttcatcttctccaaagtcagaaaactttcagtcctttgttatgtcgactgtcaccagtcctaagtgtttgtgtgtagctcagtctcgaactaaaaatcatgttgtgtctaaagccgatgtttggcatagaagattgggacatccttctcttcgtgtgttgagtcaagtccttgagtctagtcatgtaactctttccaagaatgaaatgaaccacttctgtgatgcttgtcaatttggcaaagcatgtgctcttccctttaatttgtctcaaaacaaagctagcactgtgcttgaactcatacacactgatttatggggtccagcccccattaactcgaatacaaatcacagatattacatacattttatggacgattatagctggcttacctagctatatccactcaagttcaaagctgatgcattaagtgcttctgttgaattcaaagccttggtagaaaacaagtttgataccaaaatcaagtgcatcagaaccgactggggtggtgaatatcaacccttcacaaatttggttaaaactcatggaattgagtttcaacactcatgcccacacacatcagcccaaaatggtcgtgctgagcgaaagcgtcgacacattgttgagatgggacttaccgtccttgcacaagcaagcatgcccttaagatattggacagatgcttttgctattgctgtgtatctcataaatcgactggcaacactagttctgcatagcatctcaccatttgaagtgctgtttggtagaaaacctgactataagttcttaaaagtatttggtgtttcttgttttccatgcatctgaccctaccaatctcacaagttccaattccactctataaaatgtgttaatatagggtataacaatgctcataaaagctatgagtgtctcactcctactggtaaaatctatatctcatgaaatgttgtatttaatgaattggagtttccttttaaatcgggtttcctcaataattatcaaacacctccgcctgtaattattcatagttccacctggtcttctttgtctgtacctcttactgatgttaatgcagattctccttcccttggccaatctacactagcagatcgagaagcaccctcatcatgttcctcttcatttcattgaaattctgatgatgtgcctaatggggagcaattttatgactttgatttctgatgttggtacacctgcactcactcaagctccaccactagaattatccccttctccttcaccaaatccatcaccatcacctctgccacagcaacaacaacaacaacctattgttcaaccaaaggatcctgtcactcgtcccatggtgacaagagcataagcatgtatattcaaacctcgtatccttctcagtcatgcattaaatactggtgatactagtgaacccatgttgggttttgtgccctaaataaaacccattacnnnnnnnnnnnnnnnnnnnntagaattttgaagtgatttatgattacatg

SEQ ID NO: 115364 - DNA, 3466 bp, Cannabis sativa
ggggagaagaagtacgccacgaaagatgccaacttcaatgggttccaaagattgtacacccttgcgcaatgtacaccggacctgaacgcctccagttgccgtacatgtctaaccatggccctcggagagctccccacgtgttgctctggaaagattgggggaagagttctgttgcctagctgtaattttaggtacgagctctatcccttttacactcaaaatgcaacaacaccaccacctgcagcaaccccattgccgccgccgcctggtccatctccatctcctcctcctcctccaggtttcatttcgagttctaaaggtacgaccactggtttcatctactaatttttttttttagttttatgtattatgctaatttatgtttgtaaatgcgcttttattttctgaaaatggaatatgattttttactatgatgaaaagaatatacctgttgttctaagtggataaagaaaaaacttccgtatatttaacgatttttcttgataaatcacataaatcaagtctaaccactttacattttttctcatttttgttaacaacactttaaattaattttgatacaaatattttctgatttcttaggtaagattttctttttaactattttaactatactaaatacggcatttttctaattctaataacaaacatataattctaataaggtttcatgttccagtttaataataaaaaaaaggtttcatgttcttttgttttctcactcttttcaagtcctgtccgtggcgtcaattaatttttgtcgttttttgtgatgctgtggcatgtggcatgtggcaagctccatttcatatttcataattactggttattgttgtcatgccactcatgttttgggcaaatatatatactaaattgtattatatattaacttcatccccatttgtgatggatggctctgttctgaagtttataatcaagtattaatgttttcccaggaaatggaaaagtctcagcccgaacaatcgttgtcattgtcgtcccaattgttgttgctctgctcctattcatattgggattttgttttctaaccaagagagcaaaaaagaagcacacattgggtaaaaaatagatctagatgcccttaatataatatttaaaatttgcaaaatgtttttgtttgtcgtatcattttaattagtgcattttttgttcattggttatgtacgtagctgaagggcgtgatgatattactacccctgattctttgcaatttgacttggctacaattgaagctgccacaaacaagttctcagctgattataagttaggtgaaggtggatttggtgaggtttacaaggtagaattttcaaataatttacatactcgttgatatatacgctgtcgttctgctttagttactcaaaacaagtatttaaaattcagggcacacttcctaatggacaacaagtagctgtgaagagactatcaaaaggttctggacaaggtgcaatcgaatttaagaatgaagttgtagtgttagctaagcttgaacacagaaaccttgtaagattgttgggattttgcttggaaggacaagagaagttgcttgtttatgaatttcttcccaataaaagccttgactcttttttatttggtatgtactgtcttattgttagttacaaattattttcattcttactcacattgctaggtgcttacacattttttgagtaacctttcaattcagacgctgaaagacaagaagagttaacgtgggcaatacgttacaagattatagcaggaattgctcgaggcattctatatctccacgaggattctcaacttagaattatacatcgtgatctcaaagctagtaatattttattagatgcggatatgaatgccaagatttctgactttggaatggcaagaatgtttgatgttgatcaaactcgagcaaatacaaatagaattgttggtacatagtaagtttttcaacttgttgctctcttatataaatttagctataacaaactatatacaaatacgatacatattatgcatgccatattggtggcgcagtggttatatgtctccagagtatgcaatgcacggacaattctctatcagatctgatgtgtatagttttggtgtattgatcctagagattattagtggcaaaaagaatagtagtttctatcaaaccgactatgctgaggacctcttgagctacgtgagtatgattaatattatatgtaattaagaaatttcttttgataattatgatcaaacacgattattattcatgtgaaattacaggcttggaaactttggaaggagggaaatcccctgaaattattggatccatcattggaacattcttattcagataatgaagttgtgagatgcatcaacatagggctactatgtgttcaagaagatccagaagaaagaccaacactgaagacaatagttcttatgtttaacagttgctcaatcactttggcagcaccgaatcgaccagcattttacaacagaaccgatgcagacatgccatcaatgggaataagccttgatgactctagaagcgatgactttccacaatcgatcaatgaagcatcaataactgatttatatcctcgttaatttgtgtatatttaagtagaaaacattaaataaaatgcatttattacaattttttattgtgcgactggtcttttctgatttaagagttaaatttatttacagattaacttaattataaatattctcaataatcagatttttttgcccttactatattcatttttttcccttttcgaatattttcaatgtgattaagcttaagaaattaatgctgcgttcatgtggtgttctcttttatatgctgtattgtttattttatgttgcattttaattttataataaacaaatagaaagtatctattagtttcaatctaattttaattagattaaaaaaaaactagttaatattatatagaaataaagtatctatgaacttaaaccaacaaaatcgctatgacattttattttgtaactattagatttatactctaccttaatttaattttcgtttggtttatttgggtattattaattaaaaataattagaaatttttagaaaaagaaatatataaaaacacattttatttacataaatacttttacaggataaaatatacttttatactttttatatacactttatactttaaaaaaaaataattaccaaaataccttttcgtcacatatcaaacatgcacatactaatgtcattgtttattatcacactcaactctttttctttcagttctatagtttttctttttatttttatttatcattagaaaatttgactttctatacatttattgacttaaaattaattccctaaacctaagttaacatttcataaaatccaattctacccctcctatttcaaatacctctctctctctctctc

SEQ ID NO: 115365 - DNA, 1312 bp, Cannabis sativa
catgaaaatagtatttttgtaaaataagacaaaatatcggggcgttacaaaccattacatttttcaataaaaaattcccatcaaaatgtaatcttaattagtttcggatcataaaattaacaattaattaagtaatcccgattttcaaggaatttttttttttttttttaattttgtccatataattgtaaaaccacacatgtgcttgatgaagataaaagtaactaaaacaaagggaaacatatcatctagctatagctatagctagtacgtatcaataccttataccttataattcatttatttattatatatttaaaagaagtttacctgcccttacccaagtaaaaataatcaaggaaattaatgggtgaaaaatacaagtatatataatattatgaatgtagatgacatataacttaattctgggccatgtatcataaagagccatcccatgtgcatataaatataaataattaattatatttatataaatgtatgtacacagagaactaatggctacaagacaaagagcatatatataatataacattaaataaaattgtctctagacccatctcatgccaaaatagatagagaaaagggccacattacgtacagctcggccgcatgcaatacattttatttcttttagtggttgccttcaattttacgtgtcctaaagttatcacagaaaaatggtggtgggcctatatataatatatacttcaatatacatatgtcatatataaaagaaaaacaactaataaatcagtcttccatccatttattaaatataatcacaaagagtacttaaaggctttagcttaattaactgaaacacagagcttacagtataagctacactcttatttatattcgtatcttaattttgacggaataattaaaagagcttagtacttattactttttgtcaatatgattcgatcttatttatatatataattataataattaagaagaggcttgggaatgaagcgatgtatatataggtgatatgtaagaaaaggtccaaatggttataagattaaaagagaggtagacatgtacttttacatgctcccaaaagtgttggaaacatttcagtcactgtcaaaggatatattgggaaacaagaaaaagaaaaaactactggaaagacaccaattaaactaacaaacacaaaagattcttatttttttataacctcatgttagagattttataacaatggaagaaaatcaagatttattacaactctattgtaaaataatacaaggactaaaataagagattgattaaatatatgcta

SEQ ID NO: 115366 - DNA, 1322 bp, Cannabis sativa
ttgataatattataaactataataaactataatatttagatacacataataataatttcacctaataactaataatatttttttttaatttttaattgtattactttaaataatataaaaaaaactaatataaaatttaatatacgtgcccgtacgtagtttttgctagtatatatataaggcgttggttaaataaatattttgttttacttttagtgaataaagacgtgactttaatttggtcgatatattcatttatttaaataaatccacctcagcttaattattattattattattatgtagatagactgttatgttggtatagtggtacgtacaaaattttgacttaaaatatataatagttgactacaactgtatctgtatacatataaatattctttttcccatagttattaattagttcagtcaacttcatatagaattcaaagtgcagtacggctaaataccaaataaatcattttttcacatatattggaaaatttcatttttaatttttaaaaacagatcatataataaaatttggacccaaaactaatttataacaaataatactaataatttttgaagatacttaaattaccttttaattaaaattttccaacttttgacttttctagtaaacaaggataaaaggagaagttcatgtaatcaaaagaattatttggtaaaaattaataaagatattaaattttaatatgagatgttttattatgtattgattgtgaaattttttaataaatagaattggattgagttgcaaataattataagtacgtagtatttacgatcgataagaagtttagttaatggtgttattatcacacaggaaaataagaagtagactcaaataataatacatatgaattgtacactatatatatacctacaatattattactagtaaaaaatattaattatttataggagtaatatagttcactttttcagcctcattaattcactttctgtgtgtttcatatatatatggatatggataagacaatgtgtgtatatagattataggcggtgccggtgattaagtttgacatatgaagctctatatatatgatcttacttatacatatatagcatgactcactttatttctaatgactttaagattttttttcaaagtctagctactacgaaaacaacatcttaattttcaaatttttggacctatatatattttcattgatcaccaacccccattcaaaaccattcataattttcatatgtgaaataataatatatgttaatacttattaatacaaacataattataaaaaaaaaaaaaa

SEQ ID NO: 115367 - DNA, 1375 bp, Cannabis sativa
gagtggtgtactcgtgtataagagacattcattccttgggtgtgaggacctaatggaagcttgaagcggggacgttacatgtgagttgttacatatgagagttatagaattaatggggtaagtttctagctgttagaaactgttacaatactcaattatatcacttaaatgggtattgggacgttgggaaaagattgaactcagagaggagttacattttgagttctctggaaacagttgtttaatagttatttttatattgttttatggttgttttcgaacatctgaaaccagatttttgaaaaacattcataaacgtatataaattaattgagcttgttttcagttctcttgtccaacatttttatcccattaaacaccaattaaagtgttggtaacagccacgtgatgaaagaatttgattttcaaatgtgatcctcaaaaccctataaatagaggtcttgagtttactttgggagaagaagtttctatcaagactaacaactttggaggtctagcatgttgctgcaaagaaaatattaattagaaaaaaaaaagttagacatacctacttaaaggtattggaccaaaatcgttccaacatcagacacacatcgagctaatatcccaagttaataaaatataataacatacaataataatcggactaccatcaagttatcgtccttaatttatatcgaactacaagtaaaaaatatcaaacatcaacattgcaattataatcgaacctactatcagactcactcgtaccacatcagacacatcacaaaattaaaaacccacaaacactaccaaagctacaatcaggcccatatcatcctctatcggacctaaagaattgtatctcgacctaccatcgtcccaacatcatccaaacaaaaatcataattatacaaaaaaaaaaaacaacataaatattacactatcggaccacccaatcgtcctaccatcgtaccccatcagatctaacccaaaaccctcaaaaaaaaatgcagatttcacttagaaacacccctcttcaacactttaacaaaaaaattaaccaaaaataataaatcaaactaaaacataccattcatttaacaaaacaacaattccaaataatatttataacaaaaatggataatttttttttaaaaaaaaaaataaccttaaacattagagatcgacttctcggttcgtgggtggttagggaactatgttggtggcactcaggttattgaggaagtcaggtgatggcgcaagttgtctgtgttagacatttatatgtataatataaaatatatgtatgtgtatataacatgcggaataaataaacatatacactatatgaatataaggatcgaaatacctc

SEQ ID NO: 115368 - DNA, 2670 bp, Cannabis sativa
tggtaaaatatttccaacaaacctgggcgctcggcccaacaccaggtcaacctgggcgttgggctttgttttcaagccttcaggtttgtggttttctccttgagttttcttgaatcttcattatttctaatgaaggaaaaaattcgcggaacacatttttgagaatttgattgtaaaatggtattgtcaacttgggcattgggtcccagttttggccccttggaagttccgtttggtccctagaaatagttaaatcttgatatttgatgaaagtggagaacatgctcagaagagttcttggaaaacatcattggaatcagcccaagttgataaaacgttaacttggacattgggtcagccctaagtgttaacttgggtgttgggccttgcttctggcgcccaagaagagttgtttcttcactaaaagtacagatttccccatttttgatgaaatcaaagatgatgcaaaatttggattgtcactttgatacttggaagtcacctagattgacaaattgtcgacttgggcattgggtgcccgagcaccaggtcctcaaaaatgaaatttcccgtgaatctgattttgatgcctcaaatatgttcgtggtatgtctagttcatgtccaaatggaaattttgacccattttcattaacacggtcccgaaaactgagaccttagttaggatgtcaaattgggtgctgggtgaaaccctagctgctcaagttgacttctgaggtgcaggtccatgtaattttagctcctagggccttgatctgattgctccatgtcttcatggttcaaatattgaaatatagtgagtttgaaacaagttattacagtctgaacttccatcctggagttcccaaagtcaacctaggcacaaggctagggacccctctaggttgactgttatgactcagatctactcaactccgtgatgttaccattctttccccttgtcaaatatttatgtccatgtcatcagagaaagttttcaagttaacaacaatatttgtaaaaatgcttatttatcattattgttttggctgggagtttcgaccgatgtgagtcgatgaacgcaaaagtatttaataatgattcttatgtgatctaacaggcttaatcaagagcttgttgggatcaagggtgatcaggaggatgagaatcctcgaccaccttagaattaggaagcaatgtatgctctcatgcaagagactatccagctacatggtggtttgataagggaactgagagagcagtaggcccgtcttgttaatgtacacattcccccaacacctctaattgtgtcataagatgtgggttattgtctagaatcattttataagtggttcaagaagcaaaatcctcctatttttaggatattcctgacccgttcaaggaaaagtactggatgagcatgatcacttctatctttgattttatgagggtcgaaggttatgattgcctagtgtgtgtacgatctttatgttacaggaagattcctagatctagtgggagattgtgtcctaaggtcatgacttgaatacaattggatacattcagagctttgttttatgaaaagtattataatgaatctatccatgttacaaaagcaaatgagttcgtacagtggtccaaggtaacatgtcagtgaccaagtatgcctctaagtttgatggcttagctaaattagcctctaatgaggtggacaatgatgcctcaaggaaggaaaaatttattcgagatctagaagaacacattgcccgagatgtgattgtgactgccaaccaacttggggttgtgcggttttatgctcaggctgttgagttggtagttacggctgaaggggctaaggattagattccaaagaaaagtactatcaaaagagattcgtggaagacaccttccaatattggtttttgtaggggttttagccccaatgatcaaaagaggaaaccaaatgaccctctaattgcaaggtctaacaagaaatttcaagacaaataagacctatccagaatgtatgagatacaaaagacgtcatttgagcaaatttcgtgatcaattttgcttccaatgtagggtagtaggccatctaaagaggaattgcccatagttaccaaaacaagagataaagaaagatgatgccatggttcttgctcaagtatttactttgacccaaatagaggctaatgttagaccttccactgtgacaggtcatatatctattgatggcactacgtttacttttttgattaattttggtgctacacattcatgtgtcaagtaaggtaattggtagtctaaataggccatatgatatattttcaagtgggtttgctatgtttctacatactggagaattggttatctccagcaggtgggttagagctcttctagtacatgtagaatgtatcgaattatcagtggatttaattgagttaaacttagaagattttgatgtaatagtgagagtgatttggttagccaagtataatactaccactgattgcaaaaggaaaatggtgacgtttaaaccggagggtgagaccccatttgtatttgtgcattgtaatatctcgataagcctaatggtaaataattaggatttatatttatattatgggttaatcagaaataagtagaattatgatcctactaatttatt

SEQ ID NO: 115369 - DNA, 2354 bp, Cannabis sativa
atcataaaagttatcatatcctacaaatattagttattatttgtttagaaaaaaaaaaattaaccaaatgtaagcataaaaaatcaaattttccttatgaaagcatctctaatggtgtctttctttaagaatgtcaaaaaatttcaaatcacttaataatatattattttattttatctctctttcatattatttttaatactttttattctaaaatatttcaatagcaaatatctctaaaagtacaaaaataatattatattattattattttatatatattaaacgaataatttttctttaattataataaaagaaaagatataaaaaaatactataatatgtgttttgtagcatttttttttactctaataataaatattttattaattgaaaaatattaaaaaatatcatcaaatatcctttaaagcatctccactaaaggttagttgagattatgggtacaatttaattgattatgttttcaataacttggtggaattgaattgaatgaagacagttgtgggagttgggcctggtcaccataaagatgatttaccttcttctcctcatgccaactcattccattcaagcactcgcatttgttgaggttgaggcaagttagaggaacctacatctacttatctcatttcaccatatttctccaatctttattggtctgagaaatttttatcataatttaataattcaaaaatttaaagaaagaaaataggcaaagatacacaaaactatctctaataagagatataaaaattgtattatatttagcaaaaaataaataaatttatgttatatttaactcattatctacaattatactttaatgcacaaggcctaaaataataaaaaaataattaattatattggtcatttaatatttaattgagaatgtataaaaatatatttttatatttttttattgtttaactaatggtaatattgaaaataaaaatgtaaagttttttaaaagttaataaattataatatttagttatattataataaataaaaaattaatatggattgtgggctaaatttgttacaatggtaaattttgtgtcaaatttaatacaacttttagcatgagtaaaatttaggaatttttataaaaatactaaattttaggtaaaaatttacaattttaataccgttttacaaaaatattatcttcctataaaataacttaaaataaccgtaaaacaacaaaacagaacaattaaaaacaacagtagaacaactaaaaaataatcgtagaacaacaataaaagtttaacacaatacataatataaaactcacagtatttttttaaaaaaaattcaccccacaatacaaaattagaaaattcaataagtgttataaaaatttctgaattttaacatagtttttggaacaatattggaatagtaattttttaaaagtatgctaaatatagcaatataccatctttttaaacatgctctaacataatactactcgtgaacgaaatactgatgaagacataactaggaaagatcaagactaaaaggatgcagtttctcagaaagaatgagtctagactgtataattgacaattttgaaatgtcagtggacaaattcatagatgagaagtggattttttatttaaaaaaaaaaataataataaaaaaaaattacattatatattcattttctattttctattttagtttttaccttttttttctattactttttaatttatacctaattttataaattatattctcattatatgtgttatagactctaatttaataaattatgtgaggttatatatgatactttgattataaatgtaaagtctttttttggcaagttagatgtcaaaatattttttaatttatggtaagatttatttgcattcataactgattttcttaccttatttattcagtttttattgctcttttctatgttaggaaagatgcatttttcagctgctgaacttttcttgtatggaaacttcttgtaagattataaattctcttatggaaagttgtctatttttgggaaacttgattttccctttttctaattgatgatttcgattttgcctttattagaacaaatcaaattatctttatttggcaggtttgaagtccaaattcgtgatcttagtttaatttgaaaagtttcctttctagtcctgatctgctagggttgagcatcggtcggtttgatcagtttttttctataaaaaaattcaaaattatgttttcggtctggattggtgcaatccgaaaaaccgaccgaccaatccagatcttaaaaccgaccgttttgaacctcagtttggtcagtttaaaccgcccaa

SEQ ID NO: 115370 - DNA, 1023 bp, Cannabis sativa
atttatcattggaagagattactatataaaaatatattttttgttggtacttataagtgtatctaaaccctatcttgacaaattggttgggctaccttcagatccagatctcccttcaatcaaagatcatcaccgggcccactccaactcctaggcccatattcattgctatcatgaggtggcatcttactaattattagcaattattcgcggtgcaattagtgcgcgttgtaattttttttttttcaaattaaactgaatatgcggtttttataatttttcaaactgtaaccgcacagtgagatcttaaaaccgcaaaaatcacactgcataaatacaatgtggtgcagcgcgatttgagcggtttacactatcatcgttataaaatattataatggaaatttaaaaatcaaaataataaagccttaccaatacaaaacaaaaaatcttattaaagtcttaacatcatgtataataattatcaagtcattatattgaattatctctaaaaaaataaaataatatgtacatattatatatatttgttcttatataaaaaaaataaaaattatattgtaaaaattagtaactttgtaatgtatagtgcagtgtggtttgaactgcaactattaaatttaatgtattttatatttatttatcaatttttgtttgttaatcaatttaatgtttatttttaaattgttaatatcaagttttttttttctattaaattgatatatatatattttttttttttaaaaaaaagaagcaataaaattttggtcatccacatgtcttttttaactctttaacataatggtgataacggtagacattaaaatgtaacattgggtggttttgccattaaaaagaaatttaaggtatttaagtgtgtaaatttataaacaataaaaatttataacgcaattactcctacaataataagggtaaatactattttaaattttgtgttttgtaaaagttactaattggaccatctgttttgttaaatggcaaaataga

SEQ ID NO: 115371 - DNA, 1372 bp, Cannabis sativa
actttttatgccatatttatcataaccttaataatttttcccatatttttgaaaatagcactatccaataaggccttatacccaacagggattctcttaccccaaacccgtgggaattaagcggggcgagggcagggatggggagcataaatggaaaatgaggacggggttaagaggtacataacccacttattacctacccaatttctatccctaattctaatactttaaaatacaataaatactaatttacttccatttcattaccatccaacgaaacttaacctgagcatccctaatgactctttcaattttattagctaaaatagctaaaatgtcaaaacagaatcatttttattattattgctttaattataccctttattttaattagtatttaattgttttaataatattttataattttaatttgttaaatataaattaattttataaaataataatagtaattttattaaaatacaattaaaaaagtttagaaaaaaaaaataggaaacttcctctatttagagagctccatattcattctctattatagagaactattttttgaatggttaattttttcgaatctcactctatattttagttaaagagtgtgttttgagaataaatcaattacattggtgtagatgagtcttaaaagctaaaacgtcacaatgatagctcttaattctaaactaagttttgataacctttaacaagatagtgacaatagtagtagttagtatgacctccatattgtaaaagtactatataacaaagtaaatgtaacaaaagggtgaaaatatgtcactaaaaccaaatatatatgtatgccataatctccaatggaataaagagctagggctatcccatgttctgtgaatgagattgatttgaatgaagaaaaaaaaaaacagttgagagactgaaatggcccaccaattttgcggtgccggggagagccaataagctatggagaagaaggaatttgtttcaattttggagatgatggtgacttggcattttgggagattagcacatgaaccccatgttactcttgcctccaaaccctcttctaaggccaattctcctttttcaaacgtccttatttacgtacccaacttttaccaaatgggtaaaaaccaaaattaaaataataactgtaactgtttctgtttggaagttggaatctttttttttttgtttttgtttgtttggttgatgggaaaaaaagggtagaaaacataaataatattacaaatagagtaatttgcggcaaaatcccctcaactatcaatttacttgcaaaaaaccatcaaatctcatattttggtgggaaaaccctccaaagtactgtttcgtttac

SEQ ID NO: 115372 - DNA, 2162 bp, Cannabis sativa
  modified_base (585)..(609): a, c, t, g, unknown or other
aggactattactgctattatttttcgaaattgttggaggggactacttttatctgtatcaaactgaattttttgaggacttttgacacaaatttccctaaatgaaaactctcttatttgagctagacttgtcttcatatattttttttttaacaaaaaatacgtgcatagatagaaattagacctcaggatcattacataaaatattatttggaatcttcatatatatatatatattgtttttcaaattattgtcgatgctaatataggagttattaagctaaatcctctcaaatattgattagagagttcctatatagaagacttaaaattacaagagctgtcaatctaaaatgtatccctacaatacacccttgtcacaatgtacttatctttaattaatcatcatcacctccttgcaataatgcatataattatagacaaggtataaataatgtttagtttcatcatacaaaactgtgtaataactagtcttccactcacacaatacaattataccataatacaagtgtacatacatatatgtatcattattatatgacatgtataataataataataatannnnnnnnnnnnnnnnnnnnnnnnntaataataataataatatcttatatatattatattataattaatagtaataaaagatgacatgttgaggtagtattagtagggtttatggcaaccctagctagtagtgcacctggataataaataaataataaagctataacattaaaaagtaaatgggcaatttagttagtaattattattattattatcatttattaattaaaaacaagagatgaaaaaataatgcaaggatttgaactttaaatctgacaatcacacacccaacatctgaaaaataatttattaggagatttcgtataattgtattaagggaaaagtatatattaatttgaccaaaaagagacctttgttattatatattaatttatatatatatatatttgttgaatgaaaaagacttgttatattggtgaaagcatgattcctgtaagatgtctaatttaatttaattttgtttatgctgaaaaacatgggtacacaagtcatacatatactgtatatatatacatatattctgcataataattaatttgtttttttttaataatataaagtatgggcatatattatttgatcataataataattaggtgagactcatggttttaaggaggcttctctttttgtcttctttatgctctccactatttctagaactatgctttaattttttatttatttttttgtttagaaaataatgttgataataatttattaataaagtttaaataaattgacatttatatatgttactaattattatgtatacactatatattccatgagaccaaatagggtttggggctcaatgaatcaaaaaatttaagaccagaaaatgccaagaaagttgtcctaattaaagtcacattccactatatattaacacttgatacaaaatcgtctagctatatatagggacattgtcccattaattaatatatatatatatacattttatttatttatttattattttttttgaaagaaaatagtaacttattaactcattaataagcttcaatcattacaataaataaaaaaaatcaacagacgcaaaacttttactgaaaataagatctgaatacgaacaaaacaatacacaattttatttatagaattttatttatacaacgtttaacaaaatataagttgacaaaaaagtaaagagaccaataaagatctacattcaaacacaagttgactaaaaggagaaagcatatccataaatatggtgggtgattgtttgaaccacaactaatgaatcaatttcgagcaacactctagaccatccttttcgcttaatccgactcaacgcctccaattaatccccacaattttagctatagtcgcatccacacaaccgaaatgacagacggtaaaaatttcaataaattgctaggataataggcattaaagaagctttgagttggattgcaactcattcgtgagaaaaaatcatgttggaaacagatagcttggtgtgtgtcaaagcgattcagagcggtatttttatgccttcacagtttagtcttattgttcaagatgttcgaa

SEQ ID NO: 115373 - DNA, 1435 bp, Cannabis sativa
tgggttttagtgacacacattaagagactctgaatctttttagtgacacttcactgcgtgtcactaatgtgggtgactggaaaagcagtatttagtgacccttcagattgggtcactaaaccattttagtgttactcactgcgcgtcactgtagccttttagagtctcccatttgtcagactgcaaaaataagagtgtccttcccagagcgtcactgtatatacatatatttctttttttttattattttttaattttagctgaatatataatattttaataaattatttaataatttatttatttggtgctaaaattaaaatggaaaaaaaaaacacgaaatttacaatttatttttacgctgattataccaaaaaaaattagaagaatagttttttgtaatctcactaggcaataaaaaaggaaaagaaaaatctccagatctgaaaattatagagacttcatgaacaattacaatgatacaaatacaaaaaatgtacacaataaatctatatactcgagtacaactgaggccaccattgttcctgcaaacaagaacaatttttcatgaacagaaaaactaaaatttaagtatctccacaattaatttctggctgtaacaagtttttaggcatgtaaaaacctaaaaaaaaatatacaaaaaaaaagagaaaatggatctggttgttggtgtagctcagatctccatgaatagcgactcgtctagtgatccacggcagagcgagacggagatgggaggaagaagagcacgacttgggtctcaaactttctgggacaataacgacgccaatacagtggggggtcttcgttcgagtcttcaggctgttgtcttgggcgttgctgtggggcagcgaccgacagtggagctgagctcgcacaaagaattgagaggaagagaacagattggtgggctgtcgtcgacgatttaaagagagaaaggttgttcgctcatctggactgagagagatgaacgcagaaaatgaagaggcggctgagagaaatatctggacttagctgttaggtttcttttcatttgagagttaaaatagtttattttttaaaaaaaattgaaaggtaaagtgttggtgtgttattaataagtagtgtacacgtgtgtattattatttttttaaaaaaagacattcatttttaaagaaaaataatatattaactataattgtttttataattgtttttttattaagtagtgtacacatagccatttttttttgataaattaaaagattttcttaatacatgatatagtgacgcgccaagtgtgttggggtatgtttacccaatctcgtttggcgtgtcactataaactaatattttttttaaaaaaaaataatataaattatgggagttactctttagtgacacctcatatttttagtgacatgcattatgggac

SEQ ID NO: 115374 - DNA, 2624 bp, Cannabis sativa
  modified_base (27)..(42): a, c, t, g, unknown or other
taggatgttaatcaaacatacttggtnnnnnnnnnnnnnnnnggtaaaataattccaacaattggctcatgtagaaatgggagcacaccttccactaaggatctatttcgtggagttctgcgtggtagctagaataacgcccttttaattcatcccttaagtgtacaagttgcttatacgatggtatgtgttatgcaagatgaagaacatttaggttcccactccggaggaaattttatacttctacaagatcaaacccaaaaaatgtagaagtataagcaaaagattagattttaacggcttgagaggtattccaagtctctagttggcccggtaagctccgtgaagcacactcatgactttcgggattactagttttataccatagatttcccacggaaaagggttccttactttggattttaacactataagtaagtgtagctatcgaaccccttttttctttccatgttggaatctaaccaagtctatcttttttattctattagacagtattcctcgtccagctaagactctctttttgaagattaggcgaattttataccaaagtttttcaactaaagacttgcaggtgggaaaaattaccacctcactcaacctcaagaaggctggtttacttgctcctcaccaaagcatagactctttccacgtcaagggctcacttaaagactttcttcgtggtgatcctctagagcttaaggaaataattgtagagatcgtcgctgacaagggaaaaaaggccattaagaaggacaaggaatgactagctaacaggaaccagagccatccgactcctttgagtgaagaggaggagctttaaatctggtttgaggcagtcatctagaacaagggtactctgagagtgagtacctctagaagaggtaatttgtccttccgcttagtttgtgctccgcactttgggaacttagatcattttgactagggggattcaacctgtatcttttggacctagatcatcataggtattctgtaactccatacatcgataggatagatgaaatagtcagaggtccaactcatttcgttctacctgtacatactgttatgaagtaccctggattctatcagtatgggagctttttaggtagggaagatattttcttgtttgcctgtggaatctgtaagtattatagagttaacagtctgaatcatacttgagccttcctttatttttgttgtttatatctttagtttattgctttcacgatattgacttttatgtttcttcttgcagaaaatccccaaactctccacatgggactcattgacaactccttggtgagcatcgcaaaaaggtcctccaaggtgacggaggctgccaagggacccaagggcaaaaggaaggttgtacagtcttccaaggctggacctaaggaaccaacacctccgaccaagggcctggaagctgtttctcaggctctggccttagaacctacccttaactctcaaacttctgtgacaatggtgaaggctttcggatcccaaccttcaatgattgtgatggatgctccttcccatggggaagtagtggaagttgcacttgtagtggcgtctctccaacagttgacaatcttcattgacgaggaggaagaggaagatgaatatgaggaacttgtcttcagagatcgtaagaagtttggctccgctcttggtggagacaataaaagaataaagatgaaagctaaagacaaagtcttacagctagtagctagtaggaagcaaagtttagacatatctggctggaaggaaggaaggtatcaaaagattgagaggttgacaaggaggaactcttgttatggcaaagacatttaggaccctagtcccaacaaccaaaatcttcttccgcaccagttcctccaatgctaaaggagaaaacaagccttccatctctttcgacttcaaagataaacttccctatccagcccgtagagcttttggaataagctcagagccaaatagagtcacttaaaaaattcttccataagaagtatgagctcaaggcagttaaaatcagaagcagatcattgtgatttctactaggcagggtgttgaacatgctgatttggtaaagattctaaatgcttctcttccagtctttgaccgtccggccatcacggagaggctccgaccaaaggttggaactgatatggctccatttttggcagatcttttggatcagactgctaatatatatatatcaagttgggtattagagagacttgctactacggctagtgaggacccgtcattttatggctaattgtcttaaccactaaactactggggtaagtaatttaatattgcttgataataagtttaataatttttatttgtatttaacccttattcattatttcttccaggcgaatctattggttgagagatgttctgccttggtgaataaactcactcttgaagtggagtacttgaaggatgagcggacaagggctgaggggagtagagatgaagcaatcaaggcactaaaaataccaaggctcatgttgatgagttgttaaaatgtagggttgagagttctcttaatgtaacatcctcgcttcaagcctccattgggtccttacacc

SEQ ID NO: 115375 - DNA, 1889 bp, Cannabis sativa
  modified_base (31)..(43): a, c, t, g, unknown or other
aaaccgtaaaaatgtaaaaaaacattctttnnnnnnnnnnnnntaaatattttacaaaaaatagtgtcttatgtaattattccttttttatttaaaatatcttatcattactttttgtttttaacgaaaatattaatatttattttattttatttggtttaatttgtgtgtctaggaatcgtgtacaacttgtagatttaatgtatatttgtttcttaatatatagggaaactttgttgaaaaactgtccaggtacaggtacagtgaatttgtttgaacagaaagacagtctgtttgaacagacactaacttttttttttggggaagattttccatttattgtttgattggtttttaattatttttccacaacctaaagggtttctagaaggatattaagacatcatcaggttgttggttttctttggctcccttggcgtatcttcctcttaatttttttcaagtctagagagtgtttcttttgttgtgtaaggaatttgagtccaacaagttcttagtattttatgactatgttatttttgtatttttttcttagtgaaaattgtagaagttgaacacatttggatatctcattaagtttcgggagaagacttgctcgtgagacactttttggaggaagagtgtaagtgctaccatttgaagggagttcaagatcttagcacttcagaaatttaattgaaagtttagattacaaaagttgtgataaattcaaagagggagtctttatttatataagtcaattcggttctgtaatcactttgaaattattctaataaatttcaccataggcatggccccgtggactagtagcaatctaagaagattgctgacaccacgtataaatttgtgtgttctttactttatatttattttaactttctattgaaaatatatttaaacttatcgttgttctgttcaaataatttttgtgtctatttaaacatcttggtgaaaaaacagtaattaattatataatttggataattaatttgctaatcataaaaatagagcaccaatgggtatcagagcagctcactaaactcttagtgaagtcttgtggttattttttgtttgatttgttttgtgtgtgaaatgtctttctttgtagaacgtagttagatgtctcgttctccacttcttaatgactcaaactatctctacaggaaagttaggatgatagctttcatcaaagctcaagatgagaagtcttatagagagaaattttgtctagatagtagtcaccacctaccgaaaaggtgaagatggaagcacaaaggcaaatctgaacttttgtgagatacataagaagaaaaattatccaattataatgataaggctcttcacgctattttcaatggtgttggagaaagttttattcaacttgttacaaccttacaaaagtgttacagtaatattttcattacaaaatacttatatattcaaaatactgtaaatcagagtcctgacaactaggcactacatactagctgagctgatatgtaccttcatcggggatgatctcttactcatggttgccctaacttgccttttcccttacatggaccataaagcacccgttagtcacaaaaaacttagcaagaaaagcagcaatacaaagttacatacaacatacaatgacaacactactacgcgacggtcctaaaaacgattttttcagggaccatcgttaaacaaattaagtaactatttaaaaccgtcgggaaaaatttagtattcccgacggtttaaaattgtattaaacaaaataggcgacattttttaataaaatgcaattttttaatggacctttataggcggcggtttagaaccgcctatactataggcgactgtttaaaaccgtcgcctat

SEQ ID NO: 115376 - DNA, 2006 bp, Cannabis sativa
gagagagagagagagagaagcgagtggttgtcacgaaatggtgaccattggttgtcttgttaagggtttcgaaaggtctcgaaaacttcaatagaagatattgctagtaagaagctcttaaggcacatctaaatagtaaccaaccggccagaaagccctttaaacgaccaaaccaaaactaccaaaatcgggcccctttcgaaaccctaaacctcatggagaagatatttcgtaataataaaccaaattggatacccataaaaacttcaaagaagggaattgttgaacatagtagactacaagagaaacagagtgaaataacacagaaaactatcggcgccaccctcagcaacccatgggagccactctctggcagtactgggcgatttcaaattacctgtacggaatattgacccttttcataatttttattactacagttgtataatctttttcttacattgtgtagaaagatcaccacatttgacaactcaaatgcttagtgaaaaaggctttgacttaatttcaaaaatccagaaaagtgtctttatgttcacatataacactttatttatgttgacatacaacactttatttatatatactcttttatatgagtaattataatttacaacaacaattcattttgggttttacattgaagatgggatcatgtaaatgaaccaatcgaagatagatgcctaatagtttctttgctaacatatttgtcttttttccttttaagaaaacctaaagctgaaggaatgctattaattccacaacaaacaacaaccctgtgatcagcctttaatttctactgcgcctattattgccaaaccacaatataattttcacgtgatattgtattcacaacgagcaaagttaacaaattacgccgcaacagttaatgtaagactctcttttatattaactacgtttcacatttgtacacagttgacttgagtaacaataacaaccctacaaaatacaaattcatttctaaacaaccctaaagtaagatctattctagtctttccaccatcccctaaacaaactttaattttttgtattgtgctattaatagcttggtagagaagtattttcttatagaatgtatatatattatatatacatagtggcttttattcagttataattataagaaatagaacgatgacagcctcacatgatcacatcatgctgcattgcatagaatagatgagaaaataccgaattatagagttgggtagggcggcattactctctatatatctatataccttatgaatatagatattgataaagttaaagggacactaattaattgtgattagaaatgtgacttcaacagtatctttactccaactaacatttagtttcgttcaactgcaattgtaatactcttgtttaattgcctcgttctttaaacaatattaatatgtcttaaaaaaaatagtaagtgaagcacataaataaatatatattattgttgcttactctcaagtaaagttattattttaaaaaatatatttttctttctgttttgtatgtctaagaataattacatataaaattaaacatggtgagtataatagttaatgagaatcctaaaaaatgggttacaatttatatgcagtactaggcaatacttgaactaattaattaactatggagagtatggagagttttatttgcacctaactaaaatcttaaaaggcacctttttttttcataatttttactttttttatgaaattatatctttaatgtatttttgttttattaattttttccatgtaatattgttaaaaaatatacatagaaaatatatttattcattgcaaaaaatatatatatttttaatattaagaaaaaaaattaaaatacaaaatatgaaattttataagataaaaattaaaaaaaaaataatatataattaaaaaacatatgaatttttcttaagtaattattaaaattaacatgagataatataaaaaaaaaaaaaa

SEQ ID NO: 115377 - DNA, 871 bp, Cannabis sativa
  modified_base (816)..(820): a, c, t, g, unknown or other
aaaataaattccaacaaaaactaccttatgggcatcaattttaacaatctttgcaattttttttcttattcaacgattccttgaaggattagaaattttgacaataactactcccggttgcattgggaattttgaaatttaaaagagaaaaagaaaaggaaacgaaaataaaaggtaattaatatttttctctcttatctttcttttgaaattttaaatttaaaatgactctgtattgacttaggagtaaggaatctaattggtataaattgaagactccttcaattttttttctcactagcttcatacgcctatagagagtaatataaagccagagtcttctgctttcaagtgttcttttgctttttaaggtatttttcaattttttttaaaaaaaaatcaattttttattcttctcccttcttgtagagctcaaattaaggattctagatttagttgtaaatccttaacttcattgttcgggccttagaaaattaaaattacaattttcatatgagtcgtggagttgaaattctcctttcttccaatatgcagtttgtctaattttttcataacaaagttgaaaggagctgttttgagttgaattaagttctgattcagctgatatgaatcgtgtaggcttgcatttgaagcaacagtgtctcgtatgtgaagaactagaaaaagacctcatgaatatgatccacaggtggcccaatttatttttgcaaagctcacaacgcccaagtctaagaatctagacaaggtgttaactcaaacttttcgatctccttgttttgatgattaacaaatatnnnnntattatttgttactaatgatttattgattttgtagcaaatttaaaagagaa

SEQ ID NO: 115378 - DNA, 3151 bp, Cannabis sativa
agaactaaactattattcattcaatgaaataaataaactcacccaagaataaccatacatccttacaagttttaagatcaatatttcatcaatccatagagtgatgctcatattccatcaaatgaacactctgttaacaaaacaaatgctgaagaaattactagacagatcaaagtaaagaagccattttcataccttctgaagattttccgcaccaatactttcgcaaagtgttccatcagaatcctggtagaataaattgtattacaatgaattggctcaaaacttgcaaaataactacatctcctaatgtaagttttttcttaaatagaaaaatcgaagattatatcgtaacattttaacaaacctcacttgaaacaatggagcttgattccgaggaaccattttgctgaagagaacaaaaatctggagctggaaaaaactggggacataaataatttagcctcgccgtaattcttgcacttgatttgagtattggaattttcatgttcttcctgcgaacagcacaaatagtcagatgagcacttaaatggcattggcataatttaagacgaagaagaagacacgagcgaaactagcaaacctttcgtgtccagccattatatgttgtgctgaaccgaatctcttcatccaattctggtattttggactgttaactacagatgcgggactcaaatggatgatacaactcaccaccttagaactctcgggcgaacctgagaagtccgcaaaatagttattgagatgctctgtggacaacaactgttgcaaataagattccttggggcaatctacgagtactacaatgggaccgggaagagatgggtccataacatcactcggatgaacctaaacagaaatcggggaaatcaaacttactttcgaaacatcaaatgcacaacagatacattaagtttcattatgtttctataacctaccatgatatcttggtgatccgactttactgattgcccttcaacaagttgactatactttcgcccaggtcgaacacccgaagctagcgctttctctttgtcaaatctccccttgatttcaggcaactcacatacatatactacagacatatcaccaggctttccttctgaaaccgtcggttgcaaaacgatagctgatattttcacaacctcgtcatcaataagaacaatgggttttgttgagttttgttgctcgggcatagcgtttacattagagccaagtgcgggtccaaagctctttgtattaaccatagcagcattcgggatgaaagacctcatcgcatcaactaagtacttcagatctgatggaccccatacacaaaccttgtatgtgaaaaaacaaattaaaatattgaacgaaaaagtagagaatatcttcttcaattaaatttctaagagaaaaacatcaagccaatgcggtactcacagacaatccttctccaaccccagccaatgtcaaaagcaaacctgcaaaaatcatccttcaaacaaccatttaaagtaaataatagctccataatagctggaaatcgaaaaacaaacctggaaggccgcctgcagtctcggagcatacacgagagagaaatatgtgatctatctgaaaataacattaagaattccaatgagcttaccaacaatataaaggaacctcttgatgaagattaatttcgggacataattttgcaactgaatattgggaatactcttttaattaactcacaccttagacaacttgatcttttgctctgtgcaaaaacgttgtaaaccctgcaacaagaattatacgttaagagccaaataaaaatcaaaactttatattaaaagttaaagaaaaataattagatgaagcgactgcagaaaacaaatgcgagaatagtatctaccccacaaaaaaatgcagtgaaatacattcaagcgatttgactaaagccaagcatagtttcataaaactacgctcgctgcatgatcctacaatgtttgatttactcaactagtttcaacaagaacaacatgaagtgatgtatagccgccattctacaaatgcgctcgtcacccatagcatcatccaatgatgtttacagatccagtattaagggaaaaaaaaactattaacaacacaacacagcccttcaagatcaaagaaattcttttttactattgaagattattagtagccttaaattactgcaataaaaactcttttatttatactgagtagattttgacataatccaatgctgcttttttactaaatacaaaacaataggcacataaaaagttatcaccaaaataatgagatcaatttacatgaatgatttccttaagtacaaatcagtgtagaagacttacctctcctgcattaaagataaatctctgcctgtcaaagaaaagcaacaccgaaggtgatgtatcctgtgtgtccattccagtccccagtatctacatacatcaagtaaagatggcattaaaatccaatcttataaatgaatgacttccattttgaaatggaagaaatgatgaccattacaatacaagatgatgagaaaaattttaataatttttttttatgcattttaaatttgattccatttcattcatattcctcctcccattctcaatcctattcctatattttcattcctccaaaccaaacgctacctaataggaatagtaatggaaacagaaataaacattaaacttaccttggaaaggtctttacttccatttcaaaatgaaatagttgtcccaccaaaatggtggaaaaactattctaatgaaatgatattacaatgctttaaaatgcaaccaaagaatgaaatggaacaaaaattgattcatttctattccattctatttcattacctctctactcaagaacttatagaaacaactactagtgctaacaatattcccaatgcttaatcaaccaaagccattatctttctcaaataactatacataccaataaagttccatccttttcaatataccaaactcaaaaacaccatcaacaaatccaaacataaaagaagaacaaaacactatacctgcaaataacaaatggtattcgaaggattaagcttacgcgttttcaactgcaaactcctcttaggcttatcatccttatcccttcc

SEQ ID NO: 115379 - DNA, 2501 bp, Cannabis sativa
  modified_base (776)..(780): a, c, t, g, unknown or other
aaaaaaaatgataataaaatatttataaatgataattttaaataaaataactaattaaactaattaaggttggcataagaatttaacatacttggagtcgccttcaatgtctgaaacatctttacataaaaataaagctgatcccattgatttaacaaaggctaggatgaaagtaaaaggaggactgaaactcaaattcaaattcaaacacatgatgagatgttataatacatcaaattttgataagaatcgttcagcaagaaaaaaaaaaaaaacacaaaagtcgaattatcccaatgaagaaataattaaaaatcattttacatgatatacctcattaatttaaattggcaacatttttttaattaactttttatttttttagaaaaatgaaaatactttttaaaaacatcttttataaaattgttttcacttttcaattttttaattgagaattaaacttttaaaaattttgaaaacaaaacaaaaaaaataatcactttaaccattttttaaatggtttttttttcttaatcagtattttggtcgactttgaccccaacttagaccttggtacccaaaatccggccctagccccagtcgtggactcggaccacaaccccgacctcagacacagacttgaattcgacttaaataaaattaaaaataaaaataaaattaaaaaattaacaaataacagtggttatagagaagtacatttctatttttttaaaaaaaaaaaaattaaaaacacaaattttacttttatttttatnnnnnaaaaattaaaaaaaaataaaaagtattaccaaacgttcccttaattgctaaaatttaaagtgatcattggaataattttagttagtctagaatttgattaatttctcattttccatgatttttattttttaaacaaaagtacatgattcttcttttattttaacctttttttatttacttcaaaacaaaatctttcatatattctcaatatttaattaatacactatgatgactttttttttttttttttcaaaaattatgagaaaagcaataaaattagacttaacaaattaattacatcgatagttgtctttgaatatttttggagtacaaatattgtaatcaaaatgatggtagtatttatttttctattttctttagcttttttttattgtttaattactaacaaatttattgatatgtgtaatttttattggtattaatttgtggtagtacccacctcatctcaaatggtaggccaaaagctgctctgctagcataataacatgtgaaatttacgatcaccagaccctgcacagtgttatatattttaataaataattacctcatattaaattgatttcttttgaaaaaattaattaattaattagttatagaaaaattatcaaaagttacagttaaagataagaagtagtaaacgtgcactaaaatactacttttaataacgtagcagtgttgctataatattttgtgtaacattcattaattagtcatagtaaagtaaacagtaatgatatatatatataaattataaaatatgctcagccttaatataaaagtgatatttttttctatatatattatttgtgtgcatatatcattacttataataaaataaattaccataaaataactggaaaatgcggtattaggattttgcttccatctaaagggtggaacagaatagagagctccaaccaaaatactaacacaatacagagaaataaagagtggtccacagttcaattttatagttagtatcaacccagttagggccacaattatgctcataatccaagctgtttcaattgacatttcccctgaagctagtggtagatcaggcttgtttatcctgataatgaaaattatattaattaagtgtaatcaatattatagtttaattttacaaaattaaaaatgtagtgataattgtacctgtcgatgtccaaatcggtaatctgattaatgatattagtacacaaattaacgctcaaaataaccatcaaagaagagaatgccttcaacatcagagaccaactcaataaatttgtgttatgaaacaactctctcccaaacaaaccactgttctccaataacaaaacaaaattaatacatcaattgcaatcaagttggtgcacatatatacacttgatacacatattacaaaaatcttattttaattactacaaaatttataacttaaaaataaaaatatggtggactaaatatgttagcattttattatgaataagagtgatgtttagtttcataaaatctaaattgtgactaaaagtcatcattaattataaaggatataggtttttttttagtgacacatgattcatgaataaaggaaattttcgctcaaattataaaggagtttttacatttcatattgaaatttttaatttttatacttttttattgtagggtaaatttttttcaaaaatactgtttttttttttcgaaaatactgtgta

SEQ ID NO: 115380 - DNA, 1763 bp, Cannabis sativa
  modified_base (1608)..(1621): a, c, t, g, unknown or other
ggactttgcgtggccattgagggaggaggaggaggaggaggtcaatcttattgatagcaggggacttggagatgagttttctgcaattgaagatagagatgaagtaagagataaaagaaaaagaggtttcgtataattgtaattttaaaaaacttaaaaaagcataaatgaaaaagttaaattgtataaaagtaaaaaataacatgtggcattaaaaatgtaaataatttgtcaaatttgtcattttgtgtaaaaaaaaccccaaaaataagaggagaccttcctagtttcccttgtagttttatctgttttatgaaagtaaaaatgttcccatttgatttcttgtttgttttgggaaacctaattaataaaattcttttgtataaatattggagccatttcaatattgagggatccaaaatcaatggttcaagagagctattatgctgtaaaaattttaagctttcgagagatcaaaaacttctagcttcttttctcacaagtaatacaacaaaaaggagagtaggctatttccacaatcacaaggttgagcttctataaatatctgtgttcttattgcttaatttcatttaacaattatcatttgttctaatcactttaattgactaagcgtcgttaactaaaagtgatgtcaatattgtcgctggctaaaatgatgtcaacaataagtcttacaaaaaaacatttaaagttgtccataatgattaaaaatatgtaataaatttcaagatttccataatgcatgaatcagcagtgtctatattcatctcttttggtgtttgatcctttaacatgagatcatctacagttcaaaaataaagttattattacgagaaatttttttattactacttaacaaatagcaaaaaaagaaaaaaatacatagtaaatataccaatatccaagatataaacaaaagaaacatagtttcaattaaaggaaaaatatatactcactgaggtagtgaaatttggtatgaataattgaactctgatcaatatatataatataaaactactaatatttaatatatttttttaattaagtagctaaattaaatataaaaaatttaaaatttgtcttttattatttgccattggattaaaatcaaatagtttaacattttaaaattaatatttattgttaaatttatttagtaagcatgaatacatattattgatataataataatagtatataaaaaaaacaaacactcaaaacacagagatttatatgaaaaataaaatattaaattcaatacaaaaggcattgctgtcataaaaggagctcattcagatagaaaaaaattaaaaaaatagaacctttgatgttattgtttccgatgagtgactgagtgagggaacaaaaaaattaaaaatcaacacatataattacatgtaggtttttcccatagaccaaatactaaacaaattataaatcaatcaaaaacatcatcaatctctgtaacagttatcgtggtcgttgtggttagactctattatggatttctgaccaattctccatagtgccctcttatgtcttccttcttcgagctcgcgttctggaagaaggagaagaaggaaccgnnnnnnnnnnnnnngcaacaaccagttttattacgggataattcatggtgttcatatcgatctattatgtgcctctgtagcattgggtagacctcatacaataactgtcctagctctaccctatcttttgtttcatttcttctggaacaatcacaa

SEQ ID NO: 115381 - DNA, 1716 bp, Cannabis sativa
aatatatagcatattccactatttattatacacatagcaaaactaaattaaaaacaaaaattaatgaagattactcatccaccaagtccagcagtttagctagtattattctacattaactggattaaaatatagtaattcttatgagtaaaaccacatacagtctggaacattccaagcattccagggatactagcagcttgtacaggtcttggccgaactatctgcattacaatacaaaccactaaagttaacgcataaattatagcaaaaacagacttttgatactctgaacagttgaagcatcatattataacggaaagccaaattcaatggctgcgagaaagggatctctatcctccattgtagtgggtggttcccaacaagttatggcaaggccccacacattcaagatgattcatgaattaaacaaaagttccaagaagaagaacactactaagacaaagaaaacagaaaaagcgaaagcaatttaagcatacctttccagttttaacaggaacaatatcgtccatagtaagaggttcacctgttattgggcattttccatattcctggtggcatgaaaaagatgtatcaaagtgttttcttatctaccattcatgcgaaattcatacttaaacaatgcaatgacaagtgtaaaagcgcacacagtcaatggcccctgcgatacatacatacatatctatctatctatatatatttatataaacatcttgatacaccaaaaacccccaaacttgctttgcaaatttgatttggggctctcgttgaacccaaagatttatgtcgaaaccaaaactcattggaaataaaacgagaaactcaagccacgtgaagcattagcatacattatagacataaaagacaaggaaatcctagctttaaagttcatattatattttctaactgagaagaaatgaacaagcaaacaaccaagttagggaaaaacataatcaaatcttgctcaattcctataaaccctcaggcattcaaactactacatactcatcattttactagtaatacatttgattccagacaagatctaaacacaatttaaacagaaagaacaatactttacaacattctcatctacccaaagcagaaaaaaaaaataagcaaaaaccctaaaaatgacagcgaaaaacatgatatacaccaagaaacattaaaaaaaaaacctaccgatatgtgtctttcgattaaacgcttctcgaagagcaagccagagttcttcgagacgacgggctcttccggcacctcgccggagactgtagagagcagtgaaaaacagagatcagagaattgtgaaagggagaaatgagggaaaaggaagaagaaggtaacttacttgcgcagttcattgtggcagagatttttggggatttagggttttgggtgagtggagtgaagctggctctggttggtttcagcaagaagcagcagcgagccaagagagggagtttttgtgttttggtgtaacaaaatatacaaaaatgaaaaagaagaaatattcaagtttccttacaacccaattttattgggctggactcatctgggcccaagctcttataggcccatactatttgtttcgttttcgggtccaggttctaaaggccctatttggttataactactttttcttttttgggtttttacaaaaatactgtatttcgggtaatacttttcaatttt

SEQ ID NO: 115382 - DNA, 1560 bp, Cannabis sativa
aaaaaaaaaaaaccaaaacaaatatttgaaaccatacgaaaccaaaccaagaaaacttaaatgattcaaatcgaaatcataatcgaacaaaatcaataccaaaacacataaaataaaacccctcatatcattatgcaaaagaaaacgtttcaccaccaaaaaaaaaaaaaaatctatccatatatatataatagtaatgattataaacacaaagaccggaataattttgagatttaagcaaaaaaattaaaaaataataataaaaaacagagaaggaagaatataattaccgtaaattggccgggtctgcgatcgatgatgtccaatctagattcccttctttttcttctccgtatctctctctgtatattacacatatatatagagagatatttatagaattattattatatatattagtctttttttttctggaaattatatatattagttaatttcgttatattagagtgacgcactcacgctcttcccttcaactctttttctttacagcaaataatgacaattattttatttattattttgaaagatatatatttcaaattagaaataatatcccgttttcattcaaaagggaaaaaaattcctttttttaaaaaaaaaatgtaaacagaagataggataataataattgatattagttatgaaaataataattgatatcagttctattcgaaaaataataataataataattgatatcagtttgttaaaaaaaataaaataattgatatctgttattttatttttttttttgaaagaaaataattgatatcatttataaaaataataatagtaatttatagcaaaccggcgggcggggggtccaaccattactagctagtttaataaaaaatattgaaaataattaatattttatatgcaaaataataataatagaaaatattaaacctccccaatatttaaaaaaaaaaaaaaaaaaaatcatattgtaaactaaattaaataaatcagagtgtaaatataaaaaatatattgacttttctaatttaaaaataaaatagaaagataacaattattagtggcggtgcctttacattttcggcaaaagttgaaatttcaaatcgctctaaaggagtcctctatagtatagtatacagtataaagacttgagaaagtttaataaatgtgaaactgagtcatcctgttaggttgagtatcggtcaatttcctcagttttttttatataaaaatctataatttggtttttggtctgggttggtgcaatccgaagactgaccaatccaaaacctatcttaatactgactgttttgaatcttagtttggtcggtttaaaccgcctaaaccgaacttcttcttttttctttaaaatatgatccaatttattctataaacacattattctatattttacaactacaaacatacaaattaattatcttatgcttttaactttaatattaattgttgcccctgattttgcccaatatacgtggaccaaccggatagggacacgtggaccgaaagatcttaacatttaaattaattgctaagtct

SEQ ID NO: 115383 - DNA, 1089 bp, Cannabis sativa
ataaaattaaaacaaataaattaaatgaatatacaatataatttcctcattattttacaccttagttattatgtttgtctgatttatttatttcaacatttcttttgagggtatcatatttctttgaacttacttgtacacggattacaagcctaattatcatatgtaatttttatttttttaacataaagtctaaaaaagctgttaagaaaaaaaagaagaagaagagattccctagtgataccatgtgaaaattaggggtttcaaggccaccaatttattaatttaattccgtttctctttatatgaacagttcaaattatgagcctattaattataagtagaaataacatatttgaaaaataaataaattttgggttttccaataagtgcattgataaaagcaattgcccaaaaataggtgacttttatttcaagtcctgcaagaatcccaacgtagagattcaacgacaaaaagaaaaaaaaaattgtatataggaaaaggaaaaaaaaaatcttcttgaagataaccatgtttgggaccactcttaaaatatattttcaatatttatatattaacaattaaaatacaaataaattaattaagcgtgaaaaataaagctgtaaggctattattaaagtgatattataaaagaataacctctctctttcggcttatcttcatgtggacacaattagaatgcttattaagaagaaaaaaaaaagttcatttcttgttttagatatatattttttttaaaaaaaaaataaaacgttcattgcaaataaattagactacatgattattacaaaataagtttattaaaatagtctctacaggcaaaataccaaattattcgtaggtaaaaatccatttagcaaaattatgaactgcaaaattacaaattttggaaatataagaaaacgtacaaccattaaaagaagtagaaagcttaaagcaaaaagaggagtagttttcaatctcttatcaagtttccttacaattgagagaattgatcactatccttgagtcactttccacaatgatgaacttgtaatctttggaaaccacttgaggttagctcaagt

SEQ ID NO: 115384 - DNA, 1725 bp, Cannabis sativa
caatttaataccaggcgggtccggtaagggaccggttatggcctccgtcacgtactggggaaacgaagccggcatagcattgtacaagaacaacaaaacccaccaaactgtacaaatgcatccaatgaaccaacagcaactatccacacaagaccacttgttcttattcttatcttcactcttctttttcgctttatgtacctttcctggttgctttttctttgtatcatcactctcttcttcgtctttatgttcttcttcttcttctttgctaatctcactgttctccgcagcttttcttctccgaatcgtagccattttcgtttttacaaaccgtgtgtgacgattaagcttccgttcttagtagcatctgattggctctcctgaaaccgttttcagctaacattttcttgccatattcaaaaaaaaaacgaataataatgcgaaaagataataattttttatttaaaaaagaaaaaaaaaaacaaaaatcgaaaaggttggaagtaaacgaaaattctggagcaaaattgacgtttatgtctttatgatgagatgagatgagatgagaggagagatttattctgaacgaaaaaaatgataattttgtaactatgttattattatagctaatctgtatacgctactaattttttttaattattattattattattagacattttatgtctataatagtgtgtctttggtccccaaggaattatttaaaaataataataaaaatgaacattatacacatatcaattatctaagcctttgattaaaaaaaaaaaatctaaacctaaattaatattaacaagcttaagtggtcatataggatttaaacatatcaatattataattagtgtaattaaatattaaattttatataatttaacataataattttaaaaaagtattgctaataaattataaaatatcacatctagagtgtatttgatgctgaaattaatatgttgtgaagtgaagtagagttggtgcactgactggtagatcagaaataatgtttgattttgttatttgaaaattactaattctgaaattagattaatatttgagtttttgagtgttgtggagtggaggcgttgaaaatgtgagatatattataataattatgtggctgtgtcagatgatcaattattggtggcaacgtggtacattagattagagacattaaattaaatttatataagatatatggatggatggaggcccatgtgttttattttctttataattttgtaaatgaaaacatttatatataccgactcttctgattttgttatccatctaagaaacctaatttagtaatttgaattgggcaaagtagttattttatcaatgtttgtatataatcgggtgtacacctaaagtcttgattagaaatagaaataattttagatatataaagatgaatattatctcaatttaaatcacttgagctaagaataggtgtgtgttggaggtcctcggtccgagtccaggtaaaatatggttgttataaacgcttaaatcaaaacaaaaaaatattatctcaatttaaatgaaatatttcggaaagtgctcaaaaataaatgtttaggtttaaaagagatacagtagaacctctattcaagaatacacttaggaccaagaaaataatattctaattgagaggttataactaaatagaattatacgtgaaaaaaaatcaaaatatcaaaa

SEQ ID NO: 115385 - DNA, 1401 bp, Cannabis sativa
tttagggtttaggtttttggtttaataataaatttttttaattttttaagtatataaaatcaaattttcctttgataatgcaatactatcaactaagtcttcctccccaagtctctaaatttgaagcaatttcatttttctgatcatcaaaattatacaattgtgatgaaacaatatgtatttatagagttagggatgaaactcaactacataaccctagttggacaagacctgctcatcaaaggcttcagttaactagaaaagtccacacttctgcttcaactagattttacacacacagatactaagcccatcaactattaattactaacaatatgagctaatataacaaagaactattcaatcaacccaagttttaataaaactaataaaagttaatgtaagcctaaataaaagtctaacagtaccaaggttagggaatgtcattttcgacaaattttcaattattttttgatagattttcgatggtttgtttatttgtctgaataatttttattgcttttcgatagttaattttttattgctttttcgacatgtgtttttttaatgagttttggatagtttctcaattgtttactaaaagttgtgttatgttatttttactttttctttccgaaaagatttcgatggtatttctataagatttcaagtatatttgttttgcctaataattttgtagtttgttgatgattttgtttattatttcttaactaaattgcttttggtttgttttaaattacattgtttatgcttgtaaagtgtgtgacgatcttgctaaatattctactctctatatgtcacactctctatatgtcacacgacctctaaagtctccagtctaaaactggaataatatatgctctagaaatatttgataaaaaaaaaggtataaatttagttttaaaaaaaaaaaatatcaaaaacacatctaagatctcatcaaaattccatcaaaaataaattttatcttgggcaaaacaaatatacaaacttcctaaaaatcctattaaaatgccattaaaaaactatcaagaactatcaaaaaataatcaagcaaataacataacataacttcagtaaactatcgaaaatatgtcaaaaaatcaataacaaatttactatcaaaaatcaatgaaaaattattcaaacaaacaaatagatagactattgaaatctatcagaaaataatcaaaatagtgttgaatttggtcttccctaaccttatacgccatacatcaagaagtcatcaagaatatatagaaaacatatcgaaaagggataattgcggcaaaagtccccaaaaacttgaggttgatgccgattagtcctcatcctcaaaaattggcggtgaaaatacctaaggtcccaatttttgtttgt

SEQ ID NO: 115386 - DNA, 2381 bp, Cannabis sativa
cctcccaaacctcaaccccattagcctaccattggcttcctcctgcttaatcaagttagaaaaagcttcagcacaaaataagaacaaaaatggtgacagaggatccccttgacgcaatcccctttgaggaaccacacttccagtaatctcaccattaattagaaaagaaaaccgaacggacgtcacacacgccataatcttgtcaacccacaatctagagtaccccaaccgaatcatcattgcttccacaaacctccactctaccctatcatacgccttagccatgtccaacttaagagcaaccttatacccattcccaaatctattcttcctcatacagtgcaacccctcaaagcccacaatagcattatcatgtatcaaccgacctttaacaaaagcactctgagcatcggaaataacaacattaagggactccctcaaccgattcacaagacatttcgaaacaattttatatatcacattacacaaactgattggtcgaaactcagccacctttctcgaattatccaccttaggaatcaaagcaataatagtctcattaaggcaccccacattcgaaccattattaagaatagacaaacaaaccgattttacattatccccaatggtagaccgaaattgcttataaaatgcccctggcaaaccatcctcaccaggtgctttagccggattcatatccgagacagcccgcacaacatcttcctcttgaaactctttaagtaactcagcattcatcccatctgtaaccttcaaaggaatagccccaatgacatccgataacacatcttcatcaatagtagatgcagtaaacaaagaactaaaataatgttccacaatggacctcaccaccatgacatcatcctgccacacccccgcatcatcttcaagtcccttaatctcattcttcttctttcttgtcgtggccttatggtgaaagaatttagtgtttctatctccccatttcaaccacaaagctcgactacgctgcctccaatacttctcatccttctcgagtagaacatttagcttcctctcctcttgttggatatccaaccacacctccggctgttgtaaatttgttaaccaagcaatagaatccttcaccctcttaatttcgccatcaaggtgttttttcttcctcctgctccaacgttgtagcttctgaccacactccctagtattccttctgaacacaccagcagaactaggctcctccactcctccccactgttgctccacaatatttcgacactcatcctcctcacaccaagcctcttcaaagtgaaaacgacccttccggcgtactttactaccattcccaaaccccgctcgaatgggaacattaatcaccaaggctttgtgatccgaagcccaccaatccaacaaggatacatcagccccttcaaacatatgaagccattctgaattacaaaggcctctgtcaagccgctccattacacttccattcttatgaccatcgcaccatgtaaccacggttttattagaaccaaaatcaatcaaaccacaatcatctaagacctcacggaagtcctccatctgtccacttggtctatcacggccccctaccttctccgacaaactcactatctcattaaaatcaccagcacacaaccacgaccccctaaattcgttgtttaaatctcgtaacaactgccaagaaaatttccgttgagaagccataggattcccatagaacccagtaaaaaaccaaggcgtaaacccctggccccccacagatgccacaacatgtcctggtgaactagaaagcacttttaactgtaaatccgacttccataacaaaagaaaccctccactcataccaactctatccactgcccagtaattagtaaacttcaaagcaccacacactctctccgcttgaactctattcaacttactctcagccaaaaatataatactaggatccaaatccttcacatgggactgcaaagctcttaatgtccaggggttcccgattccctggacattccaacatatgattttcattgcattcggcggccttgaccatcaaggctcgccgcttcagaatcatttgagagaagtggaaaatcagaaaaagaagaaatacccacctcagaagtaacatttgcaaccatgtcttgtggcgccactgctgcatcacccgtcccctgtccaccagtagccgtatttggtgagtttaaaacattaaatattatatttcttttttttttcatgtggtaaaagatcgtatattttagtttgaattttgttgtattttaaattggtgtgttattaaaattttaacatgtgtatttttattgtgttggttaaattttaatatattgtttatttattta

SEQ ID NO: 115387 - DNA, 2112 bp, Cannabis sativa
cttcatggactaatgactgaccctacaaaccaacacgagtatttccagcgttctttgtcctcactcgcacgcttcctgagaaaacttcccagaaggttaccttgcattctaaaattactcccaggttaagcacgcttaaccatggagttctttcgtgatgggctaccgaaaaacaagattaagcgtgcttgacatgagacaatttcaggatgggtgacctcctaagaagttttcccaaaaagcgtgcgatcgagtgaggacaaagcatgctagaaacattcatgttggtttgtagggtcagtcgtcagtctataaaatagccagagtgacgtactcgtgtataagaattatttattttatggatgtaaggaccaaataaaaacttaaaacgggaacgttacatgtgaaacttttaaactatgtctataactactaatatagattgaatatatgtaagtccataaatactcttatatgtatatatgtaataatgatgaacagagttaacattttaggattgtgtcatatgagaatagtgtgtatataaaatataactgatcattaattatattctgtcaatctattatgttcacacagtgaaacatacgacacttgtttatatatatacacgagtaatttacaatacaaatatttaagtttaatttttaatgataataatactaagtacatataatgtgaagttattattagatattatttttttataagtatatttttaaataacttaaaccaattaaaaattcacaaattactttatatataaatttattaataaattatattttaattatgcatacatattacttgctaaaaaaatgatagaaacaagtgaaaagcagaggttaaaaatttgaaaaaaagtagtaaatttgatgataaagtggtagtgaattgaattgcatgcagagcctggtagctatactgctaaagcaaataatgtatgtatatatatatatatatatatataagaaaagtgttattattaagagaagataagagtgtctctttcatgccattaagcaaaaaacgacatattaattttctatatatatatatatatataaatattgacgacatatatgagagtgaacagtgagtctcaatcatggtgctgttaacatctcatgcaggttcatacctgtcaacctcacatgtttgttgtactatttatttactcatcactacctataatatctttatatattaattcataatattgttcatcatcatctctctaccgactcactatatagtatatatggatgttcttgtttagataaagggtaaatttatagtagattctttatgtttcgtttaataatcgcgtacgttatagttacatatttagaattatttgtaaatttataattttttttaaataatttataatgatgaaaataaagttttaaccgttgcttatcatgcatgtaagaaaaatagtcatgtacgcataacaaaatatataaatcttatttttaacattgtaaattactgaaatttttttcacaaataatcctaaataactataacatacatattcacatgaacaaaatggattaaaaaattcttttgaatactaaaagagataaaggatatatatactaaaacaatccaaattgtttcagtatttaggagaattatatatagatataataattatgtacattataattttgtagggtcacttgtaaattttgataatttttttaatagtttacaatgctaaaaataaaatttaaatattatattctaatatttataactgttttttttttttatactagtagtttgaattttattttcgattgtagatttttaaaattttttgaaaaatttataggtaatcctaaaaaattataacgttcctaatcattaaaaactaattgaactccaaaaaattattagataccaaaataaataaaaagtgtaccgaaataatatattaaaagtatactatatatttttcgagtgttaacaaagtatatacaatatgtaataacactactacaatctaagcctttagcttcccttttttcaatctaatttataaaaagggaagctaaagggggtgaaaatatctgcattgacatt

SEQ ID NO: 115388 - DNA, 5276 bp, Cannabis sativa
  modified_base (1566)..(1587): a, c, t, g, unknown or other
  modified_base (2175)..(2177): a, c, t, g, unknown or other
tttacacttagtttgttcattgcacgctaaggactttcacggttgatacgtgtcgctttctccggtacctcgctattcacatttagcgatatatgatttctcgctaatatacaaagtgctagcttgtacattgattcctcgcctaacacctcacagtcagcgagttacaaatatactctgactcttatgtaattaatgagttattccataagagcgatcgcattgattcacattcctttcatcttgacacgtgtccttcattgaggtggcagccaaattttgtgtataacactatccatacagacgtctacacagagatttgggaggcaaatgttatctcgatttttgcccacctgacatggcattgcttacgtggacaaatcaccgccatgtggcaatacaacttaccaacaagaaggtcaagttagcacctcagctaacagggactccaacactcagacaggacatcaagtgatagactagcttcctcacaagaactagtcggccacccctgtcaggccctatagtcggccaacctctagactatataaggtcggctgaccactctgcttcttacaagtgtcttgccggccatgtaaaggacctggcaggatattccgtacaattttacacatggactgtgagttgggctgcaaattgggccctaacagcccaataaagtagttagaaaatatataggtttaaggacattttagtcttttgtaattaatcaatttaatatactaatatctaagggtttcaattgtaaattagggttttggatctcctaaataaagagcctaaactctaacctaaagaacctaagtctaattctagcctccaagctattagttgctaagcctcattctaagtccaagtctctaagtctgataactctctcttcctaactctctcacacgcccatatagcattctaatcacttgatatttgccaacattaattcttactttgtatcctcaagggagctatataagatcccacctataatgatctaaatagtaactcggtatcaatacaacaaaaaggggagtaggtcattacccgctatctaagggggccaaacctctataaaattatgtgtgttctttactttctaattctaattgtgtaacacgtggcaaacatcatattcatatgaccccactgtcggttgatcactttttgaggtcaatacgatgtacattatctacagatgatctttaattatttagattgaaataatggataattgatagtctatctatatttggaacatataaagtgttctatgtaaccaggagtgtgattccaaatctataaatgagtcaggaggaattaataagttaagaaatttacttagtaaattttggatctacttattgagagcttggttacataagcccgtggtccccgcatcgtttgagataatattgtcttgtagactcaactaattggttttaattaatcaattataattctaactaagactatgtcttgtttgtgaattttcactaagcaagggcttaattgagaagaaatataagatttagggtttatttgttaatnnnnnnnnnnnnnnnnnnnnnnttaataaataagttaaatgaaaattttattaaatagatagatttgacatttatagagttagaattaaaatatggtatttttgaaagaaaagataagttgctaaataaacaagtaaaattgaaacctgtagggcccacatagggttcagccacttaaggttcaattaaatcttttttaatttcaaataattcaaatcctaaccctagatgaaatcctataaatagaaagtgatggatcttatttttataatgcttatcagactactttttcagacaacatagaaaataaagagagcctcgtatattcgaaattctcctctcatcttttttagaattttgaaacccttagtgaattgaggaattgtccacacaattcaagccaatactcagacttttgtggaagattgtgaagaattctatcacctgaaggagatctcggtatagatcttgatcatactctctgatggaaacattatatttcgctgccactaatgtaaaaatttcttaatctcttatgtgtttacttcattattttaagaaattcatatttaggatgttaaattatagttctataatcaacatacatgtnnntaaatctagatcctgataaaataagttccaactgttttctcctcagctttttcagccacgatctaactcactctcccctgttcagaaaaaatgactttcttaccatttgatttctctgagttccctatataatgcatcataaccaacaggagaaagacatcccttttcacaaaactatttttcctatttgatttattttgagctgtaatattatttagggtgtattcgatggttcgctatattgcattggtgttttgatatagtgtacgatgattgggttgttttatcttggggacgaccaaaaattttttggttgcttgcacattcctgagcagtgccgcgaacatcttaaaaaaagcaacttggtccgcgactcaatccaaaaatattatttggttatatcatttttcttttatttttactagtagtttcgcaacaaaaacattgtttggtaagatgctttaatgtttttaggaaaaaaatgaccacttcaatgtggaaaaaattaattttgctaggcccatctcaagccaattaggggccttgcaccaaaaatttaattaggcatttgtatatataatggtaaaatttaaaatatagtattttaaaaacataattggatcttaataaaatattaatggcctgtttggcataacttttgaaaaagctaaaagttattttaaaaaaaaaaaaaaaaacttgtgataaaaaagtgtttggcagctaaaaaacagcttattgaagaatttatggagaatgtacaactaaaatttaaagctgatacaacctaattttaagaaaaaactattttgatgaaaggactctataataaattattttgtactaaaaatgtactttattatttattatatatgactaaaaaatattttttttttgaaggaatttaataaatgattttgtactaaaaatgtattttattatttattatatatgacaaaaaaaattgaaagaatttttagttttaaaaataaataatatttaattttcttattttttttattttattttaaaatattttatattcatattattaacaaactacatcaaccttgagtttcttataaactacaatttttacgtacgagtgataaaaatgtaatttaaaaataatacaaattagtttaatcaaatgcaaataaatttatactgtggagaaaaaagaactaaagatatataaaaaataaaatttttacatataacataactttttatatatttgtgattataatgaactagattataacattatcattattataatagaatcttaacaactcacaacactttataaccaaacacttagtttagttttttttacacagttcttctacagtttttttttctcacagcacaactacagttatttttccccacaacacagttgtgccaaactatccctaaatgtagtatattaaaaaataaattaggattttttttagaaaatagttaaatatttttataaataatagttaaaatatataatatgatatttttcaaataaatttgggacatttgttaaagaattttttgaacttgggtgaggggctttaggcgtgagcctctgttgttcgatcgatccttgagttaatcctgttgaaaaaaaaaaaaatatgtgtcttgaaagttaacatgttttaactggaaaaagaataaaaaatattaaaccaacaattttctttaaataatcactttatttatataataataaagaagtaatattgcacaacaataatttggtggattaagaaattatagtatgtattagatatttatttaacatggcatgtcatggaattttgtcaataaaagaaatttcacgtttttgtagtaattttaagattaggtattccataaatggatgtttaatttaggatatagaagaacacgttttattaattattaacaaactagctcttgtgtatctatcatattaactcagcagcaatagcacatgaccaacatctcacgtgtctttctttttttctattaccttatgtaccttatcatctacgcttagcaaaacatggatcctagactcacaaaatcgtgcacatgccttatatcacgtgtcttaatttcaaaatgaaaaactgcatatcttaaagcaactccaataaataaatgttaaatttagttttaaatcacacaaaaataataaaattctagcacaatattttttttttctattccaattacaatattcaaaattatactaaaattacattttttttattgttatattattttattaaattataaataaacacaaataacatatatataaaaaagttaacttataaatatattatttaaatattaaaaactaataaaaaagatttagtataatttatagtgtcactaatattagtggaacactataaacaatgttatatatatgataagttttaaaatataaatgaaatgaatttagtataaaatctcaataaaatttgacattttaatattcctttggagttggcctaaaaattatgattgcagatttttgttatcaactatcaagtttatgtagtatttcttctaataccaccacaaagacattttattaataataaaataattatcactatataataatagtacttgattatcttaatacttcatttgcttttgcaatttaatttttgttggtcctttatataattaattacaattttagttgttaaaacatttttttaaaatgtatttagaacccaaaataaagaaatctattttaggaagtatttgaataaacaaaaaaaaaaaatataggactcttatgaagtattttaaaattatcctgttggtgaggaggatctttcctttgggaggtgaggtctaatgttatgttctaggagggattaaatgcaatgattttaaacatgtttatttattattattatgtttaaatatatgttaatgatttttcttaacattctttaatgccaggtaactttctgtttcatatctgttttaaattttaaaaaaatatatattttgttactctttttcatatatatatatatactaggtgatcgttacgtgccaagccacgtactattagttttatttaatatttta

SEQ ID NO: 115389 - DNA, 2814 bp, Cannabis sativa
tctctctctctctctctcctcccacacaaccagaagaaaacctagccaaaccttcaagtttttttttggaattgagcaaggtttcaacaagattggaagtagttcaagccaaaggtaaaccctaaaacactacctttgtgttgtttaagcattaaattgggttttgtcatgcaattttaaggagttgtggctgtgtaggttaggtttttctctagtgtatttctagaggttattttaagttgattttgattaattgttgctggtattgttggtttgtgagtgttttgagcaagtttgaacttgagaactcatacttgactcattcattgtggaattaggttctgtggttgtatgatgcttttagtgcttgaattttattgttggatgctattttaggagatcttgaaggattggggaagtttggatacgaattgggcaaggtttagaatttgtttgggtaacttggtgcaaaccggttaaccagtttaaccggatcaggggcaagtttcccgaacaattcaatttgtcgattcgagccttagttagttatttcctcgataaatagggtattgttataagaattaccaatagcagaacccttagtagtgagtttggattacctggataaggtttttggtattttatttacccgtttacataaatgtgacttaaggcatccatccaatacgaaattttctgttcaggtcggccaactcacttgaattcggaaacaaggtaagaatagcatagaacatcttatatatgtgattatgggtatgtatagcatatgcatgctgtgtatgtgaattgtaaatgttgtgaattgatatcatagcggcagaactatagtgtcgggtcagtagtacgagcatagtaatgggttctactaatatgcaattctagaaagcattaattgacgctatcatagcggtacgagcatagtaccgagtcaccaatacaagtatagtactagttaagagtgatattatggtcaattatacttttaggtattattaatgttatcatagcggtacgaacatagtaccatgctcacaatgcaatcattttgctggtagtggctaatatcatggtcaataataccatatgttaagaacgttcttacgtatctgataagccttgtggatagatgtatgggcgcctagatacaagtcggtaatatattatttgttatatacttttcttattgagtctattggctcacagttgctactttcgtgtaggtaacggggaaaaggctgaacaggagtgagctctgagcttggatggtgattgtacatgctgggacgatgcgacctggagtgttcagtctcaagacatcttgggttgtattttgtagtcgttgggcgacatgtttgtaaagtattttgataacatttgtaaaaaatttaaatacggtatcccgacatatgtaaaaatatatatgtttataaagtttaataatttaaatcaaaagttttaatttggcacgatttttgaggaaaaccctttgattagcaaaggtaatacattaattaaaaaatcgcgcgcctaagtatcagggtgttacaagtgctatccgtgttatttgaagcccccttccgtgcacttgccaggcatctcctcctgaacggagagtattccatttaggtctcgtactttcttaaattgttataaatcctaaacttattaatatgtttgtccatctcccatagactatcatttaggatcaactttggaacactctcttggcgaacctattatatttccaattgctaaacagttagtaatatttattgattatttttatttgatttctcatcaaattacaaattattcttatagtattcatatattaaaatcataacaattatactcttatgtcataaactatttactcatttatataataattcaacaaatattttatatatatctcaagtaaataaatttttaatattggagactcaagaaaagtaagacagattacttataaataaattgataaagccactttattactttctgtgagttttcgtaaagtgttaaagatggatctatttctacatgtgaccatatttttatgaatagaatactcagcgctgtcctactattaatggccaaacacgttattcgcactatcactggttactattcttttgttatatatagtcatgagtcacattatgcaattgcaaatggaccaatggaccatttacacacgatgaaggaaggtctatttagaagttggtaaagatagttacgttacccttttgaagtattttcataagactcttgtatgggtcagttgatgattgtttgatctcttttatattactaaaccagagtactaatcggacaaatttgaccacctatattaatgtagtcgcaccagatagcgttatgttggtcttattcacattcgcatctatatatgtattcttctttccaatgctccatagagggcctatatatattttttatctcatccatatcattattactatctaaaatgtacccaaaatacgtggttcgctagtttagttgttcaattgtaatttttggatggtaatctatctgtcttttatattactgaacactattaattattaagttattataattagaccctgttttaaattaatttacacattaacataattagataccatatgtgtagtgtagccgaatatattgactaatccataaattagaaagctagtttatagtgtatatatatacatgacagaaacagggttaattaatagtttgagggtagaatactatttttatagtgtagaatactaatagtttgag

SEQ ID NO: 115390 - DNA, 801 bp, Cannabis sativa
  modified_base (31)..(68): a, c, t, g, unknown or other
  modified_base (706)..(713): a, c, t, g, unknown or other
cttatttgtttatttcattattttagagaannnnnnnnnnnnnnnnnnnnnnnnnnnnnnnnnnnnnnatttagatcctggtaaaatattcccaacagtggaaccgatccttggattccacgtaattcaacctttactcccttaagatacacaggttgtccaatcaatatagtgtaactatatcatgcctacaaatgagtggaatcttcctctattgcagtgtgatttttctttaactgatgtgcattacatccttaccattcctctatctcattttagtttgaatgatcgctggatttggcatcacagtacctcaggtgagtatttagttcaaacgagctatcatcttacttgctctttagaagaacaagttctttcttctagttctaaaacccaagattcttggtggaaatcgctttggagcttgaaacttccctctaaagttaaaatatttgcatgaagggtgtctcaaaatgaactaccggttgctgtctccttattccatcaaaaagttatcgattcaacaacttgtagtcgctgttctaatgcttgggaatcagtgggggcatgcgatgttctgttgcaaacatgctaaaacagtgtggaaattatttggttttcagttcgattttattatagcaggttaaataaagcatggtgattatcttacctatttgtctatagttttgtaaagaccgcttagttnnnnnnnnaaattagcagttaattatgtttaagtttaattatggaaaattatttatagttatttaaataattatttatattgttattgttgaattc

SEQ ID NO: 115391 - DNA, 3612 bp, Cannabis sativa
tcctccatggcatgactgcttgacgccatgctccaccggtaaaaaatcgcagcaaacagagaagagaataaaccagtcacaaacaagccaaacacaacaccaaatgaacgatcacaaccttgaagaaaaccaccagaaaaatcgcaccaaacagagaaagaaacaaataacacagccgcaacaaaacaatgacagttctgttactataaataaaaaagtatcactaataataataatcacaaaataatacataattaaatacaatatatattaaaagtgagtttaaaagtattttttttcttcctttaaactaacagttctgttaaatatatatatacctagaaatctaattatttgttcttgcaaatcatgtctaatttctttatgtcgacatgtctctggaagcccttctgccaagagtactggaaacaacatcggcctcgcatgaagtatttgactcaaaatcgaaatggatatgttaaatttctatcatttaccttttgatctaaccttcaaatattaatagctttctcaaggtaaattgatcctcaaattttgcatctataaatcttggagtttttacaccaaaattttcaacttttttactttttttttacttttttattgtggagtggaatttttttcaaatttactgtataatgtgttaagtattcatgcttactccacggttgttttttagttatttcactgttattttaattgttctgttttgtttctttacagtacttttataaaaaatatatatttttgtaaaaacttccgccccacagtaaaattgtaaacttttgctcaaaatttagtatttttgtaaaaatcttgtaaatctttttctcttttaatttccatttttaattcctaattggttctattggcgttgatctattggttacggcccttgagtcatagaaaaagccaatgttatttctttcaaaaatctaaaagaatggtcttggagatgtaaaatatgtaacaattttttagttatcattatcaaattccattaatgcgatacatgtatttatactatgatatatagttttacattggtatttaaaaacttaagatctctcatttatgtttgtggacattaaccaatacatctttcttttagagtttccattaggtgtggatacttattacttatttagatagctataggaaaattgattcaagatgtgagagaaagaagtgtatattccccctggggagagagtgagagtgagtgagagttagagagagagagagagagagagagagagagagtgagtgagacctgggtcatttgttatgtgttttctttgacttcgttcgagtttttctgtgtagttcctcctggtttgttccgattgtctccagtctaaagtctttttgtcttttgttttgtcaccttcgtggggtctttgtggattttatggggtggtgcgttgtttgtttggtgggtcgtgggggttgttttctgttagtgttaagtggtttgtctcttgctttctgtaatggcgatagtaaatgccaccaaccctgccataaatgataatggtaagtgtttttctcgtttggaaactactataaaacttgctccgtgtgcctcttcccaacaggctttatcttcattttgccttgttggaagagttattgctcctatgtctgtcaatgaagcttcagttatggattttgtggataaaacttggaagttcaaggtgaatgtggctgctatgcaagactccaccaacaacccaaattgttttgagctgggttttgatcgtgcagaggaccgtgcttgggctcttgctaatggtctgtggcgtgtccgcggctattccttgtctcttcatgtttggacacctaggaagtccctcatgcttaatcttgacttgatgaagatctggatacaaattcacaacctcccccgggattatttttctgttaccaatggtaatatattgggagggaaagccggcaaggtcatcgatgtggagctcgatgaaggtaaaccggatttgtggagtaagttccttagaattgttgaactggatgtgaaacaacccctgttctctggttgttttttcgatttcgaatcgggtggccaccgttggcttcaatttaaatatgaaagaattagtattttttgctataactgtggaagattgggccaccaaagacggggttgttccctctcctctccggtcactgtggtcaaggataatggagttcctttccctatgtttgggtcgtggctctccactgcctcttcatatcttgatgtcttctccggtgcgaattctttcgttccttccttgactatatctcctcggcctgggctcgatgagattcaggtggtgccttcgaagcctgtgaggaacgaccttgggaggagctcgactcgaccgaacttggtggtgcgagcctcgaggcgtactgggacggcgacggatcaaaagtttgccaggggaaagctggctcatcacacggcgtgggtccccaaacgaccttctgtcataagcacgcctggttttgctattttgggtaataagggtgatgttggagaagatgagttgaaaaaggggtctctgtccgatcctaattttaatttgaattttgctgaccaacatttgactttggttaatgtgctgggtcatagagatgggcttcatggggttgatattgggccggctctttcctcttttgggccgggtccaattgcttttaaaaataccatgttattaaaagaaactagtgacctgtgtaagagaaatgggccaaacgagataattgatttatctccttcagcttgtggggcctccgctcctttgatggataagcagggcgtgaaagaaagtggtaaggtcgtgggccctcttgcttccattgggccgatagctaaagtaaaaggaaagggacttgttgaaagtaatactaataatactattattggtattttgggtgatgggcctgccaaggctatttccaatgggagctctacttgtggtcaagaggttaaatttcaccatgatgaaaagttagctttgtctaatttttttcaagctcaagatactctcttacaagagcttaagaactttggtagtttggatttatatgagataaaagctattggaggtgacattggggtttcaccaacttctgagactaacgaaagaactactccgttcaaaaaccggaagtttgatggggcctctgcatccctttattcaagaccttggaagcttcttcgccctcatccctgggctatccgtgatttcccttgggactcggaggacagagctattgctactaaggttgcggaggacgagccctcggaggatttctctttgtccaatagtgatttaatcggctcggataagtggagtattaaaggcaagaatgtgatctcatctaggccaatggaaggcactttcgtggtcgaggaatctggttcttttgggtctgtccaatctcatacccctgtggacgagactgctactcctccacaggagccatgagaggtattgcttggaactgtagagggttagggcagacctctacagttcgtgagttgaagtccctgattcggtcgcgttctcctgatttcatttt

SEQ ID NO: 115392 - DNA, 2049 bp, Cannabis sativa
  modified_base (1990)..(2001): a, c, t, g, unknown or other
ttcttatattgataactaatcaaattataaagagttttatttagagcataaaacccaacactttcttggactctttcattcttcatcctatttttggacatggaagtccctacacttggaccaacaagcattcccagcgtactcacactcagtagcatttagattagagcatctcaaacttcgcttgggacacattgttcgcttaggctcatctccaacatggagattcctttggttctaatcatcgtgcactaatcctttctcctggcgggcaccgagctaataacagttgtcggccctctcgattctagtttgacaaaacttggattagtgaagctagctttgaagattgtattcgtactgcctggtgctctgttcccactgaatagtacactaatgtgattgccaatatctctcacaagctctctaagtgtgaactcaatcttcaatttctgaagaaaaccttaggcccgccaattacttgacaaatccgtgagacccaaactcaactgcgtctaactcaaagcaactccaagcccaatgatcaatgcctcagctcttgtcgtcaattgcaaagttctcttgaccgccttatatacaaggaagatctctactagcaacagcaatcccacatgtggctctactttcatcatgtggcttcttctcgatgctcgatgaataagattttctcacttgtccatcctgacggctttattgcctccactaatcaagccattgtggacattgttgaagagtacttctctcaactttttactagccaacttccagatccctctcttatggacaaagttgtcttcagaatcactctgaccatcacccaggatgattataatcttttgaatgcccctacacggttgacaaagttaagcaagctacatttcaatttgccaatgataaggctccgggtattgatggctttaatggttctttttataaatctaattgacacattgttggggaagacataactagcactactcttagtttcttgaacgacacaacaaacattgctttgatcaacaacaccattattgtgctcattccgaagaagtctcatcctgaaactctcctagattatcatccaataagcctctgtaccaccttgtataaaatcatttcttgaactcttgtcaatcagctcaaccctatcttttccaagatcatttctccctcccagagtgttttcttacttgaccgactaatttctaataacatcattattggtcaggaggtaactcactcactagttagtcaatcatttggtaaggttggctggatggctcttaaacttgatatggaaaaatcttttgatcgcattgaatggccttttctctgcaaagtgatggaaaagtttgctttttctgagcatttcattaagcctatcatatcttgtgtatcctcaacctcattctctttctctgccaacaaccaagtccacgggcatctactccccacccatgatattcgttagggcaaccctatatcaccatatctatttcttctctactctgagggcttatcctcactcattattgaagcaaccaatagacaaattccccaaaagcatgcacttggcctcaagatcacacgtaatgctcctcatatctctcatctcttcttttctgacgacagtcttcttttcagtgttgcatctcctattgcgaccacaaccataaaggatctacttcatgattatagtctgacatctggacaacttttccaaatccttactttacttctctcctaacactgacgagactatcaagacgtccattaccaatattcctaatgtccccatttgtgctgagatagagaagtacctggggcttcctcaatcttttggaagatctaaaaaggaagccttcaattacctttttgatcatgtttgggctcatctgaccaaaaagaactccacattcttctcgaaagggagaaaggaaatccttctcaatgttgggttttatgcccnnnnnnnnnnnnatttcaatataatcagatttactgattaatatagatcagaaataatat

SEQ ID NO: 115393 - DNA, 3594 bp, Cannabis sativa
taacaaaatagaggatccaattaattacttttacaaaatacagagtctaaaatagtatttacccttatttttgtttgggaatgcacttatataaatatagtattcctaattttttttaaaaaaaatttaattttcataaagagtactattaattaaaaaaaatttctattacattcttttaatttatacatctgaaaatatatgttaaaatattttttttaatttttttatagcggtattcaatatcatctctgtaaatttttaaaaaattatgaataatttacagtatcaaaaatagagttctagataatccattttaccacacatatttaaaaaactttaaacgtattttcggcactgtaaaatatatacaatttttaaaaaatttatagagatgatgttataagcataacacaaacactgcaataattttttttgtgaaaaagatattttggcatgtgtttttaggcacgaaagttaactgagaggttgtaataagaagttaacaataacactactctttgcatatactataggttgcttctgcactatttttgatacttagataattttaatcttaatacaataatgtacgacgtagttatttaaaatattatgtacaatttcaaaattttgaaataatttatagtataaaaaatacggttcatatagtatattttacatgcttataaaacaaaacacatgtaataaactgcttgaactttatttttaatgtgttaaatttttaaaatttcttaaaattttaaaaaatatattaaataattatattgtaaactcttatatatataaattaaaattaagactattttctctaaaaaaaattaagactatttgaatgccaaaaaatgcaccaatacatgtttgcactataaaatttccctattaattataatacaagtaattaatccttacaaaaaaaaatacaagtaattaatatatcatttacaaattattacgagaaaaataatattttattttttaaaaattatgtgtgcttaacaattcatttttgttcaaaaaaaaaaaaaaacaattaacatcatttattcatacctttaattagtacttatccttagtacttttcaaaatatatccaatccatatatatatattaagagaaaaaaacacaaagaaatatatgcaaattaattcactctatttttcgaattgcttgtagttgtagtgttgacttaagaaggattttattaattttagaagggctagaaagaactatatacttaattatcttaatttgaaaataattttctcaccaattaatacatcaacatttaattttctagataattgttggtagttcaatgtaaaattgagaattgctaaaagctattattatcttttttgatattatatcgttaattaatttaattaagtattaggttctatataatttaaaaaaataacttttaaaaaatattactaactaataatcataagacgtcaataaagatatttaataataatgagcattgttattaggtactagtggtgcctagcaccttctcgatatatcgcgttgcgattgactagcgataatccctaaaagctattatattaaattatatgggacccgatacttagttggatcaatagcgatattgacacataagaatgtgttagacactactagtgccctttagcatttctcataagagtattgctattaagcaccagtagtgcctagcaccttctcaacatgtcgcgttgcgattgactagcgatactctctaaaagttattatattaaattatatgagatctgatacttagttgaactaataataatattgacacattagaagatgctaagcgatactttttaggatttctcttctcataataatgagcattgctattgggcaccagtggtgcctaacaccttctaaatgtgtcgacttgcaattggctagtgatactctataaaaattattatattaaactatatgggacccgatacttaattacaccaatagcgatattgacacgtaggatggtgctaggcaccagtagtgccctttagtatttctccataataatacactaaatcaatatttcatttatttattatttatggggaccattttggttattggaaatggaccaaatattgtcgagctataataaatttcttttgactaaaataatttattgtttcatttattaaaattgaaaatatttatataaaaaaagaaattaatgatgaaaataatcaatagagtgcgtggcaataaatagcgagtgaggagaaatatatagttataaagacatgcattcgcttttgcatggggtttaggttttgactgttctcttcttattagtattgcacgtgtgattttacacatttgcccctcatccaataatatccaatttcatcatcgtatatatatacatatttttagtaaatacactttttttttttttaattttattatgatttatgatttatgttttattatacctttggtctttttagtttgttaaaaatagtttagtactgtaaattggtcattaattctatcagattcggtcacatagcaaacaaaataatataactatttaaacaattaatgtattagtgctacgtataattaatttgaaaaaaaatatatattttttaatttagttttaaataaatttgtactcatttattgatttttagtttagtgatattttgaaaatatatttttttaatttttaattttaaattatgcccataacgaggacctagacaattagttaaaaaaatcatatcattattttatttgttacatgtaataaaatttgacataaagaccaatttatataagcaactttttattattattgtttacgtttactacactctcaaaaaacttttaaaaattgatcatcattagttgatcatcataatataattttgcattattatgtaataaaaacaaaagaaagtccctttatttatatttttaatttatttcttgacagtgtcatgatgaacttattctttcataatattaattgatttgtgctacgtagtgattaattattttgctacatcattacaaaaaagtatttcttccgtccaaaaaaaaactaattatctattagaaaggtatactaaattaattcatgagttgcaaccaaagtcgaccctaaagtgaagtgagttaggcatgcgcttaggtaggatcggtcttaagcctgtgcgtaagacccacactctttgggcccaaaataaaaactaaaatgctttattagacttttatttaagtaaaattagatatattataaataataaatattcatagcttaattagttagagtgtatgatacattacacaatagtatgggttaagtcccatgacattctttttggatcctaaaatttaaatggttttagacccatatatttttagggtcggtcctcctcaaaccctgcatgctggactctaaaattgtgaaaaaaaaatatcagtatataaataaaatattatataatatatatttgacaaaaaaaaaaaatgggttacttaaaattattgtctcaaagactagtacaaagttttttttttttttt

SEQ ID NO: 115394 - DNA, 1230 bp, Cannabis sativa
gtatcagataagttatttttcaaagccattaataaatgaattggaattgagtttgacatttccttgtacctaagctgacacaaattgctacttgtgctgatgggagtagctcactggctaagctagatttgtcaatagaagtggccaagttatcttacttgcttcctctcttatgtattattagctgataagcctgatatttggaattgctaataaatgacatgaaatgtttattcaaaggaaacataaaatctaatagcgattaatctgattccgatccaagaatgacaagcattacgtttcattggaatattttagagacatccatttgactatataccattaccaggcacacccatagtttatgaactcaagtctcaacaacatacaattttaatattatggaatcaacaatgatttttaaacatcagattgctagtaaaaagatagtaacacttctattagaagaatccaatttccatcaagcagaaatgaatcaatcaatgaattcacaactccagtcccaattatctgaacttaattccctcatgaaatgaaggcaagtgaaaatcacattgcctaaacaagtactacatctttgttttctgttgtgagaataaccatgtatggcaatttccccgttgtaccatcctgccaatcaaataagcatagactactaatggcttagataaatagaaaagagataattctcaagatataagcctaactatgagcagccttttttaaatcaaaaagaaaactatgactggccttttacaagaagaaaagaaaataccaattctgaagacagcagttttgcaagatgaaaagaaaaataccaattttgtttaataaaaaaaataaaaaagaaaaacaaagcacttttttgtatgcaacttacaaagaatgtcagcaaataaaaagttgataatttggcttaacatctcctacgtccaagtaattgacatcagctaccacctccccaaaatcatctgagtcataaccaacagcaaatcctatatcaatatataacccacatgaaaccctgaaaatatgagagaaatgtttcagttcaaaccttcatatatggtcctaacaaactttacataatcaggtataatgtctctataaataattcctcctggacgagcatccaacaccaccagcacacctgtatgagaaaccatagcttttagcttttttggaaaaaaacaaatagagagagagaga

SEQ ID NO: 115395 - DNA, 8057 bp, Cannabis sativa
  modified_base (38)..(40): a, c, t, g, unknown or other
  modified_base (4378)..(4382): a, c, t, g, unknown or other
actttatatgtgtttattttattattttagaattcatnnnaggatgttaatgaaacatacatggtagtaaatttagatcctggtaaaatatttccaacaaaaagataataaaacgaaggcaataaatagcaggagtcccaggctctttgaacgggtgaactgggtctaaaggggtcggaagatcatcattctagacggaaggagcctcaacactctggtcggtaggagaagtggaagtgttctcctcaggattcccgtaggctgcctgagcagtgtagtagtcgagaaacatgtctttggaagcgccaagatattcgaagtttgccttgcgattggccttccaaaagtcataaaaaatctcgagacaacctgtctctaaggcattcaccttttccccgagcctcaccacctcagacttctggcttttaacctcaacatcaacttcctcctccgtagtcttcttctcatcctccaacctgcggacaagagtctaaagaccctctctatcgtcttgaagactagcaacgtcccgacacaaagaagcaatatctacctcaaggtgttcggttgacgacatctcttgcagttcccttgtcagcttggcaaccctggtctcagcagctagaagtgtcttgttgacttctccaagtttcgtccgcatagtctcaagttgagtccgcgcatctgtagcttcctttttggctaagtctgcatccctttgcagtgtgttagaagtggcaagattcttgacagcaactgacttagcttgggaataagcgtaggccatctttaaaccagtctgtgcgaaaaaaggcattaaaatctgaactagtcaagaaggaataaaagagaaatgttagaaagaacttacccgcgaaagctccttcaagactcctcccaagaccagctccaaagacaagtcattaactgccctagccaactgttcgttcacctctaggaccgacagactcacatagtggttgagcatgtctctgcctcttttggtctccgtgtacaatacctatggtggggcaggagccttaacttgttcagattcgctcctgaccagcttggagccaattttagcctactcaggtccatccgagctccctccccaggaacctttggacttggtaactttcaaggtaggagtgtccacggtaggttgttcctcaaagagatcaatgacatcttcaactggtgccttctctttggatggagtcttaccgcccttagacttcttggccggaggggataagcccgagcttcccccactctcttcttcaaagcctcgatcatcttctgaggcatttatgtaatgaaaaaacaatacggtcacaagaaggcataaaatatatgaaggcatgaaaatcaagaaaagtaaatgcaagatgaagtactctgcacactggcaggagcatctgcccgaacaagtagcacaaatggggcatcatcatccgaagagtcttcctgctcctccaggacaacttttccctttccctctacccgggttgatggccgaggaggtaaactaggctccctgatcaagatagtatgttctatgggcctctgctaagtcgggagagttttcttcttcttgtgcggcctcttctgctctgaatattattgagcctcgttctcctgctgagaatattcctgagcatactgcttggctccagcatcaccattcaacttagcctcacgcttaagttgaatgagctccttctcttgctcagctccctcagctcggccggacatggacttcttcttccacccactcataggctggggtataaagtctgccggataaagcttgtacatcacaaagttgtcctccgaggtcaacaaagtgatattccgagcagcatctggcagctaaagaatcttttgagccctgtccctatgtgccaatgtgaagggtggatgacaatacactgggatctgttgaaaccgagtataggtggtattaatgccttccacgaagtagtactcgtcaacaaaacccctgatcttgctaaccttcgtgtccacggtgtctgtcagccacttgtagtctggctgagagaagtagaagtaccccaatctgctctgcttaggggtagactttaagtcaaaaagccagttaaccccgtgtggggacggcacgccccatccttgaatggcgtagaggacgaatagggcagataagtacttaatgcccttgggagtgaactggctcggacaaaggcaaaaataacacgcaaccctcttgaagtacgagtgcaaaggcagcatcgccccttgcttagtgtgggcaccaaccaggcgcaaaaccctttctttgggttagtttcccggtggttcgaagaagggacgtaaaactcaagttcgcccaggtacccagctttatccaagaccctcatacgtccctcgcttattttggatggagggcacacccatctagcccctaaagaactttgcctcctgtgcgggactgccttggtaaactcctcgatgacatagtcttccccctcgacacagatgtcaccctccgcagatactggctcctcgacctcattataccctccaaaatttgggggttcgaccactccttcctcttgagcttcggaagggctatcaggatgaaaatcgtcctgctctatttcctggacctcaatgtcccccttgtgatcctcctcctccatagagggcagatcctgctcggcacttagcaacgtggcaagctgggccacatgagggtcagaggcactaactttccgcatcgtctactttgtgcgagccatcatccttctcttggacagatactgatgtgtgtgctgtgcaacagtaacaatagggatagatagctattggaataccaaggttaccagaacttggacgctcaacggaaagagtatcagtcacacctggttggacaatatatgtccagttggatagaaaataacgtctccaacccttcttcaactcctaaataaagcgactgtacccttctcctacgatcttctcggagtaagagtggtgttgcacttcaggttctggagtaggagagcgatcactactcacttcccaatcctcgatgctcgagttagaaagtctgtcactcgaagagaacggattgtggcaataacgaggttgatcctcgtatagattttgaagcaaatcctggtcaattcggtgttcgcctccccaaaactcaccagggttcatctacaaaagaaaacgcacgagatgagtgtttggcaaggatatcgaacaaaaaacaggcaaatatgtcgactaggaccacccaacagcttagaaagatcaaaaacgtacaaaaattaagtcataacccaggagttttaaatttgtgggttaagtaaaaaaattttatgaagcttcgaatgagcaaggtgaaaatcaaacattgcaagattaaagttagaatgtcgtaaataacaaagccgtacgaattattatagagaaaactataaagtttcaagcttagattttctgtgtatcttctacaacaggtcaagaacaattgtattttctacaatggaaacccagatattaaagatacaaagtaaaagagaagaatattgaaaagttactcactgtgtgaagcctaaatgtaatccagacgaatctgctcaggcagctctgctagaaatcccatgacaacttgaaatgaaattccttgtttgctctgagtttggtttgtggagaaaaatggtgaaagtaatttatgagaaatttcagcactattcataggcttattggtgaaaaggggtaatcatttcaaaatccccagacgtttcgatttccccccaaaagtaaatattgggaaataaaaaacaatcaagtgcctcaagagaataaccataaaagtgtgcaaaggaaaccgtgtctcgaggcattaattaagttagagcattaattagccaaaaaccgaagagacacttggtcagattcacacacgaacagatgcagctcggatgaagtctccacgcagcttcggaagtcccgtacagacttagggggcaaatgttatcccaatttttgcactcttacatggcatcacatgctagtgacatgtggaagtgattccccacatctgcctgaaggagatgttccgagccgagcaccacatatacctgtacgaacgaggtcctcttagtcgagcagtggacaatccgaaaaacataccaacacttagcaatttcaacatttgcatcatgaagcaaaggaacaatccctataaatctgggatcgtatcacaaagatatggcaagctgtccaaatcccacaatctgtgtattctatatagatgtaatatgtattcttactaattatagacattgtaagaaaaagggaaaccttccctcaagcatgtagnnnnntaaatagtgatccattctcactggtaaaggggttgaaagaattacttaagagaaatctaagagggcatactcagatatttcattgtaagagctttgagagagggaacattgtgttctttgttcttaagtcaatacaaatcaaggggagtaggctattacataactgctcggggctgaacctctttaaaaactctgtgttctttatttatttatttatcttttcatacgatatctaaattatatcacttattgcttacaattaagactcgttgtcgttggctaaaagcaaggtcaacacctagtttttccacccatgagtttgatatatgatcctttgccatgacacaaacctcatgatggaaagcgcaaccttttatggaatggtaggctttatgtttcctggagggaaagctagacctgtgtcctcacttgagaaattatcccatgctgaggtctatttcgataggtgagagtcgcattgaattttgcagtagcaaactttggctttcacgggcaaaggctaaaggtgcacaaaaattcgaacaatgactttgcttaaaaaggccaaagggtgaaacatcactaggcgtgtgacagacttcaagcagtccttctcttctaggaaggaggcttgaagatgttccatacccccagtgatctttctcgaatgaaaaactatgtgcatgcaaaagtcatgttgaatttttatgaagcaaactttggcttctacgagggaaggctaaagtcgtataaaagttgaagcaatggcttcactttaaaagaccaaagggtgaaacatcactgggtgtgtgaccgacttcaagaagtccttctctttaaggaaggagggttgatgacgtgtcgtacccccaatgatctttcatgaacaaaaaacaatgtgcatgcgagagtcatgttgaattttaatgaagaaaacttcgacttccgcgagagaaggctagagttgtataaaaattcaagtgatgacttcactttaaaagaccaaagggtgaaatatcattgggcgtgtgacaaacttcaggctacacttctcttctaggaaggagggttgaggatgtgtcgtacccccagtgatcattcatgcatgaaaaataacgtgcatgcgagagtcatgtttaatttaatgaagcaaaatttgacttctgtgagggaaggctaaagttgtataaaaattcaagcaatgacttcgctttaaaagaccaaagggtgaaacatcactgggcgtgtgatagaattcaagcagtccttctcttctaggaatgagggttgaagacgtgctgtacctccagtgatctttcacgcacaaaaaacaacgtgcatgcgagagtcatgttgaatttttatgaagaaaagtttagcttccgcgagggaaggctaaagttgtataaaaattcaagcgatgacatcactttaaaagaccaaaggctgaaacatcactgggtgtgtgacagacttcaagcagtccttctcttctgagaaggagggttgaagacgtgccctaactccagtgatctttctcacacaaaaaaacctcgtgcatgtgagagtcatgttgaatttttatgaagcaaactttggcttccgcgagggaaggctagagttgtataaaaattcaagcgatgacttcactttaaagacaaaaatatgaaacttcacttggcgtgtgagagacttcaagcaatccttctcttcctgcaaggagggttgaagacgtgtcgtacctctaatgatctttcacgcacgaaaaacaatgtgcatgcgagagtcatgttgaatttttatgaagtaaactttggcttccacaagggaaggctaaagttgtatggcaattcaagcgatgacttcccttttaaagaccaaagggtaaaacattagtgcgaatgtgagagactttaagtagtccttcttttccgtgaaggagggttgaagacgtgccatacccctagtgatctttcatgcacgaaaaacaacgtgcatgcgctatccgtgatccgggagggttcaggggatgtgaatgactcaattggcaccaaggatctcctgggtagtctgtcgctcagggtatacttcaaggcacctagtagttcttaaggaaaggactcaaaattctaacaaggtgagcattactctgatagagatttcccagctggtttataatgtctcgagttactgtctcgggtgtagcttcaggggtcgtacttacatcgaaatgatgtcaggaaccttcaccagaagtgatttgccttaacaaccacttccaaccaacagtaccataacttggcctgattggaaacccagtgggaatcagtgatactgaaggtaccttccaaagcctcaccattacaaattcagtttctgatcaacttcacggctcaccgaaaaggtagtggaagtagttgtcgacaatagatttggcccttgcagtagcactagcgctgaggtcgaaggttaaaagatgagagtcatgagctggatggagtcattatttccgatgacccttcgtgagttattcattgtaattgcatttggtctttgcttctttgcctggccccaacacctcttgcaccgcattgtgtctgtgtggtcatgccccattggataccaagggattttagtttgacgatactggcagtttaccacttccacagggagttggccgactagatctaagcttttataaacgtgcacaagcactacgagcatttcaagaccatatgcattcatcctctgtactttcttcatctggacaggggtgtaggcgttcacttttgtcaacacctctgaccaacatatccctggtccaagatcggcccctggcaagcaataaggtggccttccttcaaatttgtgatggtggacactgcacatgtttctatcttctttcagctctcaatgaaagcacaaaaaaatttactgagtttttggcaactaaatatttttagagcttaggaaagaaataacagaataaataacaaatatgagatttttacgtcgtttagactttaactattttagtctacgagtccatttgattaggctcatcggttggtaattgttcatacaagttagtgtacaatggactgaaactcagttttcctagtgtacctcttgaagaagaggaagcttggtaagaatctgtacggagttttttaataatcattttatatttaacaaatgtctctcaaaagtgtcttgccctatctcgtgttttattggggtatttataggccaacttatttccatgcgctggcttggactaatcatctttgggcgaaatccaactgttagtttggtaggtcaccttttctacatatggcatttaagggtgttagattgtacaggctgggcatcatacacgtgttgtcccagggcctttccttttcgaatttcccttatctctagctgttggatcattcggtcaagtacgatgggacacgcgtgccctatactatggcgtatcgtgggggacagaccctgacatcttacttgaaaaatcctagctattaagtccgtagtctaacatgtacgagcaaagttttcaaggagcaagatttaagcttggccaaacgcatttcgatacgcctttaatcctccaaggaaagatccatattcttcgcgggagcactttgtttagttttgtgccctaaataaaac

SEQ ID NO: 115396 - DNA, 4111 bp, Cannabis sativa
tttacttttctttctaaagatgatgaattgatgacatctctctatgtatgtataaatatatctagattgggttttgcagggtctcttcacatgtattgcatgtgaatatatataacatttatatatatatatataaatttatatgtatgtatagaagagtgttatatataggtagatgatgtagtcagtggtagagtagagagttcaggtcccatgtataatgcagtgtcttaggtcatccaaaatcattactctttaaaacccatgtatgggcactactataccactacatctacatgtggtgcaaaacaacaaggtaaacacatatttattacagtactgcaacaatcacaaggtagcgttttgtgattggttagtttttcgttctaatagacaccttgcaagtgtctagtgagcatcctatttttattttctgaattttgatatgtatcaaattatgtattaaagtgtatcatctaaacttttttagcagtttaatattctctcaaaattattgagattgttggatttaaggatttttatctaatttcgtttaattttatcatagtgtctatccatatatcaaatcatgtctaaaaagttttgataagtaccaaactgtatctcttaaatttttattcgtaccaaattgtatttcctacgccagatattcgttatacgccagatattcgttagtaattaattggataaatttttttgaattaatctaacaatctcaatgatttaagatttttttttaacaatttaaaaaatttagaaacactatttattatatgtcaaaattgagatttaagaaatttttttaacaatttaaaaaatttagaaacactattttaatttattatatgtcaaaattgggacctcaataatcctaattaattaatcttatttatatatattacatatgatatatacgtgtgtgtttgtgtgcatataaaagaagagcgcagcttagcaggccctatacagatgcatgatgtacatttatagccacattccaataaaataataatgttgatgggttaataaatattaggtgcttctataatataataattaatatgcactcataccgatatatttttgatgtgttttagtacttgagaaaatattttaattgattttttttttttatttatgttacagttatttaagatttgaagagattcaaaaaaatttaacaagtcgaaaattatggttgaaacagtcttttattttatacgtatgtgaaatacattttttaaactttatttttgacgtgtgttaaatttttttgaatatctcaaaattttaaaaaactatgaaaaaaattagactataaaattcttttaaatatcgattaaagcaaataaaagtacatcaataaactttttttaggagtgcattataaatttttttataaattatttatataatattatatatatgagtataaattaatatataaagttcaggtgaaaagcaatatatatacatgggatttgatatcttagagatttttccttagaaagctagttttcatattaattcttctgctgcctttgcatgcatggtgaatatgtaatatattatatatatataaaatatttatatatagaaatttgtgtggagtagctacgttgacatgggtgatcattgatcgatccatagcaaggccaagctatatatataaatatatatatatatatatatatacatttgaacatgagctataattaaaattaatgtatgatcatgcttgaaaatttatgtccacctaattaattaataataaaacaaaaactcaatttcaagatattttgtatctgtatatatttaaaaattacaatgaagtatattacaattatctcgaaaacaattttaccaaaacattatcaagaaaaatacatatatatatatatagtttgttaacaaaaaaataattttcaattatatcactaaaaaatataccacccttttgtaataaaccatttaattaattataacatatagtttttaggtacttataacttttagttccaacaaaaattatttttaactaaattaaatgtatacttacaaactgttaatatataagaaaaattatttatatttagctacatgctttcattatctttagtcacaacttttcatcattaaaagtaagatttttttttgtaatgtaaataatttctacttaattaatattataatattagtacttttatactaattatgaatattagaagattatatattcaaaacaaaaaaatagtagtactgatgattaattgagttggtagttctattactactacatgtccttgtaccgttaaataatttacagaaagcctatttatgattttttttttacacatatatttatgattttcttttacacatatatttatgattttttatcactatatatatatataagtacttgtcttctcactaatatagatcaattttaaatttagtgaatcgccaaaaataaattgacaatccaataaagttgttgtacttcttgttttttttttaaaggttgtacttatttttttgtaatggtaattaattttgtacttaccatttatatcactaacaaaatatatatggatcaggccatgtcaactatttatttatttgtggtttcagcaaaaaccggtttatttatttgtaacacttatgtggggggtgtgggattgtttaagagtgatttctgatattcaaagtaataaaagtatagtctctccttatggccatattattttagagtgtaaggttttatgtgtcgagattgacaatatctctttgagttttgttaagcaatctgctaatagagttgcacattgtttggcgcgatcctctcttcttgaggctggctttatgtgccgagattggcaatatctctttgagttttgttaagcgatctgctaatagggttgcgcattgtttggcgcggtcctctcttcttgaggctgatcgtatttttaatagtttatctttaccttttgtaatttcttctttagtttcggataatttgaattaatgaagttttttttttttaaaaaaaacactcttattctattttattttttattattctgttaaatttctattgttaaatgtcaaggtatactactaatgtgtacactaacatacacgtggtatattttattagattatataattttaattatttaaatattatataaaaaaagaaaattattaatttgatgagtttttaatactttatgtgtaagaatatgattttttttaagttattttatgggaaaaattgaagagaaattaagttaaaattgtgataaaatcaagtaagaataattagatgggtaatcagttactaagggaggtagtcagttgccttatattatttttttctatttttttataacattttttttcctaaaatcttcctataaaataacttttccagaaaaaaataatatttttacaaacttatacataaaaaaccataaaaatgaaaattctcctcatttcttttttttttttttttcttatttccctttttcttaatacttttaatttcttcttccttcttttcgtgaggttgcctaaggctacaattgataaataaatacaaattaaatactctttatttttttactaaacttttttttttttaaaaaaaataatacataccttttattcatttttacttttttaatcattacaataaaaaaagtgaaatgtctttaatttatatctatttatcaattattatttatggcgtcacttgttttataataaaattaaataaaatataataaaaaaattatattattataaatttatattattaacaagcaatatgctataaataaaataattggatagtgtaaaaaattcagcaccaaaaacactaatatttatatatatatatatttttcttatgaatactaattattctatatattatctgttgaaccatatggctattaataaataatatgacgttacatatacgtgatatgatgataattatatatctattctatataaagtatgtctatataactaaattcttggtttacgagaaaattatgggtgactttttatttatatttaa

SEQ ID NO: 115397 - DNA, 2318 bp, Cannabis sativa
ctataaaaaattttgccacaaaaaattacagaaagatttgggcaacaaaataaataagactcgatattaaattttaccagtaataccttattaacagttaggaggagatggaatgttgcatttagcgggtagttgcatggcgagagtaggatcgatgccaaaagcactgagtaggaaagggctgctatttttgtaatcacagaagcactgtaaatcggcgctttttaaagcgtcgcaacaggtttgggtagggggaacggggttagatgcggtgacagccggtcgacaagtgttgaggccatcctcactcatgttgcatatgcctgcagcactagacacttcaaacatagatgacacaataagtactattgccataatcaccattgttgccattttcatctccatatcttaaaaaattatctcttctttattattaacttactcctttgatagtattgttcaattaatttgatgttagtgtatttatatatgtgtagtgtagggaggaaagagattggaaagattgtaaaccacaagtttgaaaacccgtgaatgagaattggcactattaggctagctaagggtcacgggaacttattctttttttgtgtgttaaattaatttattaataataatgagtgagtgagtttgaccttttgggatatggtgattgttatatacggttgtatagtattgtcttatgtttgtatacaactcatttaaaaacaaaaatacactaaaagtacgaaatcataccagtttggacctatatatataacttatcttttgttgttaataacagagttatatctatggagatgaacagagtaagacaagattaacttgtgataaactaattgacttagctagcgatttgagttccgaaaataaagtaaaagattaaacaaatactatctaaatatataactttcattagtgatcgattgatctttgattagtttggtaaacaagtaaataaaaacatatccaataagggcttgtttgacaactggattgtattttatagtattgtgtttggtattatattgtattaatagacgtgtaaattatattatctttcttgactataaactcgactccaatcccaatacctaaaccatgactttggactcggacccttgggtcgagtttagggttcagtccaggattagggtccaagtttggagttcgggtctggccgaatccagagtcgagggtcaggtttgaattttgaggttcgggactatggctaggctaagtctagagtctaggtccaaattcgaagttcgagtttaaatttgggtttgaaatttgggattcgaattctttttaaatattataatacaaactaatacatattatttgttaaatatttaataatacaattcacatgtattaaatttatagtcataagaatttatacaatataaaattttattcaaacataatattttttattatttaatacaatacgacatttatattaaataaattaaaatttgaagtcggcataactttataaatttaatgaaatcttcaaagtgtttattttagtagaattataactattttgggtgaatccccaattccccatacaaacgcattcttttatgttagtgtggcgtgcaggaccataaatttttacaagagtcaaaatttaaatgtataaaaaatatatatgatttaaaattattaaaattgtaatactatataatatataccaaagaaagtattgtaaaaatataacaaataaaattaatgggaacccgtgtaagaatttatatttttcttttaaaaaaaaaaaggattaagaactaagaatttatgatcaattgccccccatagtcattgaatatccacattatttagggcactctaaataaattttctatactattctttaaaatagattactaaaattttactttctctattagtctctaaattttattttctacatcaaataaaatattttatctttacatatttaattacttaaattaaaaaaaatagaaaaaatactaaaaaaagttaattagtaggagagagaaaaaaaaagattattaaaaaatatatgaagaagctttaaaatttctctctatatgtggagatgaattaaaaaatttctattttaaagagctgatgaagttattttttataccattttctttataattttaaaaaatgtaagagtttgaaagaattgttgggagctcttgttgagtaaactgctagcaaaataaaagaggaacgatattaccgaatgaagaattctgggttgagtcgcggactaagtcgctctctttaagacgttcgcg

SEQ ID NO: 115398 - DNA, 2060 bp, Cannabis sativa
tcctgtttagttgtcaaagacacatgagacatgtcagtacaatcgttgcctaaggaacaaacgaactttgaggtataatcaacacctacttcctaaacagagaaacactagccactagaaagaaaggaaaaaaatgaatgatcaaaggacttttatgtaggggtaagaaagaatgatggcattttgaaatggcaccaatataaagaaaaataggacaaattaccctgatgatacattggttgctaaaagatatgaaacatatgtaccttccattgccaaagcagcattgaccattaaatggttcaatctctctgcttcttgccgttggtcttctttttcaggatcgaaaaggataactgtgtggaaatttccatcaccagcatgagcaatgactgtgctgtcattaggaacaaacgaataaagcattaaaaaccatggacatacatttcaaccagctattccagaaaaacacttgttctcatgtacttgtgtttagaagaatgaaattagaagataaaataccaggtcaacgacgatgcagccagcacctttttggactccgatatcagttctgctaggtgtgaaagaggaacacatacatcctgcacaaaaatgagtacttttaacggaaggctgaagaaagattaatttggctgaatcataaatggaatcatttatttataaaaagtgatcagcacagctgtaagattctgctagaataatccaggaaacatggataactatgtagtactaaaaatacaacaagataaaatgttgataagacaatttagtcatgttcaattaaccacagcagttctaaacaaaaactaatcagccacaagatcaatgaattttatatatttagcaaattcttagaataactgtgatttttcacggctttgttaatttttcaagaacaaaagggaaacgaacttcaccgtagccattgcctcagaatttggtaccattgcaaaacaagcccagagtgcctcctttcttatctgcacataaccaaaacttaactgaataaattaataattggtgtaaacaaaaccctggccagtgacgcgacctcaaatgacaaggtatactttttagtgaaaagaaaataagagccaaatacaataatagcttctggttctgattctttataaactatgctttatgtgataaggcaatccaaattcaattgaacaggcacaggaatggaaacaaagtattcaataattcttgttcttttcccctttgaagaagtgactgaatcaccttaagattgaataaatatatatatagaagaggagggattacatcaatccaagaaacctatcgtttagccaaaaggcatgcaaagtcaaaatatgattcactaaaaaactacgtgactaatttgagacaaagttgctctcgggaatttagacagtaaagcttgggggaaaaaaaagatccaaatgagcactccaagcagcttgagtccaaaagggtcaccccaaaaaagcatgagaaaaaaaaaaataaagtaacagcagaaccataaacacaggcattgaaaggtatgttataaaggtctacgttcgctaccttccaaagttctttttttgcttttgggtcttctgcaaaaacaaagtctgagccattgtgtttggaagcaatcttctgaacgatttgtgtttgctcacgagcataagcctctagaaatggttcagaaattgagtataaataacaagaagattttttttttctaataaggaagatttgacacttaatcccaatagagaaaattcaataatatctacttcacctgtgccgatgaattcaaacaataaggttggagtttcaggcaaattctttccattggcaatgttgatagccttgatttgaacctcatctagtagctctacccttgataccttgcaagaattaacagaaaacctgttaagatatgtagtcgaaattcaaagcataacatagagccggattcttacctgtataccagaatgcatagtagcaatagctacacccgctgcatccttaatagtaggaaaattacacatggcaacctg

SEQ ID NO: 115399 - DNA, 1038 bp, Cannabis sativa
ttaaaaaccgcctctaaagggggtttttgtagtagtgacatatcaaaaataaacatttgtcccatactagtatatacatacatatagatatagcttaacgtctatatatattgtagacattgtctcattcaaataaatagtagagtattgagccatatataaaaacatggcctactccactcatctccaattagttttgagatagaaatctaacatggcatcaaaatcatattcctagcggactttcgatctacacctatctagatggttgaccagtcgcacgagatccagatggtgcaaagacgcttgagatccgtacaaaaataagcgagcaaatagcttggcttgtgataaggtgattcaaaattggtgagcaaaaatagccaccattttgaagggaaatattgtggacattgtctcacgggaataaatggtagagtattgatccatatataagaacatgatctccacttatcgccaattaattttaagttggaaccataattctcaacaatatgaaattaattagagaccatatgacaatgttgtaatatctatctcaatctagttagctagtttgtcattttaattaaatagtggtatctatttatttagcgttcaagaatttgatcaatagggattatgacatttgttgaacaaatataatactatgtgctcatgttaattgtaattatatatgaaccatacttcgtttatgtattgcaaaaggaacaaacaggacatatatatatatatatatatgattacaacttcgattgaagaaaaagaaaaacaacatatatatgcacctaagcattggtgcttattaaaatccaaagaaacaacaccacaaataacaaaacaactacaacaagagaaagatacacaaagctatcatagagcataaaacgacttatcttctaatttcgcatgatgtacctgttaggatttataaaacacttaagaaatatataaatcacagatccaaacatattcctaaaagtgctttaatatagaaaaccctaaatcataaatcta

SEQ ID NO: 115400 - DNA, 1007 bp, Cannabis sativa
  modified_base (955)..(958): a, c, t, g, unknown or other
atgaaaaaaattagactaaattttttttctggaggccgaaacaagtagagggtgcatcaatacatccattttaagggggtgcattgtagaatcacccaatgataaaaatactttaaattgcaagcaaacattaaaatagaataaaatttgtttccttttatttcattctatttcattacctccacccaatcactattatagatcttaaataaatgtagagtaattatatataattttcttgttgtttttcatattatttttatagaacaccgtaaaaatataaaaaagaatcataaaatttaagcgtaaaaatataaaaaatttacaaaaaaaataataattatgtaattatctcttactaatactatatatatttttttttggagagattgctaatactatatttattataagtatatatactttgtaggaaagagaaccattaatgtacttaaaattactttgcttctaagaaatgttcttgttcttcttttaaatgaaagtttggatatgaatttgtcctacttctcaaatttcattaaataatatgattaaatatggataaattaaagacaaaatggaaaaggaaaaaagaaaaagcgtatatgtttgtgtatagctttgttcttttgatagaaaagaaaattcaaatgggtgacttcatacttacattttaccgtttgtcatatcttattttgatatttatttaattaattaataattctatccacaatatttataaattataatatatctattttggcaaaaaagagttacccaacgacccaacgacctaaagtcaagttgggatataccagaatttcgttactcaaaaatcagtgtaatattccatcttgcttttctatttttcatgattcaaatccttcaaacactagccgtttagtaacgcttttgttttttaattttttaattacaaaataaaagtaaaattttnnnntttaaaaaatttatttttgaaaaacaaaaatacgttctgtaactacttt

SEQ ID NO: 115401 - DNA, 3246 bp, Cannabis sativa
agggctaactgctaacggactagtcgtttaggtagttttaccaccaaaattttagattaggaggttagttgcaaaaacctgcccactttaggaggtttttccgcaaataacccaaaaatataatatcttattttatctctcttccgcattatttttggtacacttacttctaaaaatacttcaatgtatagcactctttaaaatattataattatgatcttacacattattatttaatatatatatcttaatttttaactataataactttttaactttaattttttattaaaaaataataaataacatcaatgctataatatagcatctatgtaaatttctaggatgacatcattttctctctaatgatatagtatcttaatgttttactataatatgttcaccataccaaatattttctaaaattttaccgatgatgctctaagatagtaaaatccaaaatgcagctaaatgtaaaagatacataaactgaaataattgcaacttaatcttctatctaatccaattaattaagtatcgatttaatacaaataattaaaaattaagtgataatatagtaaaaatatgtatatgtactacaaacggaacattagcaagaaacaacgggacaccgttgttgcgccgtttgtttttcacaaagtttgatgcatatgaatattaattgttccgctagatctccgttccgtttacgtcggtgcgagataagaactagattttggtttgtcaattctcacatgattaattaattaaacattctgggtgaaacttaaatgccctaattaatttccacatctccaacacacagctaaaaagctttgttttattattgtttctttaaaaacaaaaaggaaaaaaataactgtaatccatttttcataacatggtatatggcaataataaaataaaaccataaattgttccaaacaggctcacttaattacctcgatgtttgttctgtctaaatttaaaactgggaatctgggacgaggtggaagaaaatatcaagccaaaaaacaattaaaaatatataataaaaaaagtattcatgaactttatctacaacaacataaatgcaaataaacatgcacgttactcaaatttcactaacttgttttaattaaataaatcattgtaattttaattgatagtgtactatatatattaatggagaatctttattttttatgaatataattgagagcaaacaaatcaatatatataaaagaaaaagaaagtagaagaagtgtttacgtgtccttttataatttttttttctcattttttctattttctaatatatatttttatttagtttgaaaattaaacccacatataaattaaaagtctcacattatttaaaaactatttaaattttatttatgtaagttttatcagagtcattttaaaaatcttatttaaaaactttatacttttaccttttataaattactattcttttattttagtttgtttaagtattatttattttttaaataggtacttgattgatgaacttaatcttgcccaaataattttaatttttttttgaagaaaatgcataatatatttttgtacttttcaatatttatcaaatttaaaataattataaaaaaaatcctttaattattttttcatataaaaagtattatatttattttctatgtgagtaattgttaaacttaattttgctcaatcggttgcaatttttttaaagtgaatccaaaataaataattgtattttttaatctttgtcaagtttaaaataattataaaaaaataatttaatttttttttcatattaattttttttttataattatttattttaattttatttaaataatcaaaactatattgatttattagtatatgatatttattagaataataagacaccttaaatatatatttttttatatatacttctgtgatatgagattattataaatgttaaacttttaaattatatatatttcatcaaatatgtgagtgatagacattatttatctacacctatttttacattttttaatttttgcaaaatatttaaaattttaaaaaaatattttttaacaaataaatcaatatctatatctatatttaaatataaaggaaaacactaaagaaaatgaggtggcatcctataatatttaaatccatttttactattaaaagaattttagtaaatttagtttatttaatttattttatatatttgtagaggctcagaaatatgacttcttagtaaattttattattattattattatttgtaaaaatatcacattgattattagtatacttctatactataaataaagtatttttacactaacttttgtcaaaaaatatataggcagaaaatacataaattattctaacaaagtactcttatattaatttatatatttatctaatatatctatatatttataagtcaaaaaatgtgaggcatcattctattatttattatttttttttgaaatgcagcatactattattttaggatccttgtttctttattattttttttcatttacataatttttattcattttttaagtgacgtttgatatacttactaaaaaatttatgtacaacaataaagtataattaatgatataatagaatctaattatgattaaattaatgaatatataatcaattttttatagtaattactaataatatctgataataattaaataaagcaattagaaaattaaggtgatagaattacaattaaaaaaattatttcatttaaatttaaaaataattaaaagataggaaacaatcatgatttataatattttatttagtaaaaatatttataattatttattagaatataaatgggtaatttgcggcataaatacttataaatgtttcagattttctacacttaaatactttatttttatttttagaggcaaaaatacctaatgttacaattctcttacactcattactatcacttccgttaactcataaatatggacacatcgagggcctagatgtattatatttgtttattttattttaaaacttaatattcttaatatcgtaaactaataaatgctacttgtttcaaaaaaaaaaatgagagagatacaataccaaattaccatagctgaaagaatcagtgcagtattggaacataattatcgattgaagtgcaaataccatgtgaaaattgttatgagaattagtttttttttttttttt

SEQ ID NO: 115402 - DNA, 2674 bp, Cannabis sativa
gagagagagagagagatgtaagtgcgtataagagcggcatgcatatatggaaaagaaaattggtaagagaacagcaaagaccaaggaaattaggaattaatgtatacagtacaaggctttcaattgtatattggactattaccattttcacaaaagatgagatgtatcatttttttcttcttttacaataattattggacattggtgattggatagagcaagtatggagaaggctcttagctctctttataataggccagtggcaagtacaagcacaagcacaagcacaaacacaagtaaccactcttgcttgagaccttgacaacgagagagagagagagagagagagttggaaaaaaaagctaaacagataagcacgcatggggatggaactcactcaacaacattctaacatagttgatagactagatagatagatggagagagagaatggggagggaaagggagagaagttgtttctcttttcagcgaaagcgactttaaaagaataaataaataaacttagagagagagagagagagagagagatcccagtcaaaggagtattggctgtgagagtgcaggcctcagatgtatacagtaatatgctccttttgtgaaataattgtccttgtctctagctagggtttaacagccacgtgtctacatacatagatatttaagtctcatagttcacagacaagagtagaaaagatgtacagctcaagaatacaaggcaaataggtttttaacaaattttacagaactaattacgagttaagaaaataaatcataatttattttttaatattaacgatcataacatcaattttgataattttgtatatgtcaaatgaactataagagtatctctagcggacacataatctctagaattgtctaagatatcgaaagaggagaaaagggatttgcaccgtgcatgatcatctcctatatttgtttagcaaataaaaaattgacaattttaaaattcatatataaatcaattgttatatacgtacttactcttttggtagattttttttatctgttttgatatctaatagagttttctattccaaattatgatggtgactatgaatttttttaaaaaaaattaaattgtttgtggtaccgaaaataagatttaattattttattgcacgttactcatttttttagacgcgtagttagcaactctttgtcaactttattttctgcactataaatattttttttaaaatttataggtaattttaaataagtacaacgtacacaaatatcaaaaaatactgaatgaaaagctcttattgttgccaaaacaaatagagtacaacataatgactttttatgtaaaaaaaattcctaaatcaattatatagtaggtgaacattaattttaaaggattgctattgggcaccagtagtacccaacactttttataggtgttaccttatgattggttagtgatatttcctaaaacttattttcctaagttctataggacccactatttaattacaataatagtagtatgacactaaagaaggtgctaggcaccaatagtaccctttaacaattatcttatttttgtcttaattaatgataagaccatttcacaatgtagaaaaattataaaatattttttggaaatccaaaatatgtaggatttgtttggcattgtatttcatttatttttaaaaatgcacaaaaaaataaaatctaaaaataaaatacgtgtttagttaatattttctaaatacaattttcattttttaaaacaaaaaaaaaaaaaaaaaaaccacttcaatatatactttgagacaccgatgtgagataaattagagaaaaaatattgacaaaaaatctaattattttttaaaatagaaaataatattttattgtgttctcaaaattattctttcgtgactttgggaatgtgacttaataactaaaaaatttgttttcaatttttaaaaacaaaaaattgtttttaaaagataataaggggtgttttgctaaatttttttaaaaatagttttcttatcagttaaaaaaaagtaaaaataagaaaacatcaaaatattattttctatttcaaaaataacttttacttttttgtttaaaatatttttttaaatattttctctcatatactcgagtctagggccatggcacagaccgaggtctgggtcatacccagggtcaggtccaagatctgggtttgggtctgagtctggtctagggtttgggtaggggttcgagtttgagatcaagtctaagtttagattcgggcccaagtctaagtcttgggtccatgtcgaggtcaaggtgggttatgggtggggttcattatgaggtctggaatattaaagttgtatcttatattcaatttagtaaaaaaaatactaaaaagtttttagaaagcattaaccaaatgcgtcttgtatattttaaaaattgcaaaaaatatattttctgttcccatttctaaaaatcataatttccaaaataaaaaatagaaaatagaaaacaatacccaaaccttcttttattttagaaaactattgtaaagaccgctttgtttaatttggaaatcagcagttaattatgattgattatgaaaattatttatagatatttaaataattatttatactgctattattgaatt

SEQ ID NO: 115403 - DNA, 1740 bp, Cannabis sativa
gacataaccatctgatttcatctgttccaggagttgtacaggggatcttgtggaggaggttggggtaaagatccatcaagaaatgaagttttgtttctggtgccaatggagagtttgaagttgcgctgccatggctggaaattgcggtctgttagaacaggggtagccattaccaatccaggatgattagcattgttgggaaaatatggggatctcacgtcttcgtatgcaggacgattatgaagaggaggtcgagaatcgatcgcagtggatcgggaatctggaactgggtttgcagttcgatctgtgttgtcagtggaggttagtggtggggggaactggatcggcatcgaccatgggaggaagatcattggtggtagccgaagtagttgtcctaattctcgccattgatgattacttgtatgtgcaagattaagtttcttgaagcttcaatgagttgcatctgataccatattagctttgaagagctgaaattgatttttcattaattggaaaagtaatacaatatgttcataatggcaaaatgactgcttatatatagcatgggaaagtcggtggatataactaaccaactgaatataactaacactaataaccgtataactaacatgaactaactaagcctctaagaatcctttaaatgcaaagttcgaaatgttttattatccgaactagaatttgtaatttaaatgtaaatatcttcctcaaaagaaggatagtcatgcgttaggctagactattataaattaacataacttaagtatgtaaaggagatacaactatgattcctgccacagtgagaaaaccctagagaaaaaggatttgcttctctgaaagcatcttcctcataatgaatggtttgcttctttaaaagcatctgcatcattgtaaaagactgcttcacttaaaagcatatgccattgtaatcactcaagggaacataaagttttgggaacataactctgacctgttcttgaacattgaacacacaataaaactagaagtggactagctcattactgttgaaaggggataaaccactataaactcctctgtctctttttattctaaaagtttactgagctgatttactagacaaccttgagggttttttttaatcgttatgttttacgatattcttaagtcaattaacgaaaaactgcgtcaataattgtgttctcatattttttctttttattttcttgttttcttattgttttatagtgtttagtaaaattttaatttaaaaaaatttataaatttgatttttttttggagtgaaaatatatatatattaaaattatgcccaaaaaataataatttgtgcgaaaattcctttattaaattggtcaaactgtaatatatatgtatgagtcaaacccaagaagtgtccttttgacaattgtcatttttacatttttagtgatcaatctaatggaaagcagtgttacatgcattaatatatgttaggccaaattaaaaatatgcatataccttgattttgtgctatttggcgtgttgtctcagctatccctttctgcatttgtatatacagtagaaaaaaaagtaaactaaatataaaggtataatcttattttatttctaaatataaaggttaatttatttggtataagctatctttgtttatatgacaaatgatagtggcaagtaaagcaccattataatctcttctttggcctgtttttttttttttttttt

SEQ ID NO: 115404 - DNA, 2804 bp, Cannabis sativa
  modified_base (2766)..(2775): a, c, t, g, unknown or other
ttaatctttgatgaaaacggaaaatattctccaaagactctttgtaaaaaaaaatcctcgaaagacatacaaaatgtcaaccttggcactgggccagcaccaagtgccaacttgagcgctggtcccttgtttaggcccacatgttaacttgtttcttcccaaaaagtacttattttcccatttttgatgaagacgaagaagatgcaagagtcaaattttcggtttgatggttggaagtggcctatgttggaaaactttcaacctgggcacagagcaccgagtgctcctgggtgcttaaagatgaaagttctccaactctcattctaatgcttcatatatgttcgtcatatctctagttcatgtcccaatgtaaagtttgacctatttgcaccaagatggccccaaagactaaaaccctagttggtatgtcaacttaagcgctgagaagtcaacctgggcactaggtgcctgagcagtgggcgctccgagtgctccaaaatgaaagttctctgaatcttattctgatgcctcaaatatgttaatagtatgtctagtttatgtcccagtgcaaagtttgatccatttacaccaagatggtctcgaagactgaaaccctagctgggttttcaaccggggcgttgggtgaaaccctaggcacctgggttgatttttgaggtgttgttcgtgtattttcagctcttgggcctagacttggatgcttcatgtcatcatagtacgtaatactataacatagtaagttagaaacaacgtggcgggatccaaacacccctcccagagttcccagagtcaacctgggcacaaggctaaggaccccttccaggtcgactgctatgacttgagactacttaactctaagatgttatccttcttgcaacatgtcaaacattgatgtccacgtcactaagaaaagtttctaagttaacaaaagattttatttttttaagaacatgagaacagaatagaatggagtattctaatttataatgtaatccaataaaattattaaatcattgaaaaatatacaggtaaaaaatatacgtgtatatacgacagtgtatatgaatatatatgtatatatatgaaaagaatcattttaatgcataaaaaatattataattaatgaataaaggcaatccttataataagatatactaaaatgattaaaataataaattctttcgattggcattaacaaaccaaaacacacatatatatacatcaaaactcaaaataaatcaagacagagataaaaacggttttgatccaaattcttacacattattaaatgaaagataaagcatataagatcgatatgtagagcgaaataataaagacatatcgagcataaatgtgaacgaagaaacatattgtgatacctctagccattgatatttgagcatcaatcacagaaaatgagaggagctctctctactcttttatatagaatttactgttcatacaaaaaatgagtgaggagctcggagaccgagaccctatatttataggtaaaatactctgtcagtctttgtgccacattaattgtcataatattttgacaattaatttgagaattaatctaagaaatgaatgatatgataaattgaaaacagactatatttagaatattcatacttatcacatatttatttgtgatcaaatataatcattgagataatgcaaaatcaatttgaatgattttgtacaaatataagaatattctaatattactggaaattgaaagaccaaaactaggtataatcaagttgtattagaagaaaaaggtactaaaaaagttcaagatggacaaggcaaatgatgttacaacccttctagctattcacttaaaaatctcaaactcaatgtccacaaacatagaaagatagaaaggctatgggaaaggtacccatactaacattgttggcaacctaatgtattctatggtatgtactagaccagttctattacatgccttaagtgttgttagtaggtacatagctaatcttggagaggattattggaaagctccaaaacaaattctaagatatgtagtccaagggagacttgggacttattttttgaataaaattaggtcaacaagctgaagcctatggctatgttgataatgattattcaaccaatattatagacatgacgaaatcactcactggttttttgttctctgtgtgtggaaacacagtgagttggaagtctaatatatagaaagtagttgttccctaaactactgaagctgagtacatgacaacagcaaaagcattcaaagaagctctttggttgaaggacttaacttaagagattgacttcaaggcagaaagtgtagatattttttgtgataatcaaagtgttttgaatttaattaagaatcctaagttgcatgaaaggtcaaaacataaagacatcaagttccattttataagagacattattgaaaagggtcaagtttaagccaaaagagttagctctgaagacaatattgttgatatgctaactgtgtgaccctatagaagtttaaacattgtctcaactatttcaagttgtcctagtaactaatcattgagatttgttgtgtgattcagttactaggacatatttaatcacatgtcatgttgacatgtcttattcgttagtagttacatctgagaattagttaattaaatagatggcgtttggtaacacttttttaaccagttttctgtttttaaaagtaaaaaagtaaaaatatttttnnnnnnnnnnttctataaaactatttttacttttcaatt

SEQ ID NO: 115405 - DNA, 1081 bp, Cannabis sativa
tctcatttctaaaaacaattttttgaaaccaaaaaacagaaaacaataccaaacatgctcttagtttttttttctctctagtgttctttactctacttttattgataagatcattcaagggaaaacttgacaaataggctaatcaaactgtttacaagaaaccagaagaaaataaccttaacaataatctcaattaagaatccaataaacgacctctaattaagcaacaaaatgattattaataattgatctttcaataaaagtaaacacataattaccctgttatttaaattataaataaagaaaataactaacaaatgaccaaccaattatgacactttaactaaagtattcaactatgttatcaaaattttgcaaaatgttataaataactacaacgtacacaattataaaaaaattctaattaaattttttttgaatgtcgaaacagataggaatgcacgagtgcatccctttcaagagatgcattatagaatttttctatactttataagactaggagtggagtaggttagatacatcatcttaacttattaatttctcgacattatttgttctcattcattccaaattttgaaaaacatatatataaaatgcagaatatataatccaaacaatatatatttgaatcatttgataaagactaatgtgtttgttgatttaaatgtctcccttaataatgcatgtgagcatatccttaaaaaaatcttgcaggtgatgtacttggtggaactattgcaatgattatagttgtgttactcttaacctttggaatctggaagaaacagaatccaagtaatgaagacgttgatgccttccttgaaatctgtggaaccattcaagttagaagatatagttattccaatattataaaaatgacaaactcattcacacaaaaattaggcaaaggagggtttggtgatgtctacaaaggaaagttagatgatggctttgttgttgcagtgaaggtgttgaaccaatccaaaggtaaagatggggaagatttcatgaatgaggtagcaaccataagcagaacttcccatgttaatgttgtcacttt

SEQ ID NO: 115406 - DNA, 1866 bp, Cannabis sativa
agtaatctgtgtaaatttccctattttaaaagtttttatgttaaatatagcacttttaagtttgactaatttatatggtattttttttatatctttttatagtatttgtttttaggtctctctctctaaattctttcaaaagtgagttgagtaccagcccatactatttaaggtgatactcacatctttgtggaagatcgttaagaattatcgcttattgggttaaggaaagctatctaagttcatcacttgccaataccctactacaaaatgagaatcgagggtgcaatgtgaggatcctaaactatttatgtcttatttgaccattttgttaatttcatattttaggatgttataatattatttgatcatcaaacatgcatattagtaaagtcagatatcttggtaaaataagttctaacatgaggcttggatttgggtcagtgtttggggtcggggtctacatctagggccgcactgggttctgcgtccgagtcgaggttcaaattcaggtacaaggggttgggtcgagctttgaggcgagtctaggtttgaggccgaagttggggcctaaaatattgatagaaaaaagtaaaaatagattataatttaaaaaaatttggaagtgatttttttttaaaaaaaaaattgatttttatttttaaaattaaaaagtgaaaataattttatagaacatgtttcttgaaaatatttttatttttataattaaaaaataaaaaattaattgaaaaaatattagaaaactcacccttaattattggtctgcatatgcatttgtttgttatgatctttaattataaggtaagtcaattaatgatatgataatacattcaataatagctatattcatttaatctgccccaaataaaaacaggctaaattaggtacaaacaattttcaataattaaatatttatatacaactcaatccaacaaataataagtggcaaaaaaataatgaagaaaagaaaaaatcaatcttgaataatatttggatctattggaacataacatggaaacatgtaattgcttttcttctaaaaaagaatatgaacacatgaatgaatcaatcaaactagaacaaaacaactccaaagaaaagagtcaaacacaagaagacatgaagaaaagtttgttcttttctgattggtggcgacgaggatgttctactgcctcgagtagaagtacctccagcggctgcagccccagcacctctaatgctgcggccgcctcctcttcttcgaacgtaaatctgaagctttagagcttgatcagaagatgatcttctatgatgatggtgatgatgacgaggtaactgattttgttgatcatctgaagaagttggaagagattgagatagttctagtaatagtactaagagaacaaatattgaaaaatagacaaaacgtttcatcttttatgtatagctaaatagtagagagagttggatctgaattaattgaattttagagctaagaaagttttctttttgggggatgttatatgaattgtgtgagttgtgttgtgatcatctacttataataagaaaattataataaagtggttgttatgctatggtccaatgttaattaataatgagcttaaaatagtgtttttaatgatatattgtatttattgtatattgaatggaaatcctattataatatagatattaaattttttgtctaaccgagttgatttgttctagtcaaatagtgtatatccaattttttttttttgttggtcattttccactattaaatcagctcgttttggtcaaattcttgaagactttattatattatttataaaaagatagtgtataaagtataattatcattatatc

SEQ ID NO: 115407 - DNA, 1005 bp, Cannabis sativa
gaaaatcaaatttccctttgtattcgtatgtaaattatgaatttggtatggatccttataacttaatatatttgatccaatacatacaaataatgtgtcttagctagtgggagggagaaatattcaataggggcaattgtaagaaaaaagtaatttgggggcaatattataaataactagctataattttttatttttaccaatttaatacatacaaaatacatataattttttatttttattttggagggctacatccccccaccttacaaagtggctgtcttgaccaatggttcatttgttaggggaaaagttgtttattagtaaataacttgaaaaatatatgatgcgattctatgcaatatacctaaattaaaactcatgacacactagctcaagcagtatagtaagtagtaacattaatttatcatatgtggtatagactaaattctttttaataataatttcgtagattctgaaagttaaatttctcccatcttaaatgtaaaaggaaaaatggagtaagtcacaaatttcgcaactggttcagtgattttcttaatccaatgatcacacaagtaccgtaagtccaaaatattggagagtagtcataattgcatttgttctttttcagagtgaaaattaggagaaaaagaatctggtttaggcaattttgttatttttgggaagtttaggggctattattaatggattcatatattgggttttccacaatttgaatatttttcaaacttttctgccagacggcagaaaccgggggtctagttctgaacttgtcgctttctaagcattttttataatcaaataataatatacccaaaacgcccctctcacatctcaccaatttctttcttattttatctatttttattttttatcttatttttccgccagtggtcccattctttattattaattgttataggatgattctacaatgcacacctttaaaagagatgtattgatgcacccttaacttgtttc

SEQ ID NO: 115408 - DNA, 2669 bp, Cannabis sativa
aatttataaggcaagaaatcgaatatgaatgcacaacaatcttaccataaatggaaaaattattttgtcaactaacttgccaaaaaaagactttacaatacgaaagagatatattttttctgaatttattatctatcattattacgatcatgatatataagaatttatatataatattcttgaactcatgtatctatacttaatttccaatatatttcagaaaaataaaataaaagaattaattagaagagatcaatgcatgaccccacaatagtttcttccacatgcatatatgtagactagagttcttgttaggatctactctatacccaatagattatatataaatatatattatatatattaatatatataggagagaacatggttcagctaattagtatatatatatagcaatgattcattaattatatataaatatatgtcatatgccattgagatcatgatcattgcccaatatggtcaaatacagattcatatatagcacaaatgttcttgttagttgttctactaatttatatatatatatatgatcattacacgaacatggtttaaaaaattattcatcatcccatgtgcatatgggaaaaagctaattaaacatatattatcgcatacatatataattttccccaatgcattataatatctctgagctgtatatatatatatatatatatatatatcaactatatatataattgtaatgactcgatctttattttatagaaatggccggtgctacaatttttttttttttttttgagttattagtgctgcaaaattattatatgcacacacatatatatacatatatgggaatatatatatatatatatcacatatatatgtggtcgatcatatagccagcacggccatccataatcgatttatataattatgttatagtaagaaataataatataatgtattatatgatgagaaacaaataataatatgatgaatatatatagttggtaaatatataaagatataattataaatttattaataaaatgagttgtataaggagagagtagacgtacatgtacaaatgtttccttaaatgataatcatctctatatatatagtacacgcgaccatataacaaccaatcatatatatatatatatgatctctatatatatagatatatacatagtggttgtatatatagtagtacgtagtagagtaattaatatttttattggataatatatgcatgcatgcatggctagagttttgatcgacatgggttttctaatattttactttttatctttgagagaaatatgaataattaataataatatagtaatagaggtaaataatgatgatgatgatatatataggaggctatataaaaaatatatatatatgagtaaatttatagtataaataacttaagtttaactcttatttgtatattataaatacttaagtttaatttttgacagtaatatacataagttatatttccaaaacttctgtacttgactgttaagtgtcaaattaataaccatgtgacagtttctaattattcaggtcattaaatatatattttttatttaaaaattaatttaaatatattaataaaaaaaaatgacatgtggatattacttgacatttaaggaacacgtttggtatgaagtttagacttgataagattgagaatataaaattttaatgatcaaagagtttgtttgatgttttccaagtgaattctacttttaaaattaaaatagtagtaatgttaatcccatccaacacttgaattttatattcccttcatgtctactcctccaactcaaactcacataacaaacaacaccttattaaataacatttgattagaaggaataaaaacgtaattagaatataaaaatgacaatattatatattttaaaataataaaaattatttcattttcattctattttttcattacgtcaaactaaacgaaataagttaataattaacccaaaaaattactctctatatataatggatatgtataagtatatttataaataatgtgtgggtaaagaacaaggcaaaggcaagatgttggagttggtttgttttgtttgtatgtgttatgagacaataataagccatatatatgacatgtcctatgtgtggggtccacttatgtctcctataatatatatatttatatatattacatcacactcaaccatttacattttgccacgtccaaaccatatagtatatcctccgacaaatttatataaatttgactatatatattgaaacaattaattaaaatgatgtttaaataactcatttgaggagtcattaaaagtcataaatacataatatccatcacttttggcaactattataatctaattatatgagttcataaaccataccacattaatttgttacatgtaaatatttattctatataaaatgtagttatataataaaatttttgatttataaaaaattattgagtgatttttttttatttaaaaataataaattattagatgttgtcacgtaaattagtcatctataacaaaattcttaatttatttttttattaaaaattattttcaaattttaatatttagaattagttaaatgttaaattttaaatattattttaaattaaatttgaa

SEQ ID NO: 115409 - DNA, 3829 bp, Cannabis sativa
tattttcactttttcaattttaaaaacagaaaactaattaaaaaagtattaccaaacggcacataaacttataggatcacaatttaaattaaaaacggaaaatattagttaatccacaaattaaattttaaaaattgttgaaaaaaaagaaaataattagtaattttatctcataaactttcgacaatattgattatgtctcttaaaagatacagcttgttaagaatcccctaaacttttatgattacataaatttagtccttctattaagttatgttccattatttcgtttaaatagtgacatgtctttgtaaattagtaattttatcccctcaacgttgacaactattaaatcgcatcccttcaaaataaaaatgagaaaaaatcaatatttttttaataaatcttgaaaaaataatttagatcttagaaaatcatttttaatgattaaaaaaatttaagaaaaaatttaaaaataattaaatgatttacaaattatttattctcttattaaaaatatatttatatataaaaatatatattaaaaattcaatttttgtaaagttaaattttatgggaacaagtttgagtctgttattcttcctccaaaaatctagatttgtttaagtaaacaaatattcttttagttgaatttttaattttttttgcaaaataattttatatttttattgaatttctaattatttatctttatttttaagatatgagtttataaatataaattagtttgatattttcttcaaaaaatatttatttgtttaaaatatttattacatttttttataattttgatttgattttttaagttacatatatttatataaataataaaataataaagtttagaaatatttttttttaagaataatttatgtttttttaagtaaatttaatatttttattaaatttttaatacttttatattaatttttttagaattaataaatattataatttttaaaaataatttttttaataaaaaagaactaaattttgtattagtaaaatgttaatttttaacggtgaaagaaaccaaaaaaaacaataattatgtaactattttaagggaaattttcaaaaagtccaatattaaatattttaaagacaagatcgtgttaaaactttaaatgtaaaaatactaatcattcataaaaatatatatatatatatacataagagatatattttagaattttaatttttgatgttacccaaaataaaaagaaaatattatgataaaccgagaaaaagaatctcatgtaacgaaattgtaatatttttttaaatagcaaaaatctgtattaataattgagagaggggcccacctacggcaacgcgtttgattgtcggtggggaaatagagagagagaacgtgtcgtacagtgtggagagaaaacagaattaagaacgcggaattaacaccaccctcgtctcttcacggggctccattctgctgacgtggactgcttcttttgtcttaaactgatcaaattctcagtctcagtactgcctccctcccacatcaatttactctttcttcttcttctctattttttaatgtaagggaatataatactattattttatgttgtttaaattaaacaagattaaccgcactttcataacgctgttcagacttatcttaaaaacaaaactcaaattaatataattctatttaattatgtcggaattttaatatataattttttaacattacaaaaatagtgcccttttctaaaacacagattataatttttttgtcagaaaaaaatatctccattttgaatttatttttttagaattaacgagagtatatatatatttgatataaaatatactcgtttaagcagatttcattaattattattttgttatcaagtgtttggcagaaacatagtctaaactttctcgtgattacctttgacgttaaactcacaagtcgatagatatatagatatagtctttttaaatatgtaaatatgttactatatacaaaaggttgaagtagacattatggtttttattttaaattgtgttttgaatagatttatctaattttgtcatttggcacagttgtttgttgttgcaccagttatacgaatgagaaaaatgaagcaccagttgtcaacatttactttggcatactatacaatacaaaccacattttactttattttaaatgcctataatgttttaattttctttcttaaaaacaaaacaaaaaaaaatatgagtgattttgtttgtatactttcttatatcttctccttaatttattattttagggttcatttagtacgccgtattttattgtattatattgtgtttgattatattatattaatattatttaatacaatactatgtcttgtattgactttattaatagattgtgtaaagttataatatattttcaatacactcgactccaacaccaactacaagtcaggtccgagtttgggtcctgggtcctgggtctaggtcggattcggatccgggtcccgatacgggtctcggtctaggtctaggttctggtccggctcccagttctgggtcggggtctgggttcagctcctgagttcgtgtctgagtcccggtctgagtctgtgtcccggatttggattcagattcggtttcgagttcgggtcggagattgagactgaccctaaatcctttgtaaatattataatacaagctaatacggaccattttttatgtattaaaaatttagtcgtaataattaatacaatacattattttatccaaacatagtgttatttattatttaatacagtacggcccttatacggcataccaaacaagcccttacaattgaatataaaacaaccctatttagcaaaattatcaatcaatatataaagaagggttttgaagaaatgaggtggcactctcttcttctaatgttctactttttctaattcttaattttttgtttttttttttttttttgtatttaacactaggcaatatagccgccctttgcgcggcttaatttaattttttttaatattataataaatagttacttaaaaatataattctaatatataataaaattgtaaatatattatcttatttcatattattatcaataatttatttattaaaaactaaatgcatgattttattaattattatttagaattatttattaaaaagtttaaaatttattatatgtagtaatttaaattgctttgttaaaagaaattattttttataaaaataaataaataaaatttattattatatatcacttattttcatcaccgtatctcacccgttgtcatcactatattgcatcacttgtcattaccgtagttcacttgtagtcgtcactattgtattttccaaatctgtatcttaatcttatattgcatctcgaattttaaatagttttttaacatttttaagacattatagaaaattcattaggttgttatattattattaattaatatgttttaataaagttattattatttattaaatatcttaattaaaaaaagaaaaaaaatatataaaaatgtgatattttagttatgagaaatgctaaaaggcaaccctctttgctggtatcataccactattagtgtaattaagtagcatgccccatatataacttaaaaaaaaattagagaatatcactaactaatcatcacctatgaaagctgttgggtactattggtgcccaatagtaatgctctttagttataattatgtgatacttgacattaaagttatcattttaataaaagacgtaaagtaggcttttgttaaaaattaatta

SEQ ID NO: 115410 - DNA, 1065 bp, Cannabis sativa
gattggattgtgcggattggattggatcggttattttatgaacacccctaatgtaattggtttacataaatttatttacttaagaaaattagaaacttgtttaaaaatatataaaatatataaaacttatgctcaacaatacacaacctctacttacgtggtacgatggcgcgcgcccataaaaatgactattaacactagtgataatgtggtaatagttcatcataaaggactatatgcttagagcaatgacaagttattttagtaatggtattttttcatttgaaattctcgaccatgaaaactcccacatggtgacatgccaagtattcaatcaagataaagataattcaatgacacgagtaatcaaataaggtatttgaaataattacatgtatctgagcactcacagtgacaaaaaatacatgtttttctcacttgtaattctttcccaaatttacaaatttgaagtctaattactcaaattctatatcaccaatatcaatataattcaaaatatatctaaaatctatccaaataccattctcacaacacatagccaaatacattcaagaaaacacaaattcaatcataatttctatatcgacaacaattctatccatacaatttgttccaaaactaatcacaacttatcaaaagaccaaaaagaattagaaatgacctcaaaagttgcttgaattcccaaaagtcttaaagaatgattgaaaactcttcttcactaaataagggacacgactacaatggagagttttagggattttataactttcaagagtattgaaatggatgagaagggagaatgaaaaagagtgaaaaggaaaattcgttaccttggtttggttcttaagaatccctagccgattgctccttgagagttgggaggagttagaagcttttgaaaattgggtttgagtgaatgaagtttgaaagtgggaataagtttatttaaggaaaatttacacccattactgttttttcccaatttctttcgtttatactgttacacgctcaacttaacttttatactgttttttttttggcagt

SEQ ID NO: 115411 - DNA, 2718 bp, Cannabis sativa
tatagtccatgaaataatatttaatctttcaaaaggatttttctccacaatctcattagcatagcttattacttgcttaaaagataaatcttctttcgtctcgtgaaggaaagggtaatctaataaagttcaaattccttgagtccagggacactaaaaaatttcatgtgaattagaatcacccccataatcacaaataggacagttgttatgaggaataaccttacattgaaataggccaccattcgagggtagaatctatgaaagaaacttgcacttaatgttcacgattatatagatacataatataaaaattttcggttgattgatgatttctaacttcttttaagaaagtttcttatgggctaaggacatttctagtgcatgtatgagttaattaatatgagtatattatctatagatacttatattggttagattttctatctcttttatatgtttgaatttcattcttaatttgtgtagtatagtttgagattttttttttttaaatgtaatactttcagatttgatgacattaaaaatagtgttaaatttaacacattgaatgtggcacttaattgaatcagaccatcattaataaatactccattttaaaattttctatttaaaaaatttgcaacataaatatatatattttaaggagaaaaactacctgctaattgcctcaaccgcttggattcaggtggaagctcttgctgttcgctatgttgtttctcaatgtatcaactttggttttctcaacaatcagttcaaatgagactgcaagaacttatacataaacttacttccctacaagaaaaaaaatattttgcctgcgaaatttataaatttagtcagtataagttgagatatatcggggaattaaaaaagttttgtcggcatttgtttgtcattttttggcaataagaaaattttttgtcggtgcataattttgccggtaaaaattagttatagcagcaaatttatttagttttatcggcaaaaagttgcaacccaactgcgaaaagcgccaattgttggcgttttttaacattttgccagcgatcaattgcacacactatgttggcaactgcgctaggccagcaaagcaatgcttacgccaacgactgcactcaccgagaaaagacatgtcttttcccggcaaactaactacattcggcagaaaaaccccttttctcgatcgtctattgccaacaacttttccgacgaggtgccctaccctttgtcgacgcaaaatctgaccggtaaaactcaattttcttgtagtgctttcatagttttagattcatcttttagtttaattcttaatgatattaatgcttcttgtaaataatttaatattatgaatttcttgttttgtctcagaattgtcaatgtagtagttgatattcttgctaaacttattttgaaagctaccgttaaataagtctgatagtctgcttaacatttatgaattatgaaccttattttggcagtcagtatacaatgaatttttttaactctcaacccctttaagtgattttctcgtttagtggtgttctctaagattattttctcaataaataaatgaataaatatttaccatcattttttatagtcacgtttcaaagggacaaattactataagttagctgaaaaaaaaatcacacaaatctcacaaagagatgaccaaacaacagcaaaccacgccgattacagaaagagcaaaaatccagaaagaacaatgtcccaacaaagacagacaaagacatatcatgccccaaaaatagacaaatcacaaagcaattcgctttttaaaaatcttacacatacgcaacagagctttaaaattgcctgacgaaacaattccagcaaaaattgaactaagatgaaccctagaaaaccaatccaaagcaaaggtcacaatttcaaaaaggacataggatacaacagaaacacaccaaacaatgggaacaaaaactaaacgaaataagactgaaataaaggacacaacaagcattaataaccattagagcaatgacacaacaagaacgaacccacatcaattccctagcaccaaacaaacatcaaagctccaatctccaacgcctctaccaccctttatctaaaataagcagatgcacacctacgaaagggttagataacccactcacgttgaatggagaaacaaatgccaaaacgaaaccccaaagtcaatagactttgcacaccatgctggagaagacacaatctcaaactagcgaaaccagatcacgtcaaaccactccatccccaagcaagcctccactagagatcaaaactgcccaagctgaaggaacttccatcgagaaagattgctcaaagtgacaatgacaatcaaagtgtcattcaaattgctcacaactcagttttttatgaacgcaccaattatattgaaattgattgtcattttactcatcaccatctgaaattgagcaccattactttgccttttgtttcttctttgttgcaacttgctgactctttttactaagttgcatacaatttctcattttcatttccttttaggcaaattttcaatgcttcttgcagcagcatcacaagtttaagggaggatgtaaaataattttttaagattattttaggtggcgtttggtaacacttttttaatctgttttttgtttttaaaagtagaaaagtgaaaatatttttcaa

SEQ ID NO: 115412 - DNA, 4083 bp, Cannabis sativa
gtaattttattaatgcaaatcagctataacaatagcttgcaaatccgtagggacaagccccctaccataactacgacctgagtataaacaagcatgcctagccaaataattggcggccttgttcgcagatcgtttaacaaagacaagagaaacattccttaagatattaatgagagaaatacaatcagcaacaagtaacccaaacggggaaaacatagttactttgtgtaacacagcgttgacaagcacttgacaatcggactcaatcacaacttgaggaaaatcattagttttcagccaactaagaacttctttgagcccaattgcttcggccatagcaggctccacctgaaactgctgcaacatagcagtagcaaaaaggacactgccctcatggtctctaaccaaccaaccaaatccaaaccgtttctcagccgcaaaaaccgaagcatctacattgattttgatcgtattaacgctaggaggttcccagtgcgggataatgacagtaccagcaggcatatcattctcaacattttgagttttcgcacttttccattgatcaaaataagctaatgcagattgcacaacagctgctgcaaccggctttttgttactccaaaccacctcgtttctcgccttccacacagcccagcaaatcacagccatacctcccagagcagaagaagacaatgtgctggagattgtagcaaaccagtccacgaagttcacaccagccggaatgcgaagatgggtgttgaactgctgccaacactgccgggcaaaggagcattcaacaagtacatgttcaattgtttcgttgtatagttggcaaaaagggcaaacaacaggtgcattaacatgtttcaccttcagattaacccgagttggaaggttattacgacatgcacgccaaagaaatacagagatctttgctagaattttcaaattccaaagctttctccacaggccggaattatctccaccagtccaccttccgttcagaacttgaagtcttttataagcactctttacagtgtactgaccaaaattttcgaaagaccaataccgagtatcaaatgccatagaagaactgatcacaaccgcccgaattaaatctctatcatgctccgaaaagaggtccaaaagaacctcctcatcccattgtctagcattcgggatcatgagttgagacactttagcaccgatcaaagcagggtgtgacgaggaaacatacggattgtctttatccatcagccatggctggttcaatacatccacagagtccccacttgctatactccatctaaccccagactgaatcaaagcttgactctcaaagatactccgccagacaaaactcggattatttccaatactagcagataagaaggaaccttgcggataatatttagctttgaaaacacgcccaaccagagaagactcattagttaaaagtcgccatccctgcttacccagcatagcaagattatgatcgtgaaggcttctaaatcccattccaccagaatgtttatgggccaccatcctgtcccaggattcccaatggattcctttaccatgactagaagaagagtgccaccaactagaacacagaattctttccatctcgtgacaagttttcaacggtagaagaaagacactcatcgcatagctaggaagagcttgagccacagttttaattaagacttctttgcccgcacgagaaagcatcttagcatcccaactctcaattcttttcctcaccctttctttcaagaaacccaaaatcgaagatttatttcttcccattgtactaggcaaaccaagatacttactattatcatcagcctgaaccatgcccgtaatcctcatgatccgatctctcatagccacctctgtgttggtgctgaagaagattgacgacttcgctaaattgactttttgatccgaggcaatttcaaacttcctcaacaaagtcataatttgagaggcttctccctcagtagcctgacaatacaagtagctatcgtcagcgaaaaacatatgggagatagagggagcactccgcgcaatcttacaaccatggatccattttctcatctcataccgttgaataagggccgagaaaccttcagcacaaagaataaacaagtagggagacaaaggatccccttgtcggatgccccgagaagctacaattggaccaatcttctgacccccatgggtaatatgataacggaccgaacgaacacacaccaaaataagagaaatccaccattgatgaaagcccatcttagtcaggatagcttccaagaaaggccattcaactctatcataggccttgctcatatcaagcttgagcgccataaatccttttttcccctgagttttcctctttaaaaagtgtaagacttcaaaagagacaagaatattgtcagaaatcaaacgacccggaatgaacgcactttgaaaaggagagataatttgatcgaggagccccttcattctattggcaatgactttagacacaactttatataaaacattacacagcgcaattggtctaagatcacccatcacaacggggttcttctttttaggaataagaacaagattcgtatcattaagaccagataaaatctcaccagttgtaaagaaattctgaaccatcgacaccacatctgcacccacaatattccagcttttttgaaaaaaagcaggagtcataccatccggaccaggagatttatccgggttcatgtcgaaaagagccatcttcacttcatcaacagaaaccggtttaaggagctcctgattatgtgaaaccgaaacagaaggttcaatacaatcaatgatttcatcccaatgagatagaccagaagcggaaaaaatatcagagaaatattgatgcatgacctgatcaagaccctgtccccattcaacccatctgccagtctcatcttgaagcttttgaaccacgttgttttttttccgagtggtagccgaagcatggaaaaattttgtattactatccccatctttaagccaaagctgtttagatctttgacgccaatagatctctttctgatgaaaaatagtattgagattttttttctcagcttcataaagagaaacagaaatcgagtcccttttgtttttcaactgtttcaagatctttttagaatcaagcaatacgactcttgaaattacctgttatagcctttccccacttggacagtagatctccgcaagctgtcactttatcaaccacagatacactcaccctcccttcccacccatctttgataacttgtaagcacataggatcagagagccaggcgttctcaaaccgaaaacaatacttctgagagagagataaatgggtaataggatctaagaataatgcagtatgatccgatgaagagtaatcaagattgaataatttagctgatgaaaaaatattaagccaagaaatagaagccaggcacctgtcaagccgcacctcaacccaattattcgtgcctctgcctcgctcccaagtaaactggtatcccacaagctccaaatcaactaaatcacactcttgaatcaccttgcaaaacccgcctatcaaccagttcggataaggtcgaccaccacgcttgtccatttgagagataacattgttaaaatcccccactagacaccacggcagttgagactcctccttcaaactcctcaataaattccaagtattagcacgaaggtttcttctaggttctccataaatacaagttaatctccattccaccatacccgatatgcgaacaatgacatcaatatgattggtagaaaaacccaccacttcagcttcatcattatccttccaaaaaaacgctaaaccccctcctcttccttgtccctccacaacaaacgaaccatcaaaattgatactagttcgaacacgatcaatccgctccttgctacacaaggtttcactaagaaaaacaaacttgggcttcttttgagaaatcatctctttaaggaattgaagagtcaatgggttcccaagcccatgacaattccaacttagacaactcataa

SEQ ID NO: 115413 - DNA, 2252 bp, Cannabis sativa
  modified_base (27)..(40): a, c, t, g, unknown or other
taggatgttaatcaaacatacttggtnnnnnnnnnnnnnnctggtaaaataattccaatagtcactatcggagccggagaagtcgggatatgggggaaattaggggatggtgaaggacgtagcatagcctagggctctacacccaaaaaaaatattattgacctgtggagatggttcggcggccgaatcataagactgtatcctaggtctcaatccttacgaagcctctgaattgtgccttcgtgagcaggggaaggtggtgagtctccctactatatttaacggcctatggagaagtctaagggtgccacgtgttagtagaaatcccagctttgatgattatatcaatttagataacagttgtcaaactgttgacaaaagtgaacatccaaagttgggcttgggggtgatgggccgaattgctatggccccaattttgaatgatgagatgggtcggtacattaatggacctttaaagaataatcctatccatgtttcagataggaatattacttattggtgtgggccgattttttatactcaattgggggacctatggtattttcataagggtccttttaacattagatgggaccaaaactttggctcccgaaatttcttaaatcaaaggacggagagtatggtgttcagtgattttaatggggccagaagagagggaaaaactttgctcagaaagatgatcccagaacaaatagtgcatgaattctttaaaggcagactacgatcaatcaatcctaaagctcgtgagaatttcacaaaggcgataatacaattttgggaagactttgctctggagaaaagaagagctacacaaccagtactacactttgagagggagatggtacaagaggaggaaatcagacctgcaatcactatggtgtataacagaagaaagtctgttagtcatgattgtgtgagccactacaatgcagaaaattcttcttttgaattcgaggaagatgatgaggatccaaaggaagttgagttcctagacatgagttcggaggatgaggattcagaaggggaaggagaagacatagagcaagacgtaggagaagaacccgaggatatactatacaacattaacgagttgtggaaaatggaggttgaaggttcaccaaggcaggaagtaggtgaagagaaactgggtgacgcaatcgaagttaagaaagatgcattctctcgggcaaagatcattgaatctatggatgaagttggtgtggctatctcacaagagatagaagatggtgatcaacagggagaagaagaaaagtgtgaaaggaagaaacaaagagaactaagaaaattaaccgtcaatgtgaactatgagaaaagttacaaaaagtcaggggcctccatagattcattatgaagatttttacatggaacataaagggtagtggggataagggtaaaagacatgctatcaaagcaacgatttgtaaggctaatccagacttggttattttacaagaagtgaagagggcattagtggatagaagattcattggcagtatttggtgacccaggttcaaagcttggatacttattccagccagcggtagatcggggggaactttattaatatgggatactaggaccatctcggttcttgattcacttgtggtgacttctccatttcagttttgattaaagctgaaggtaaggatccttggtggttttctggggtgtatggcccgtgttcttataaacttcgacctgtattctgggatgaataagcaggtttaagcgcgatctgtggagattcgtggtgtgtcgggagattttaatgtgactaggagacctggggagaaatttaatagtagctcctgcacaaggagtatgaaactattcgatggcttgatacgcgaattacgtttgattgaccccaagctagagaatgggagtttcacttggtcgaactttagagcatctccagtttgcagtagactggatagatttctattcaccaataactggaacatcatttatccgtttctcagataagaaatgctggtgaggctagtgtcagaccacagtccggtcgtgattgactcaaatcctccgagatggggtccgaaccctttccgttttgataatcaatggctagaaaaaaaatctttctccaagttatttggaagatggtggaaggaggccattgttaggttatatttagcctatgtttcaggtatttaaagttagcattttctcgtctattggtgtcttttgga

SEQ ID NO: 115414 - DNA, 3046 bp, Cannabis sativa
ttgacctctgtctttatacttgtacaaatatagaacttgtatgcaattctcttctcttttttcataatgtattttttccccctatgttagaaagctggaggaaagaattatttatactagaactcttctttagctacctaatgttcttttgaaattgtcattttacacttttggaacttaatgttgctacaacatttaattttctatgcttatggagaggatcaagtccgtttttttttgttgcttgagacgagcaatatatgctcacttaacaaaatattagagaagacattgacttgggggtatggttgataccaacataaaagtttgggacttaaaatgtgaagacacttaagtattggggactaatgggaccaataagtcttcctaatgctaatacatgttggagagaatgaggtagtatagagaatcagaaaaccaagaaagggtctttaggattagtaaaatggatgaacattctagtcttaggtagatgtaatttttattttctttggggtaatagccgaagagctgagatggaatatttgcatcagaagttagcatctaagggtgggcaatcttaagcatctataaagcttgagtgggccttgatagtgtattaactttgaaaagaaagataaaaggcttctgtaatagaactaattattcttcttggtagctcttttaccattctttacttatgttgccttttctcattttcttgcttcccttcttaaggcttttttcatgtgcacatatctatactatatctatacatttacaagtactatctttattattattggtacaaagatggaaaacttgttttcatgttcatatgattgcacagtgtgagtgcaatggattcctaacttttaaaaccctccagtccatgatgcaagatcagaagatctaaacttgatagctcattcctcttatggtgaaactttgggagtaaataattttgaaccattacactcccaatctctattcttgtattcagcacaacagaaaattttgactgttatttgattatgtgggcaatgatatctcttagccacaaaaattctttgctacatttttttttattattacaactggattttgtttctcttacatctatggaaaatgagtgtgtctcaatactcattgcttgtcatttacacaatggcattacccaaatcatcacctatagtcatgtgatatgtgaaacaacatgtattctatgatttattccaaccttataagcaaatgcatattcacttggatatcttttcctttattctttggaaaatattattattaattttaaaatgtattcccaaaacattcattatttgtatattagccaacatagttcaacattggcatgccttctatatgtcatggaagaattatgctgtgtagtacatgtggagtaccatgtgcatcaaatattcaagcttgtggtcctagatgagttagaaaagccatggaagaaaaaagacccttttttaatattatttatttcactttagtagttttattatggaatagagtttagctgaaattgtgcaatgaatcaccaaaatgggttggttttctttttttcaggacaatagaagaaggcttggaataattatgcaaaaactagtttgtgagagtatggaacactacaaaagatcatcctatcatagagctgtgctttcctctgtagtcaaaacctactccactatcacctccatcattagtttccattaaagactaaaattttagagccataacatggaaagactgcagataccataagggcatgcaagcaatcctgatcatgttgataaagataataataaatgaaactccttaaaatgcacctgttttttactatttaattactgtccaatatacatgtggtgaaaatgtgaaccattccacttaaatggcaaaagagttttcatagaaacctcaagtctttttgtcttaaaagaaatttacagagaaaaaagtgatgtattatggaatgccatatatagctagcttggccttttgcttggattcaaaattaccaagtgttatattttttaacaagtcaataaattccatgattgactaaactgtcaaattctccttgttacaagccaagtctagtaaaaataaaaagaagtagaaaagaaaagtaattgcttcaagtaagagatctactaaattgttattaaatgaagaagcttattaaaaacctaaacagctttgccaattgagcaagttagagcaagcaaagacatgtattagtaggtctctttgtcacaattcaaacgttctttgacagataaagtggcttcttcaaagggataaaagagaacaaaggggaaaattaggcttttaagaaggaaaaactaataatttgctcagaaaaagaagggtccaagctagtgattttttttttctttgccttagaaacgtgattcttcttcatcatctctacaaagggggggccagagaccatgcttgaggaaactatctttaacacaatttgctcttaaaagcaaggaattgatcaaaaccaaaaggactttattagttcctaatttcacacctttaactatttctttttacaaacccatataaccaccaacactcaaagatcttttttttttggtcactggtgattgcttcaagaaaattgaactgttaggtttggaagttctataaaaaactctcgattcccttgttccatttttatctagatttccatttcagcatacataatgcaacttccagttttccacttagtgagaactttaagccaaactgggcaacttcttttccagagaggcatatagtactaatactacatatatgtataattatatatttatatgtacataaatattcaagtgaaaaataaataattgaacggctcatcttgtatttctaaaagttaccttcttcctagtcaatctttattgttatgctttacacatagttactaataaatttgtcagttctggcaatagcattttagaaacataagaagtgatttattattattctttaaaagtttgataca

SEQ ID NO: 115415 - DNA, 1895 bp, Cannabis sativa
  modified_base (46)..(49): a, c, t, g, unknown or other
  modified_base (166)..(178): a, c, t, g, unknown or other
  modified_base (1858)..(1868): a, c, t, g, unknown or other
tttaaatattatgataaaaaattacatgaattttttttaaaaaaannnnaaaaaaatatatacataagttagaaaaaattatgaaaaatcaaaataaatatccaaattaacataaaataatgtgaagaaaaaattaaaaaaatatattaagagtaatttttaaaannnnnnnnnnnnnatattttttttaataataaagtgtatatataattttatagggtgtaaataaaactctccttttaaatggcacgagctttgtgaaacgatgaaattgacctcacgtagtgaccaagaaggacaatgttgtccactctggtgagcgggggactctccttggacggtaatttgggaaattaactgatagttaggggctctttaacttaataacaggaggtgagttaattattgttgttggagatattactgcaaatctatgtgaattatacaatttgtaacacttaactctacaaattaaatttttgatgtaaaatcctcaaaattatatttatatttttgttacataagagatgttaagtattagtgtgaactgttgatgtgtacactagtgtaaacgtaacaagtttttaatgttccacatcattttaactatttaaatataatattttttttttgaaaaatgttaaaataaaaataaattacaaaacatttttttttctttttttcttttctttttattttttctttctttttattttttctttctttttgtttcttctagaaccatcagaaccccgttcctccttcctcttcatcctcctttctttctttcttttttctctctctccctcttagcctctattgcagaataaaaaatgtaattgaattctatattagattgaatgaattgtacaaaggagccacaactatatatatgtcagaaaaataggggagagttaagcataataactcttaactatacaaatgtaagaaaaataggggagagttaagcataataactcttaactagacaaccaactcagctaccccaaactgtggttaaagaaccaaccgactaactaaccaaagcaagaaaaggaaagaaagaataactaactaactgaatgacagacacatatagacataacgaatgtaactgacttaatatttatgttagcctccctctaagtcgaccttaagacctttgtcatgtcgccgatcaatcccgcacgggtgaccgagaaccccgagaccccagtgtcgttcccatagccaagaacccaaagatcctgaggtccatttccgtcgccatcaccaagaacttcgaggactaagacctaaaactcgagatcccaatgtcgttcttcagtgttatcgccatcgcaagtgtcgttttcatttaagatatgctctctctcactttctccctctcatatttgttctctctcacataatttttctagcgtctgacatgtcatcgtggtcatcaatctggtttgtgaggggttgtatttgggagggattaggggtctgggatgggtcatttgggtgtcaggtcgaatatggattgggtttaggtggcttagaggtgcaagttccattggcacgcggtgaagagaaattgatctcagagagggttatcaaggttgggaagccaaggttggaaagattggaaagatctcaaaccctcagctcgactccgtcgaccctcaactccccaccatcaaaatccaccacccaccctctcctcgtcaccactcctccggaggtccagctaccaccccaactcccaccgctggcgcccgccgtcgaatcggcgttggtgttgatctctccgagtgggctgtcagccactacatccgccctggagacgctgtaatttgttggaatatattttacnnnnnnnnnnntttactaacaagtatgtttttaaacat

SEQ ID NO: 115416 - DNA, 1831 bp, Cannabis sativa
  modified_base (1711)..(1711): a, c, t, g, unknown or other
aactgatatattttagggggtatttttaactacacttataaattaaggggcatcatagtatagtgtcataagtacagggactaaaaaagctaattattctttttaaaatattctaaataatttattgtacagaaataagattggaacaattatatatcataagtataaaaaaaaaatcagtaaaatatataaattttattttttaatactatacattatttaaaattatctaaatatttatgtatgatgttaaattagaaaactgaccataaactaaaaaaatggataacatccctttcggaattgagactattttattatttatttgatcctcgtttgccaaaggtaagcttaacctgaaagagattagtaattaagaattttgctttcagtctttgtcatcagaaaactgttgtgtcagcatctttaaacgaataggatttctccacgtgtcagtgttaagttataactggatagacctgtgggaccctatgtactttcattatcttttctcatcattcgtagtagtagtggattgccactattttgatttgatttttcaggaaacaatttcaaagctatttaaagaatacaccaaaaaggagtgtaaaactttaccactatgaaagggaagaaaagtaacacctctttcaaaatatctatatataaatcattcatatataattcattctaaattagatttcaccttcattacaaaatataaataaacaaaatagacaaatgatcaaatcagggtaaaggcccatttatcatattatagaccataatttttgacttataataaggcctacaattttaaagatttgtaattttatggttcataatgtaagtaaggtaggcctttacctacaactaatttagtcatttatttatgaaaaaattacattgtatatttaatttactttatttgttttaatttttatattcatttccatattctttaagatatactcttttatagatgatttttctattatactccttaagttaatgtaaatcatgtgctatacttaagtgaaagacaagagtatattaagcaactcaatcataaaaattgatagattttaataagatataatataaagatatttttgattaatagataaaaagaagaggtatttattaatttatccatttatttattttgtccattcctaaaaatatgaatgctttattaaaaaaaaaggaacacttcaaatgactttattgacactagaacttaagtcctgcctttctttacagggaagagatggacaatgtggtttggttagttggaaattatgaaaatgagaaagaaatatgaccaaaattaaagtcatatcatatcagcattactattacaaagtattattgctctttagttgaaatgttggaattaattttatctgtaatttgtggtggaagctttccaaaactacatctatgagtttttttttttttaatatcaacatgatgtcaaaataaagtcacaatatttgccatgtaattaaatgattatatatatattatataaagttgagtaaatgtatatatattaataaacaaatatactggtttcaagaaaaaaaaatatatatatataaattaaagtgtagaacacaccaaaaagtagatattataggaagatattttaatataaatagttagatacaagcatataaagagtaatatatatatctattctatatanagtgtgcctatataactgaaattcctagtttttgaaaaatttatgggtaacttttaatttgtatttaataaaataataaaatattatttatatataataaaataataagataaaaataaa

SEQ ID NO: 115417 - DNA, 2006 bp, Cannabis sativa
taacacctttaaatcagattattattaaactttattttgacaaaaaatcaattcaaagtcatatttataccattttaaaaaatacaagattcattttataatttaacaaatcagaaagtccaattagtaatttttacaaaacacaagttccaaaataatatttaccctatataaattaataaaaatagttagaactcgcgatcattaaaaaaaggttttcaaggataggagattggaagacaaccaaacatctggtgggtaaacgcccacttaactatattataagcaacaaagttatagtctttactaatattagtaaatatacaactcacaaaaacaggagagaatctagtacaaaaagagacatacggacatagttctcaagtacctaatgagactcattcccattaaaagagtttgataactatcttatatattcaatttcaattgtttttctcttaaaataacattatctaaaatcactcccaattttatatccgtactaaatagcattatctaagtcgttttttttttttttaactatcgagattgtttaatttaagaatttttatttaatttcaattaatcacactaatataacaattgtccatatactaagttgtgacaccgaactttgatatgtatttacaaaactatacctccaaactttaacatatattaaattataccttttaaattttcattcacgtgaaatttactttagtaaaattgaattaaaatttttaaatttaacaatcttaataactcgagaggaatttttaacaacttaaaaagttcagaaacgtaatttaatacatgttaaaatataagggataaaaattcaaattaaccttacttttaaaaatgtaaattaagtagattaagtctctcaaatcttgaacaattctataaaaacataattttactaatacaaaccattgtctttcctagtacgaacataaggctaattcaatcacaataatgacaccaccatatattggattaaactattatatcacaatattttgacacattaaactatatttaattttattaattttattttaaaatactcacaatttagtatttctcacttttgtattgacaaaaggaaaagctatgaattggtaggaaggacttattataaagaggaaaaaatatattaagaacaacgactaattaaaactaataatatatattattaaaaatgaaaaaagaggagaaagatattattcgagttataatgattatttaattttgcttaattaaagaaattaattaagtgagtggagaaagaggaatatccaatcaaagtgtcgtatgactttggacaaatattggtcgataacttatgaacaaccacaatattaatttatttattaattaattaaggagcgtttgataatatttttattttttaattttttatcataaaaataaaaataaaattatgttttaaaaaaataaaaatatttttaaaccctaaaaatgtattttaattttaaaaatagaaaataaatgtgtactttataacttttattttaattttatttaagtcgggtgcaagtctaaatctaaggttggggctccgagtttgggactggggttggggccagaatctatgtcccgagattcaggtagaggtcgaagttcaaaatattaaaactgttttaaaaaaaaatttaaaagtaatttttattttgttttcaaaaattttaaaattttgattctcaattaaaaattaaaaagtgaaaacagtgtcgtagaacatatttttagaaaacatttttatttttctaattataaaaattgaaaattaattaaattttttttaacaaagaccacactaagatgattatctaagtttttattcttattttattatgatcataattttaataataaaataaagggaaatttgattttttatgcttacatttggttaaaaaaaaatttctaaacaaataataactaatatttgtaaaatatgacaatttttatgatat

SEQ ID NO: 115418 - DNA, 7451 bp, Cannabis sativa
aaattataaaaaaaaactactgcaaaatgaaaaaataataaaaaaaaaagtgtaaaaatgaaaaagatctttcttattattattaaatattttttctctttttcttttcttggctcataacttcagttttattaattttctcaaaaaaaaaaaaaaaaatgcaagtgaactgtgctgaacaatcctttgagagcttgattaagattagtcaatatttaggtaaaagaaagaatgtaaaacaaaatgcaaagttcttttatcccttattggggtattttatttatttatattcttaaatgagaagagacaagtcattcactctttacttttgctatgttgattagtctagcatcttcttttttgcatttcttctgtttttattttttattttttttctatcaaaagaattatttttcaatcattaaagaacaaaagtttttaagtataacatatgctggaagctgatttaaaaaaaaataaaaaaagcatatgatggaaggcacatgcaaattgtaatatagtttttaaatatacctttgtagggttagtgtgtaagagcacttttgctcctttaaaatgagagcataactaaaatatgtgaattgctatattttacattttctttctaaataaataaatagtattgctctaagacttatcttattaatttttttttttggtttatatgtgtatataaattaatattatatatttaaaataaacaaatgtctatttaaaaatataatattttaataatataaaaaagaaaataaaaaaaattaatgtatgatatatataaaagttgaaaaataaaaaaaaaaattaatgatatatttgaaaagatagaatataaaactggcggtgctctaatcaaagaagctatgagtgttgattgctttcatgtgtaatttatttattaaacctatcatatgtagtttatttattagaccacttttattaatgaaggtaaaataccttctagctataatttaaagctaaaagtgataaaaatgacatacatcaaagtagttaccaaaatttcacgttctttatttaaaatactctcatcaatttttctaatttatacttatatattatcaaaattgtatattcttcattttacctcacacttttatattatattatacaacaatttctctatctctttaaatattatattttaaaatatattttatttatataaaaaaaaatataaaaatattaagtgaaaaataaaaacaaagagaagagagaaattatttaaatattatttgaagtataaataatgcttttataaatgaagagtgttatctgcgtttccggtattagacatatggacttcaagtcaacatccaagatccatcagtgggacccagaaaaggtaaagtgggccgagcccacttagatatgtccttccataaacgtatcttagctccacaatcgtaaagccctctaccttcggcgagccgtacctggaagcatgtcctgtactacgagaccagaaggatgagacagtgcgttcccaaaagaccctttcagttttcttttttattcctgcacacaaataaggaaattctagctactagatcacaatagaatatcgtatcaagattaatggagaaacttcctataacgaatattatgcaattaattcatagattaattgcccacaacccacaatccgtacatatggtgttgaccaaatcaattcaaatctgatttgcctagtcagcagatcgtcttctttatggactggactcatgagatagcctaaggtattatttactataaaatctccaacagagggaaaaggaaaatataatataattctcaaactactataaataccactcgaatcctatagattagggattgaactcttttgtgaactttgctgaggcaaacttgagaacacatattctttgcattctcaaaggtatttactgctaaagacctaccaaataatactaactcgtagactaaggctagttaatgccccatcaccataaaaaaatatttctctttttgctccttctcttttgattattttttcttcagttcttatcatttatattctatttttgaaaaaatgggtaaacattttggtacttttaacgagagctgaagaaagtaatgagaccacttacaaattacattcaagtaatcatggccctcacccgaaccaagtctggtcttggtgccaaaattggagattctagtgacccccaaaaggtgactagtctatagaaaggccatcaggacaaatatcagactcgagacgatcatgtcattgaggatgcaaaatctagaaagtaactttagggatgctgaagttaataccaaagatgtaccagaggatatgcatgaagacgaccctcaggacaaagttgctgctaatgatgttggagagaatagcaagcctgatgagtcaaatcccgtggtcatcatggcaagataacttcaactggccaaaaccaagctaacttgacaagatcgattcaatgagttactactcggcaagatgacaagaatggagattgtaatgactgtcctgactaaattatctcctgacgtacaagctcctcaaacaaatgatgcacttgagaaagcagatccaaaagatcctcgatcttcaagcatttgcaaagacaaaggcaaagcaatcgctgttgaagaactaaggaagacaccttccacaaagtatcctacaaagtctaaagctgctgaccaacctcaacagaaaaggaaagaaaacaacgccttagggcacgatgacaaaacaaattctagaggcagagtcatgcagaaaaataagatagatgtcacaattcggacgctagagactcgaagggaaagcccccacccaatgattccagtaaccacgatgaggatgatgacgaactacatccaaactactacaaaaaggactattcccaacgattagtaagagggtaaactatgaaaacagtatcagatgacagttgtagaaacctttccacaaatgatctctgaaaaagattgaatgccaagaaagaaagagccaaagctgaaaaatcgagactcgatgggaacaatttaagaaaccacatcaacgatcgcattcgtggaagagaatcttcaagtgataagactcaatgcctgtaatgtaaggtttaggagttgatcaagatcacagaaaagatttcttgaaaacaaagtagtgtcgtatctgactttaaggaagaagatacagagccttgtgtgaagagaatcattgatgcaccattggcaaagcattttagaatgccccatatggagttgtatgaaggatgcacggaccccaaggaccatttgtccaaataaaacatcatcatgcaagtcgctaaggccagttttgatgcaaaatgtctatgtttttttattgacgttaagcaagtctgcggaggaatagtggaagaggttatctccaggatagatccacaattggagagacctaccagtaatgttcagaaagtagtttataacagccaaggactatgatttggaagctaactccttgaccaccatcaagcaataacaaggagagagcttgaagaagtttattcaacgcatgatggaagtggctactaaaacaaaagtcactgatgatatgaaattggtggctctaacatcaagacttacaactagatctttactgtggtgagatctcttacacaaaagggcagatgcattgagtgagttcttaacaagagcctaaggatttataaatataaaagatgcttatgctaagcatatggagtactctcagtgccttccacaaaaataatgagtgcccaaccatcacagatgataactccaaccatttaccctctgtcaatttcttttactactcctacggtatatggaccaagtactttcgtgtagccagttgtacaggctagtttttttacgttcggagctgcataaactggatacagttctactcccagaataacaaaccaaaaagtagaagttctagagtctaatctaacccactcaagtagtaaagggagtacaaagggtccaaattggagtgagtccacaaaaaaggtaaaaccccaagaatcaaggtacatcgagtacgcaagtctcatagatactgaggagaatgtatacaaggaaacctataacatggtacactagaggaagcctccgccaatgtataaaggccgaaaacacaagagatttgaacataaagtgcgaattcatggtgatattggtcacaccaccaatgaatgtgactacttaaaggatgaaattgaagggttagtatggaacggacacttaacaaattggtaagaatctcatgcatttattcgggacagacaatcgaacacggacaacatggagccataaatcctcctcagggagtaggccatccacaagttcgtggaatacatgctccaaatgtacaagcccttcaaggggaacaaaatgctctagatcgacagtagttgtagcccccagtctcggaaatttgtaccctccaagagttgtattagtagtcgtagatggtcatgtagcaaagattttaactggaccccatatttctagaagcactcaaaatgaatagaagtggtacctaaatgagttgaatcaaggtgaagcttgccacttggtgaaatcacctgcctagcgtcgaaggacgatgaattttccaatgactttcacacaagatgatgtgaggcacgtgcacttcccttataatgaccctttggtaatagaagctcaaataacaaaaaaaaaaaatagtttccagaatcatcgtagataatggaagctctatgaacatcatttttaaaggagccttccatgccattgatctggtagaagccaatctgctaccatgtctgattcaactgtaaggcttcaatggggatacattgatccccatgggaaaaatacaacttctaatgactataattggggaagttcctggaagcaatactgtatcatccttcaagtacaacatatttgtgatttgattgtcctactgcttataatgctatcttggaaagaccatttttaaagaattttggagtggtgacatccatccagtatctgtgcatacaattcccgagtgatattggaagcataggaactattagaggagatcaaagaagtgcgcaaagttgctatagcatttcaaccagaattgtacttatggtatgagaaggaaataactctaaagcctaaatatcttcccagccagcataggggctgatctaagaggatgagcttgatccacagattggtgtggaacgtgtcatagaatacatagaggaagtggaagaaatatgcatagatgatggaaatcccaccaaggtcatccgagtgaggaagaacctacctcctacagtgaaggaaaagattatttccacgatcaaggcaaacagtgatgtgttagcctagagtcattctaatatgactgtcattagtcctcgtgttattctccatgcattaaatatagatcccaacactgaaccagtctggcagaagcagagacctttagatctagcgaggtcggaagcagtaaaaatagaagtaggcaagttgacaaacattgacttccttagggaagctctatatcccatatggcttgccaatccacttatggttccaaagcctaatgggacatagagtatgtgtatagacttcatagatctaaataaagcctatcataaagactatttcccacttgcacgcattgatcagatgattgatgctacctcggggtatcaactcttaatcttcatggatgcatactccagctacaaccaaataaaaatgcatgtggctgattaggagcacacgagtttccaaacaaacaaaggaatctactgctaaaaggccatgtcatttagattgaaaaatgctagagttgcttaccagcgaatggtgaatagaatatacaagaatattctggggaagaatatggaggtttacatcgatgacatgctgttaaagtcaaaaacatccgaggacaactacatagatctagaagaggcctttgccataatatgggagtataaaatgaagctaaacccaaagaaattcactttcagagttttcttacggaagttcttgggttttatagtaatttcacgaggaattgaggcgagcctagagaaaaccaaagctcttatagacatgccttcacctaggaagcacaaagatgtccaaaagttgacagggagaatagcacaacatagcatatttgtctccaaaaccatagataagtcaatactgttcttcaacgtactttgaggaaatcataaatttgaatgcacatcagaatgtgaaatagccttctagcaactaaaaagacatctagtgaaggctccaatactatccaaactagttgacaaagagctgttgtttttgtacctggaagtgtcggatcatgccgtaaggactgctctagtgtgagaagaaggaaacgtataacttccagtatattatgtaagtaaaagactattgggcgtggattctagatatcctatgatcaagaagcttttcttttgcttactgattgcttcacagatgttaataccatacttctaggcccaggccatgaggatacaaaccaaccaccctctttgtcaagtgttacaaaagccagagttgtcaggaagactcctgaagtgggtaatggaattaagtcaattcgacatagaatataagcccaaaattttgattaaaggtcaagccttacctgacttcattgtgtagtgcacagggataaatgaagatccttaaacgtcaatcccagagacagaagtctggaaaatatacatacataaagcatgaaatgaaaaaggttccaaagtcaaaatcattttaatatctccacagaacctccaactttaaagtgcacttcgattcaagtttggagcctctaacaacaaagctgagcacgaggctatgatcgctggtttacaattggtaaaagaggttggtgctaaaaacattgaactcgacactgattcacaacttgtagtcaacaaagtatctagggagtagcagaaaaattgctagttacatagcaaaaactcgagagctattgcaacattttaagcattattctgtaaaacatgacctatggatgtgagactgtaatcccagttgaatccataatgcctacacacaggagggatacctatgacccaactcgaaaccatgctctactttaggaatccttggatttgattaaggaccttcgagaatgttatcccaaattttgcactttgacgtgacatcacgagaatggtgacacgtggagtctacttgaagcatctgctcagaatgatagaccgaataggatgcttcgctgtcacattcagaatgagatattcagcgagccgtgcagagcactcaatacttagcgaattcagcattcgtatcatgaatcatcaactcaatccctacaactc

SEQ ID NO: 115419 - DNA, 1496 bp, Cannabis sativa
gtgtttttaatttttttactgcaatgattgattgtattttggtcataactctctcagttgagaattagataattgaagatgttttagaaaattgaaagaaagatctagaactttcattggtaaaacatttttcttgaaactgaatggattatagttaaaaattaggttgaaggtttaaacttgatttttgatcacaaacagagcgtgttgagcatgcaaaatataaaatttttcactcattatatcttacaactccaaaataatacatgataaatctataaaattaattttatttaatattttttctctcatttcaacccatatgatgtatttgttaaaattttaaataaaaagtaaacaagcataaatctaaacaataaccaataaaaactactaaaaatatccataaaaatcgactctaaaacgtataaaaataaacctaacagcttatggataggtaacaatctttctatttagaaccttacacaaattataagaaaacttcgaataatttttttttctcaagaagaaaaacttttattaaacacacacaacaaaaaaaaatccaaattatttgaggtaataaaaatataaaatatgttattttgaaatttaatttatacaaatatgttattttcaataaagtgtttaatctaacgatagagattgaataccaggtgatcaaattgattttagattttgttgcatgcatgtactattccttgaaagtttgatcttttgttttttttttttttttttgaaagaaatgctaaagggtacctatagtgtttattatttttgtgaggcgtaatattattattggtacaatttaacattgtgtgtaacttattttattttaataaatattataaaaaattgctaaccaattataacgcgagactttatcatagtattagccacgatgaatacttcataagaatgcttattattatttcttcttttaataatctccagcatttacaatgatacttttgctgaccaagaaatgtcaattgtaatattcttccattacaattttattgtattatatgtatcaatttttgtgttgtatttgttggataaggaagataccaatgccaattatgccatgacgattttttgttcagttatttctcagaaaatcctcatcaaccggacgtagatcatctgttcagatcttgtgtccatttcactgctaaccagttagaatttgccacgtcaattatttttaacaccaaaactaacaagtaaggaatttaaacttttctttcattcttattattttttacaattattatgaatctttctagacaccaaattattgtatacaaataacaattcattgtatcttataaaaataaaaaatctataacataaattatgaatcttcccagacataccgaaaattttgggaaacttatgaaaatactgtaatttggattaatttttacaaaaatactgtcacacgaaaatcttttcaaaaatactgtgttttt

SEQ ID NO: 115420 - DNA, 1331 bp, Cannabis sativa
  modified_base (310)..(312): a, c, t, g, unknown or other
aaaagttatgatggtgtcacgcacatatatggcatctatacaaacactttatcttccactttttgttctttttataaaaaaaaacaataataataattagaaagaaagaattactattcttatagacctagtcattgatagtaaattagtaattgaattattctgcaaaatgctaaattccacatgctttataacgatatttttacttatcgagaaggagttgtcctccaaatgtttaatgaatacaatatgtaagaaataagaattataaaaacattcatgctcataaattcataataataataataannntaataataataataatacaaaaagataaatatattgttttgtgggaggccggttaattaaatatttcttttttggtaatagaaagagagagaggttgggagtagttggcttctgatgaagtcttcaaaattaggtgtaagttcttccattgatattttcaacttataaatttggttatccaacctttaagagttgggatttgttttagtcttatacatgcaatggtgtttttacctaatattttttttgttgcaaaagtgttttctttactataaaaattgttataaatatcccttttcagttgcattatgctcaattttttaaataatttattgatataatattattataacattaatcacgcatagttcaaaaatttaagtaaaaaataatgcataaatgacattataataataaattatgagaatatgtatgtaaattcttagagttacttgtatgtttaatgtcattaaagtaaatttcaaatagcttagaattattaaataatattctacaaaggtgaaaatcatatttattccatattgtttattgatgatttaagacatattttatttaactagcatatgacaaaaatggatcttaattttcaatgtgttgttcatttaatttcttccccaacacaataataaattgatacaatatatatcatgatgactcatatataactcaatggtaccctttcttattttatcttcattaatcattattacatagcatgaaaaagcatgtacataaattgaaaaaaatccaactacacctcctaaaatatatttggtacactttttcttctgtcaacattttggaaaaaaaaaatatttgtactctttattaaaactaacttacaaattttttgaaaatttcaaatagtttggcatacttaaaatataataaaaatattaacttttagagaagtgttaccgtcaacctcctgttacaacttcttagtcaacttttacgctcgaaatcatatgtcggaatatttttcttcaatttttttt

SEQ ID NO: 115421 - DNA, 4420 bp, Cannabis sativa
ttcttcatgatcagcaaacaatttggcctttgttgctgcagcagccaagccaactttagcagcagctttaaccttttctgctgataatggagtagccccttcattttgaccccttgaagcaacagctgtcgagttctctttcatattatataacccataaaattatggaaatgagttgagagggaaaagaagggcactggtctgaagaggggatgaaaatctcgtaatgtacctttatggtgagctgaatttgcaatctctccctgagggccaccatctctaccatgaataatctctgagttcatccttcatacatgaaaagtaacttaaattatgtgctgaatcaagtttgccaataagcgtgatgcagacagaaacaataatatgcaagtgaattgtttcactaattcctccactccaagggatgttcctttacagtttattttaacaagcagttaaagacaactagttaatgcttgataactagtttcactaattcctccactccaagggatgttcctttacagttcattttaacaagcagttaaagacaactagttgatgcttgataactaggagaataggaaaccactttttcattgtatagcattaggaatcaactctgcataaatagcaacattgaaaaagaaagaactgcaaacagttttacttccaagaattgaacagccaaaatgccaagaaaacaagtctaaaagacgaacacaacaaaggtgttaacgctttagctgtaaaacaataaaatagaagacacttacctattactctgtcctggtccttccttatgtaacaggttctccgatgcagataaactactttcctccgacaatgctgccaaggatgcatgtgcacatgctgcagcgactcttgggccaaccgaagaagccagaaaggcaacctacaaaatgttcctggcattaagcagcgcttggcaggaaaataagcaaagtctagcaaaatatccagttgtcgccatattctgcagtatcatctattaataaatcagattaaccctattcttttaacctacaagtctacataaaggactgccaagtgacaatttatcctatatttatgtcattttgtcttcaattctactattgtttccatttatcagcttgcgctataactgtggacgtgaacattggcacctaccagggacatgaccggattcccagaattggcaaaagggaatctgctttcaaaatcagcatcttgttggcatgatcctagagaagatgaaagacatacaatgtcaaaaacacattccctttagtcgattagctaagaaccataactaaataagaagacctgctgaatccccatttgcaattatttgtccatgaacagctccatttgacatactggatgatataggattcccaggaacttcaatattttccagaaggccatcttccacaggcaggcgaaggaaatgaagaatgcattgggctttagacttagttccaacatgctctgcaatttcattccagttctcattgtacatttccactgcctcaagtagcaacaacgtttcttgatctgtccaactttccccatctggatcgccataatcttttgttgaatccatcctcataaaatctaagcttgagtgaccaatcacataccttccatcatggaagcaatcagagcatagcattatatccacctgatacataagatacaaataagcctgtaataaatgaaagcgccatccattgccaatctcagtaaataaatgaatcctccttcaccacataatttttaaggtttagtaccttgttaatgaatggcttataaactatcaaaattaagcacttgtcaaaattacccattcaaatatacaggtgaaaatgcagttatctgggtttttacttcactacatctgggaaaaattcattattctaaacgattttgtttactaaaaacgttcttctggtagcagcatatcatggcaattggtatacaattcaaacatataagatgcaacatgcaatggttacccaataaaaaatactatttcaacaaaaagaaggttgcaacacccatattatttgtcttactagccagaaagcttttatcattttaatttaaaaaacagctttaaaacttaactgttctaattcaaataacggttaaaatcaagattacctccttgtttgactgatagtatacccaacaaaaaatacagtttttatcattttaattcaaataacagttaaaatcaagattacctccttgtgtgactgatagcatacagtgggtagagatcgagaacaactattgcaacgattttcagataaatgctcacgaattctgttgtccaaatcagagacattgttgtcatgacttgaaagggatgaataaacatcagctgccttgagcttgcatttgggcttttcaaacttgattaagctatcaatggactttaatgcagcagatggcacgtgaatctcaccatttgactcctcctttaagtaggaactgctattccatggctcatgacttgatacagcagcacaataattgattattccccagtgatcaagaaaccgaactattcggcttaaatcttcagtttcaagaccaggtatcactcccacgaaatcagacacagtgaaccgtttttctggattctccatgtatttggcaacaacatagttcctacattccatgtatttctcaggagtatggtctggtgattttcctgagaaaaaatgtggcaccacttgtctctctagtctatgcactgtagcaggtgaaaaccaatctgccacaaaaaaccccaaaagaaaacacattcattacatgtatgtctacacacacaaaaaaaaaaagaataaacaagcctattattactaattaagctcatttttttaaggatataaatattacaattctgtcatgaattaaacgcactaagtgtaagatgaacacaactagtgaaatgaaattaaactctttcctaatgaatatgaaaaggttaaatgagtgatgagtctccacgagtgataacagaaagttttgttcactagaaatcacatcttccaaattcccatctaaacagaaagacaagagtaaaagtaacaaacccgaatgcattggaacgacatgagaccgagtcccaaaacgcttcacaacgccgcggccttccataatcggaggcggagtgaccacataagccgaatttcccccatcggacctatcctgatccaaactagggcaatcaggaggcacagccgataaagcctgaagctgcccgtgcgagacattctccaaaaacattaaagagcttccctgaccttgacccttgctttccccaaactcattagctcgctccaaagcaacaatggccataacggaagggtgagggcgattcaagatgcgcctcatgacaggtggaaaatcagagcaacgaaccacaccgtcgggagagacctcactctcttgagaggaagaagagggatcgggtgcggaagagccagattgagggttaggttggacaccatcctctgaatcatcctcacgatcctgttgttgttcaagattctcatctggaacggcgtcgtcttcgtcctcctcctcgtcttcctgcttcagcctccgattgatttggggttctctccgccgcttcctccatttgccccgcccatctattccaaaaaaaaaaaaaaaaaaaccatacatatatttaaacgaaaaacattatttccttaaatataaaattggtcaaaattgtaattttttgtttaaaaaaaaaagaaagaaaagaaattgagaatgtgagagaaggagaattaggtttaggttaaagaaatgaaaaaatagagacctgaaggagaagaagctggcatttgaagaagtgaaaaggaatagaaggtggagtggggtctgtgattggttggaaatggaatcaagaaaaacaaaaccctctcttgacgaggatgatgatatgatacacaacagagaaagagaaagaaagaaagaaagaagagaatatattatagggctgagcagagtgggctctctctctacttctctatcaaaaacgcccttattacgctcttttgagtcattcttatgtttttcacacactactctcttcaactttccccttttccttttaattaccactctcactacccaacccaaatcacactagtttacctttaccctcccacataattttttctttttttcttattaacccccaaataaactttttaattatagcttatttactgcaaaaccctcctattatttgcatttaataaaaaattagtaaatgttatattgagcacacttttttacaattatactctaatatataatagataattaaaagagaaaaaaatagaaaaatacagaaaaggaaaaaaaattacaaaaatactttgggccg

SEQ ID NO: 115422 - DNA, 1096 bp, Cannabis sativa
gagagagagagagagagagtctttcttgatgttttgaagttgagtgacaaattgatctatcttagcagatgtttgagtgacaaaatagacttcgagagtggaccagacttcagcagaagtttcacaactgacaacacaagtgagaattccttcaaacattgatgaaagaagccatgagtagagaagttgatcttgaatctcccattgagtgaactgtggattaactaaaccaattttttttatcgcgatcagtgagaaacttacacggaggcgtgaacgaagctaatatgaaattgaggagttgatgacctttgatagtagatagaatttgaggtcgccaaagaagaaagttgtcattattgagtttagcagagaatttaagggagaagacaaccaaattgaaggttgtagtggtggtctgagacgttgccatagtagctgtagaggaattaaacatgatcgaagaagacgacgagtagtgattgaaaaaaatgagcagagctctgataccatgtgagagtaacaaaatgtaacaaaaagaaaaagtgaaagagagaatgagctaaaatgaattttgttattgatattagcaagatgctcagtgtatatacaagtataagttggttacaagctaaccaaaataagaagacaaaaagctaacaaataactaactctaagtgtataaataacaaactcataatgagtctctaacaatgtgtaatatggaaaattactacttgtggatctcactcccgtacagactctaaactgtgtttgcacctttgagtctacatttggagtcattgcctccaggaaggttttgacacacaagactcctctgaggagtagctctcataagttaacacacggagcttactgtgaggtctacgtgttgtgcaatattagtgtaatcgaggatcattagatccaatatgggtttttcaacatgcggtatctccttaattctaaaaatctcttgtcgaggaggtgatgctccaagtaaatgtatcacattcaccgacttcttcttttctgtgagctttagtgtcgtgttatagcactctcttaagttcgattggactcctcgcacggatcc

SEQ ID NO: 115423 - DNA, 2088 bp, Cannabis sativa
aaatgaaaggttacttgtattaatgaaatggaaggagaagaaaaatacatgaaactaaaccaacacactacaacccacccactataatggatactcccagcccagatgaccagaattgaggtcttattggttactcgaatacatcaccaagaaactaaaggttagcttgcatacatttgattaaagcttcagcattcacttgagttgagactcaatggtttgtactaaaagaatgcacatctaggatactatttcattaggttaagactttgccactattgcatttcacaaagaccacgacttgtttgtgcctatccacagattacataactaatcaaatatgggttctatagtatagtaatttacctagaaatacttccctctgtaattttcaattgtaagaacccaattcggttaaggatactggcaatgttttttatattacaatggaattttgcaactatcaaaatcaatataaattttgtatatgtgcaccaaatttcaatgataaagcaataaaatactaaattctttatcttgagcaaaataagtacctggaaaacgggaatggtcaagggctcaaagcatatagagcaatcaagaacatctggatcggtcaaaacaacgggaatcgatttgtccctggtggttgagacagaaccatctgtaggagtcggagatcgacccagtaatgaaaaaggagatcgacccagtaatgaaaaatcatgctcggaaacattgctttcttcttgttcacgttcttgttcttgttcttcctcttgttgttcttcttcttcttcttctacttcttcttcttcttcttcttgctcttcttcttcttcttctatttcttcttcacctcctgttacgttaatgtcttctctttcttcttcacctcttgctacatttatgtcttctatttgtggttctcgaagtggttcaaaaggaaggtcataaccaaaagggtgctcatcttcgctggaggaataggagcattcgctttgcgcagaacggtgtcgtttcagtcttgaactactactgggaaaggctacgcgtttgcccccattttcttcttcttcatctccagacacagagaatctcgtcattcctcttgctctgaatctcctcaggctctgattctggtagttttacaacctaaattcacaatacttttcatattcacaaatcttcatctcacaatcttaaagaaacaccaataattacacttggtacttttgatgttagattcaggtatcatctatcttcacttgcctaaattctttcaacttcttataaaatcagatcaaattcaaaaaaagacatcacaacaaaatatttacccagttttattcttctgcaccaatttacccaataaatcataaaatttcaaaatcacaatggaaaaaattcatatcttctttttttctttcattatcaaattgagaataaaaccttatattcaaattccgtaaacctaacaaacaataaccaatcaaattcgcaactcatacaataaaaaagctccaatccaacaaagtaccaaatctgaacaaggacgcaaacaatatcatagattcctctagttttggtcaataatatcaaataattgaaatcaaattgaagagagcgatgaaaatttacctaattagagatttcgagcgcgagagtcgtcgtaatctagatgaagcgccaatacatatacacatatatagaattatgaatttgtaatttgaaggaaaggaaagaagaaaaagcgtttgcaggcggcgacggcgacggcgaggctctgacctctgagtgtgaggtgagaagggatgaaattggaagaagatagcgatgttgagggtacatccgtaatttactcatcccaggctgatgagtggtccatagtgcatccttagatgtgttgactttgactaaagagagtaaatagtaaatgagaacattgctattggtggtgctaattaggatcttgtgaattttgacatgtatcaaattttttttgccgttaaaaatttttcttcaactattaagattgttagatttaataatttttgtctaattttagtaaaaaaattctaacatcga

SEQ ID NO: 115424 - DNA, 2050 bp, Cannabis sativa
ctctctttctttctctctcaaattatattatgccctagagaattatgttgtacaccattgataactgtaattgagttaggaaactcttgctgtaatatgctgataacaataaagaatccattcattttgctgctatatattatttcaagttaagcttcctctgtttttgttttatttctagtttgattgtaattctgtttgagtgtttgatttttatgagttgttattaatcatatcttatgtaattattcctagtttatttctatcggctttatatgaaataatgattaataattagttgagctaatcctaaaggggaatgtattttattttcaaaaagaaaaaagggaatgtatttaacgagagaatatcgataacatatatttatattcctcatgataagtaattgagtatagaaggtttatggaaatttgaccagcggagacggctatccacttcgaatggaatgaggattactcgctttaatagataatggaataccgtaatattctttttataatagattattatattattaatgttatttaaatttatttattaatttagaaatgctattcaaattaatataactgaaatctacttaaattaaatcgagataatttgacgaaaaatgcaaactgaaaaattcgacaaaaatataacctgcctaatattaatattggacaggttaaaattaataccaactcacccaatcaaccaacactaactcaaccattaagagaatttttatatatataatatatttatatttactgtatatatatctacatatcataatttatgtgactatttataaaatataaagttggaactaatgtattttttctatagtagttgatttaaatttaaattcaatctatatatttgtctcattattacaactaagtgtaatgtaacaattaaattaaaaggaaaaaaaattaatagtcggtttgggggttgctatttttgttattcctaattagacggggtacacttaaatttttataatttaatctttatagtgagttgaataaatataacataaaacgaccacactactattctcttgatagtattaacacattttcaacaacccttaatagattagtcacttaggaacctgtttggtatgctggaatatttctgtggaaatggtagtctttaacattatgttttgtataattaatttatttcttttaagcactagataattattgctatggaaatgagattgtttcaatatagagtaatctaaaatcctttatgaaaaaaaaaaagttgtttcaaaatattttcatcaatcataatgcaagaaatgatacatattaataataatttcacatcaatttttcaaaatattgtatctaattattgtgtttactaaaaagtataattcagttaacttgtaatagcttttgaataaaattgttaaaactacacatttaattttagcaaattttgaaacctgtctttgaaagaaaaaaaatcattatgatacttaatttcactactgattttatcaaaaaaaagtttttaaaaaaagtttacatatcaaatatcaatatgaaaatttggttattttccaaatctgcttgcagttttgagccctaaggcccacaacttggcttcatgctatgacacgaggcccaagttttgagagaagcccagaacaaattaaaactcgggaaaagcaaagtatggcccgttgttttgattctaatatgccttctatttaaaaattattttacaaatacatacaaacaacaaaaaacaaattataaaaatacagttctacggaattttaaatatttaaaaaaattacaaatatagaaaatacaatttttttatattgtactcttgttaatttgttattgactttttgttatctatatattattttttgttgttattttgattttatttagatattatttttctggttacttttatgtaattttcttgtgattgaatcaaattcatgtacgtcatagctatttaagatatcctacaaaattttaagaaattcgaaaaaatttataatatagaa

SEQ ID NO: 115425 - DNA, 2049 bp, Cannabis sativa
aatagtaataaaatataaaagatgtgtaaaaaagttggtttagccgtgtataggtattaatgtaataaatttatcattttagatttttagtgtaaaaatttctcttatttatttaaatttaaatctaaagaaataagatcaggtatgagaatggaaaattgagtaattaatatttgtagttatatagtgtgagaaaattagatgccttgttgtaccacatggcttcagatggacccactaatgcacacatatatttatgtatcaatatataaatttatataatggggtcccaaaatggcaataattgatgttgcaatgttgccggtgaaagtgattagattactatgttacaaataggaatctaatctatattaatatcaataggtcactttcgaagagccatcaaggtccccattctcacacacagacatagacatgtatataacattaaaaaaaaaatccaaattcctacccttttcaataattcaccatcaacccaaatttgggttcatttatatatgtatacatacatatatttttttttaaaaaaattattatatatatattaagtagctatctcttttttttattattataaatttttagttaatttttgtgtttaagaatataaattaaaatatttttttaaaaatattttttacaacaatatttgttatacttacaatatcatgtctataaatttttaaatattttacaatatagaaaataggtttagagttttttaacacagtgtaaaatagaatatcggaaattctattttcagtactgtagactatttaatttttttttaaaatttataagaataatattattattataaaaaataccgctatgaaaaaaattatttcaacatataattttgagtataaaaattaactaaaaaaattataataaaaaattgtaattaatgtttgtacatacagttagtagccttacaccataaatattttgtgattatcatgagtatcatatataaattaaattacagtagaacctttattcaagaatacacttgaaattaagaaaattatattctaattatgagattataactaaatagagttacactagaaaaaattcaaaacaccaaaaaatatcaatgtaacaataataacatatcataatagaattatttttaaataaatataatatttatatatgtattacaagttagaataaaattattaattttacgtaaagaaatttataaaatatgtatatattttatttaaatataattatttttatataaaagtatattttgttaatacgagacttaaaaaatatataaaattaattataatttagaaattatttttatttataattgactcaaattgagactgacttttttttataacaaattaaaaattattcttcataaaatattgttagatagaactttctatgctatataaattgactagctcgaataattttgctataattattacacataattttgatttttattacttagtctacacactcagtacagtattcaaggcagttatatttgtggtaccctatataataatgtagcaatatatatatgtggacctctatctctctcattctatatataagaattgtacttaagctttcttctcttcggtctttttataaataaatattttgattggttgggtttagtggggctggctgagtataaattgtctgtataggggaggtggttgcaactgacacaacaaaaagcccagacacactactatattgatgtgatctcaatggaccaaacgttacacatacagtgtcacacaccatataaaagttagagaaatttcatatttcaccccaaaataagtaccatacactattttcgtattttcgatatctagaaatttaatcttattttttttttaatataactatatatataaatcatgttataaaatcaaaataacttgttatagtgagatttctctcacttagaaactcgagaccagactcctctttaaaggacacgtgtattcagatttccaatgaaggctgaatgtccatgagaga

SEQ ID NO: 115426 - DNA, 1657 bp, Cannabis sativa
tggaaacaagttcattcgacacaaatttgggactttctcgattcttctgaaggcgcatttcatgaagttctttatcaaacccattaaagtaaacattaaccaaaattgaactcaatccactttcctgaggaaaccctcttccaaagtaaaaactacccaattcaactcccacaaccttacattcaaacaacctctttataatatcaattagtatcttatcgttgattttctcttgtataaacatgcataacttatctacatgacgattatcgaacttctcatgattaaagctaacactaaaccaccaactgggattttccactgagttcttgaggtatctaatggcggtgtgtcgtcccataccaattcgaccaccataagaaaaagtcacaaacctctcatcataaacaatctccagaaccattcgaatagcttcaaccaaaaccttcaatttcaaattgggcaaaaccaaatactcacctctattcataggagatgccattttgacacaagcagcctcgatatcgaaccgattctcgcgtatctcccgacccaattcctgtagcaaaaatcgcttcgagacagaaggcaaaagagacgataactgacccgggtcagagccattgcaggatatggcggcgaggtttcggcaggcagcgaggagaacaggtgggaaaacgacgacgttcgagacaaggtcagtgaagtttccattggcgtatcgggcgagaaccagagattggagctgggacttggaaagagagtttacagagtttaacgatggaatttgagggtcttcgtcaagcaaaggacttggtaaagaagcagagctaaatctgaagaaggggatggaatgagaagcgttaatgttgaaacttggaagaatggatattcttcttctgaggtttgcgagcattgaagcttttggaaatgctattccgcgacacttcaaatgttaattcttaacaggacaatcccattgctgtacctggacagagataatgaagacattttttcaagcaaaaagcgatgcagagtacgacttcactaattcagtcttggtctatttgggcctagcccattttcggcaaagctcataatgaaccgtggactgggccaagcccaagcgtcaatcttgtgagcgttgaggaattgatagcaaattgatagttcatgattacataacaacaatagaaaagtaattcattgaaaacagaggggtttgaagttcaaaattttcggtttagaagtagcttcgggcatgaaaagaatatgaacattaaacaaaggaagccaaccatttcaacaacaacaacagcagcaatagaaggctttaaatattacctgaatctatcttttatcagtatcctataatcgtttttatggtgcattgttgttggtacttattataatctactgccttcaataaagttcagatggagccgtcttctaaggtttctgaaaagaggtaacacttttcttaccaaataaggctttaattgttcctgatgataacagaatagctatgactagggtattcaaaataagagacaatttttttatattgttggaagtttcatttcatcgtgtttagattggcgggaaaagtagcagtaataaccggtggtgcaagagggattggagcagccacagccaa

SEQ ID NO: 115427 - DNA, 1755 bp, Cannabis sativa
atatgttctcttatcttgttgttcatagacaattgataggaaaattcctatcaagtcctatcagagatgtgttgtgaactttgtgtgtgaaaattgcttaagagttgtattgttgtatttggtttggttttgagttttaagccttctaagaagttaagtttggattgtaaacttgagtatgttgccttttgtatcttcttcatctttgttctaataagattgtgcaaagccattttaaatcttgtccatttttcgttgcttgatcgagtttttattgccatttgcttgtcctgtttttactgtttcttgttcaaaagttgtttatgttttagattgtttaaatcacaactcttttctatctagtacaaatttcgctcttgttgatagcaaaagaccgttagaatttacgagagacaacacaagttctattaaaagagccttttagagttaaaaggtgaaactaactggttactcaattaataacaaaagtgtttttggagcttcagaaactcaaaagccaaccagggtagtttatttagcccatacggtcaattgtaaacctataaacaattcaactagttctttgaatataaaccacgcaggaaaatcttttttttttttcggataaaataagagagttgttcagtctacgagttcgttgaaacaaaaacaaactcgaaaatcattggttaaatacttggataatggtcacttggttttaacaaatgagattacattgaacaatgatatgggaaagctttgttacattaaaatcatgtcaatagtgaaatttgggaaagctttgttacaacctaagaattgctcttagaatattcttctaaggtctacataatatgctcatataaggtatgtcaattagagaattactcgaaaaaacacatatcatataacattaaagaatataaatattttggcaaaacccatgaaattcattgtgttaaaaagtctattttctttactaaaaaacaaaggcctttttatatctttataataaaaggtataaaaacggttacaagttgatatatcatagcacagcataacatacatcacaatgtgttagattttgtgttaaatatgatgttaatattaataagcaaatggtttaaaagtaaaagcaaaaaaaaaaaaaaaagagacttcgtggcaaagagagaagacctctaaaattccaattaatgtgtaggatattactcatcaaatcatcaacattaccttatctttaatttaatttaattaaaattaattcaaatgtccatttcattactttataatatgttatcttctttctttcccatatctcactacctttttgcttttctccttttcactattatatatattgctttctattcctttctcttttttatttatttatttattatttttttataaacaaacaagtcctttcttttgccttttgttttagtcctctactaactattattctatactttattttaattagttgtaccatatttgttttttaaacaacatgtgacttgatattaatgaaaaaaagtgggtggtttattttttttccattttattttagtaggaagttatatttaaaaaaaaaataactaaaagtaataatacgtttcttataaatttaatacatcaagttgaagggtatctccaatggagaaactcaaatttagtattaaatcaacacaaaaaaactactattttaacattaattttttttaattacaaccacaacactaaaaattacac

SEQ ID NO: 115428 - DNA, 535 bp, Cannabis sativa
atattattaattttaaaattatgatattaaaaaaaaaactaaaataaaattaacatacgtgacttgacacgtaacatctatctagtatatgtatatataaatagaataagatcaataaaaaacatacgatattttttcacaccctaaaatcctatttgcatagtatttttttttagagcaaatattagatttccaaatttctcaaatctcttttgttgaacatatttgataaatagaaattcttgttgccttctattacgagcccacactcgtctttgggttgtgaaaatgtcgaggaagatcttggtgtgaaatctcaaagattgccatatgaaaagatagcataccagcaaggaaggactttaagtttaatttctttccttctgtcttcttgttcaatttacatacatgtgtagaagtagatctgatctattaggtatttttctattgcgtatgttgcagattataaaacctgatcaagattaccataacaacaaattcaaggacaacaataacaatgacacatgaattaaaa

SEQ ID NO: 115429 - DNA, 3767 bp, Cannabis sativa
gccacggcaaccgctccaaacttttcgtcatttgcaaagattgcgccatcgacatttactttaatcgttctcacaaccggtttcacccaatgctccaagtccatacttgaactcgaaggaacaagtaaagaccccattcttctttgttgagtatttctccattgattaaggactactcttgctaatagaataacctccgccgttgatattaatttttcccgccaaaccagctcattacgggcatgtcaaattgcccaaataaccattaacaattcctcttgggccatggttgagtgctgtagtaacatctgactaaaccagtcacaaaacgtgaacatagacacattgcccatgcttaaaattgaacgctgccagcaagatcttgcaaaggggcattgaaccaataaatggatattaatggtctctggcatttggttacacataggacacatttgtgttagactttttagtttcgttcgtgttgtaattttttattttattttcagagtgtgtaatttattgtccataatgtggttaactaggtttttgttcaaaacatctataattgagatattgttaataccaataaatattatttgtaatgactatgaaatctaattttatctgtaatgcatataaatataggaaattggtctcaagcttactaatcacaaacattatcaaggagaataaatgaaagattaatatctcttttttattttacaaattaaaatatattagtagaaatttgcatgcatcaattggatgtatacatatttgattctctcttttctatatgtactatttatgtagctgttttatatttatatagaattattcatatgtctataaattcgtttcatctaacaatgaaatattatacaatgtacttaaaaggatcttttagcactaaaaaagacaaatggagtggagccctttttcaaaaatttcacaagaatgatgaacatttgtgtttgttacaagtgaaaagaatccaaccaaaacatgaccacattattgtaatgaatttaatttgaatgcagagaatttgtttggcatgcatgctcctcctaaattccactaacatgtcgttgctttgcaaagagattgtatatcatgaaatttatcaaactaacaatgtgaaatactaaaatttacaaaataatatcacttaatttactctatgtgactataataattgcacagtgtaaagcaataattatttataatcgtttctgagaccatacaaaattattttactaataaaatttttcgtaaagactatttttataaaacaatcatgtttagtttaatgtgtttatatcttcttgctaccttagtatttttaaacttttgttttttgaataataatggaaacttctttactttaaatcatccaacaccatagaagaaattacataaagtaaagaaaaactattaaaagtacgatcagcctcaataagagaggatcgcgccaaacaatgcgccaccctattagcagatcgcttcacaaaactcaaagagatattaccaacctcggcacataatgccttgagagagaccatatttttattactttgaatatcagaaatcacccttaaacaatctgattccaagatgaccccaacccaaccattggactttatccaacgcaaagcttcctttatcccaatggcctccacctcgtgcggcttcaacaagcccattttgaggacagtccgagcttgcagaaccaacccagcagcacatctcgccaccagccccaccccaaaaggcccatccgaggagaagattgcaccgtcaacgttaacttcgatgcagggaaaagttcggaggacactatttctcaggcaaaacatttgaatgcacgggaagaagctcattttcgaactgctgtgcatttgcaccagtccaaataattcacttttgcaatgtgaattaccttttcgcttgaaggagaaatataactccaaacaacatcatttcacatcttccacacggcccaaaaagtcatagtcgcttcgatgctttcaacctcactccacttagtcaatccttcctcaaactagcacctgaaagtcatggcaacaggagccacaaccggcactttagtttgtatccagcaggattgagcaaagctacaacgaaccaacagatagagagcagtttcagaggcagcagagcataatggacacaaggtatcaacttgtacatgtttagtggacaatagaaaccttgtaggaagacaattagcacacactctccaaagaaaattaagaaccttgggagacactttgagataccacatctttctccacaaatcagtagaaacattgcggttgacatggttattaaccccatgtttaggccttgttgtttgctacgaacctttttaattttatcctaaggagacatcccgtaaaaaaataaaactcatagtcaagaacaatttagtaataagctatttaggatttttactctagaactatgacttgtgtattattgtgcttcctgaatttttcagcttgttaaaaatagttcccaaactattcacagtgttgtaaattaatttctggtcaagttttgtgatacgttacaaacagaatgatgactgttgactcaaaaatctgtactagactcttttaagccacacccacttgctagattgcgagaataaaaaagtagttaattagtaattataagtgagacacaacaaatttataatagttcactccatgaattgcgatagtaattataagatagacacaacaaatttatagtagttcactccatgtattgcgatagtaattgagttacgtccactttgagtttttatttttcacgagatagttattacaaaaaagactaagtgtcagaagctccaatttctagagagataaactagagagataagctatgaccttgtggggtagtttactaaaagtgaaaaatgagctgagggagttttccttctatatgtgaaagaggcccataaaaataagaaaaaatacaaattggatgtttttcaccgttgatgatgatctaacgatgaaaattaactcttagtggtgatagccattttttggagtccggaggtcccactgtgggtaacccgaagcttatttttgtaactcccttgggtgaattttacatttacaattacatcacttatttgcatgcccattgaagatgctctcattggcttacaactaggtccgaccatgagatatataggcttaaggcgaattagattttagggtcttcaaaaatatataaaaaaaaattaaaaaaagagtgatgtgatttgaaccatgaccttgtacaatatatcatacaccttaactaactaagttatgaatatttattgtttacaatacacttaaattttacttaaataaaattttttattttttaattttagactcccaaaaagtgtaaaccctaaacacgagtttaacctgtctatatctagagtcagccctacttacaaccctctaccattaatattaaagctataagtcacgagtgttcaaaaaaaaaaaaaacacacacccacaaagcatatcactttatatatccaatgagtagatgtcacataatgatatgtacatgtataccatccacaaaaattgttgagcatatccaaagtgctcactccaccaagtaacaacgtcaaccctacccaatcaatcctaatcattttctatgttcaaaaaaaaaaaaaaatcctaatcattttccttatttttttcgggtaaatactattt

SEQ ID NO: 115430 - DNA, 1140 bp, Cannabis sativa
actcacataataattaacggaacaacttgaatcacaattaaaattcacatcgcaatttatataaaattcacccgagtaactactcgatcaatccaaatcgtaaatttaaaaataaaaaaataaaaaataatatataagataattattttaataataattataatgaaaaaaaagagtaagctaataagagtggggtccttactggtttgaattttaattcaaatgaaatgactttggagggtcactcactgaccacaattcattcaaatgatctctaaccatctcttttgaaaatcttacaattcgttcgaagtagactttttaaaagtgattgtctccaacggcaacaccctcttatgtaaccaaaatatttatttatttatttttgctaatcttatatcttttctcaacatacccttttaagccttggctctaaagagtcaccccatcatagagatagtcacgctattttctatttctcttgtgccacatttgtctttttcttatttctatttctcttgtgatatcagattaggccttgggtagaactatttgatgaataattaatctactttttttttagaaaaagaaaagtaataataatgtaccattatattatattattttagtcctaaatatgttgtcacctttttttttctatctctttatcttgactaaatatcaatttagattaaaattataccaacatattattcaatatttcttattatttattttatcatttgcataggcaatattttatctcttcttttctttctcatcaaattacttagaaccaatctatttgatttgtttattttataaattagaactaaagttcttttattttaaataattagtaagtttattcaaaaaaaaaaaaatcatagtgagtttaattatttttgtcttgtactaagtaaaaaacaattctgagattacaatacaagtatttctattatattaatgtaaatattaaaagtttaatattaatttataaaatataaatatctacaaaagcgttggattaaaaaaatactaaagtttgttcctaagcatacattagtaatttcacacttcccctttaaaaagaggaggttccaagttcgaatccaccttttctaatatatatatatatat

SEQ ID NO: 115431 - DNA, 2341 bp, Cannabis sativa
  modified_base (2295)..(2297): a, c, t, g, unknown or other
tcgtatttatgaattttcactaagtaagggcttaattgttaagaaaagaggttttggagtttatttgttaattaagagactttgttatgtttaattaataaataagataactgacaactttatttgataattaattataattatgtaataaattatattgacatttataggattgaaatttgaaatgccattattgaaagaaaaaatgaattatgaaatacaattgaaaaattttaactagtgaggcccacatgtgtggccgaccacttagtattatatttcctattattttatcttttttaatccatataattaaatcctaaaccctagttgaaatactataaaaggaacaagatgctctcattctgattcaacctatctaaacctagttttcattctctgtcaaacaactaataaatgagagtctccttctatagtgatttcgaattcttcttgttgttctccatcaatttccagccttttgtgttaaaatacaatgcccactcataacaagtcaagtactcaaccatagtgtggaagacggtggttagatgattagaataggaaagaagaaggaagagaaatgagcaacaaaagagaattagtgcaagtgggaaaattagaataggaaagaagaaggaatcaagcattctttcccacctataaatagaagacgtaccacatcatttaaaaaatgggacgatagattcttgaccacactagactaaccaaaactctatcagaatccacccttaaattcctacatgaatttagagagtaataacccaaacccgatcgagagaattgagagaaaaattgtgtaaaccgaattagtatgtaattcgaatagattgaacctagtgtaaaaaatttaaaatcttaataacaatttattgctgagttaatttttagcatcaacactctcatttaaaatgaatcttattttaataaagaaaataattaatcataattttcagattattttgaatcatgtaaaaaaattaatcataatttttattttctttttaacaaataataaaaatgcatgtaaaaaataaacaaaccaaacaaaaaaaacctctctaaataaaatgattagggttttatttcatttttgtaactatcagctataactaaatgccctacataatactatattttatataaaaataaaataaacaacataccataaagtttattatcactactctaatgaaatatatgcatttttaaagataacacttgtatatttgatattaataaattagattttgattaacttaaagtttttagataaacactccacaactacaaaacaagtctttagaggcagttttttcagctgattaataaaaaaaggaagctaattgacgccatagagtgtggttggaatgaaaaagatatatggtgtcatttaattagtaataactaatgccataaagtgatgaattttaatgagaaatacatatggcatcagttattttgtgataaccgacaccatcgcgacacgcattagctgatacgtagggtgtacgttggtcagtttggtcggtttatgctatattttatccaatccaatgtaaatatcgggttacaaaaatctaagtgcaacccatccaattacaaagaaagaaaatagtaacctgcccaatgaaaatagttgttttggtcgagttaatccgtccaaactggccactaatattttttttttatttttacattcaattattatattttagttaattctaataaggaggaaaatgtatattagattgaatttaaaggtcaaatcaaccactataaaaaaaacatattagtttcaaccatcttaatcaggttcgtcggattagttcaggttgattgggcgtgttggtattattttcaacccgtgtaacataaagattgagcgaattatatttttgtcgagtttttcaattttcattttttgtcgggttatctcgatttagtttgggcgggttgttcgggttgggtggtttacaaaagtttatgtacagccctattgatgtgtgtcccctttgttgtcaattttttacaaaataattaacgtcataggatttataaccctcatcctagcctttgtcttcgtcacttcatctacctcaaacctaaaactagagccccttcttcctaaaaacccacgaaaccctcgcccaccacccctttcttctcccatttattcatttttcatccattcattcttattttttttaaatctcttgcaatttcatacccaaaaatatattcctggagtttgatttgttgggttttatgccnnnaataaaactcatttcatataataatatttacttattaataaaga

SEQ ID NO: 115432 - DNA, 3010 bp, Cannabis sativa
atttagggcataaaacacaacagtaatctccctccataatttcctcatttatcccttccatattcgggttccctataacaagagatttaccattattgccaattgatgagtagtcaactccatgaagattaccacccattaatgagaatccctaattttcctctccttgtccacgtcccccactttgccttactaacatcgaaataccagttggagcaccaccatgactactaaaaccagcaaacatagtcgcacccttctttgtagctatccccatacgcaaccatcttgacccatcaatgtagtttcaacgtcttggggctgcctttaactccacactatagtttttgacgatttgttcctttggagtatcaaacaacttctcccagaacctctctgaatggcctagaatcccacacttaaaacagaattttgggaggtcttcatatttgaaagtcacatggcacacacggccaccttggatttccagttttttctttttctttaaaggaacattcacaagtattttaacgcaaacacgtaagtaatcacgccaaacccctgagataattaccaataccactgattattctctcggacatgaaaccaatagacatattatgtaattgaacccagagttctaaccttgttaacgggagaagtcacagattaactcctgatttcacacgttcgaagatcagcggggtccgatcaaatgtccaaggggtgccctcaatcacccgttcgatatccacttcgtgatagaattgaaagaggaataggttcggatccaattccttaacgtatagcccccatcctggctgccatagagtggccattttgttctgcatggcttgaaaatctattgattggttagtcaagaaacgacccactagcaaccatctatcgtcaatcttcgacataccattcacacattcttcgaacagcaggccttcgtcatcatcatcttcaaatgtgaacgatgaatattgctcctcaagagctggacgtacaaaaaaacagtgacacgaaaaaaaaactacccacagccaacaaggaaacaaaggacaacaacaaaactaacatattacaaactatagactaaaccaccatgtcaatatagacaacacttatcaaaaaaaatattagttattatctctatttagtgaaattataatttaaatatactttttcgcaaaataaaatctaattgtagtcaaatattttaccttaacattaaaattttctctttttaactctcaataacacaataaaatctaattataatttaaaatatgcacaccatttggtccaatcgaaataccaaatattgggaggataaagtagttagtagcaatacaattttttatacaggttcaaaatgtgacaaagagtcaaattaattgtatatggacaaaaaaaagtatctagaagtgacaaagcatggtttgattcatcgtaaatattgtagagttaaaggtcctctattttgtttgaggatgcttgtaggttgtacaaattgagttttggagtaatgaattatcatcttattcatcaaaaaaataacgattatgatctaatttataatctaattatactgaactaatcaaatctaatctaattgcaaaaaattagacatcgagttatagttggattaaatttgaagtgactagttgtattttgattgaatttaatatgttattggaagaaacttttatatccaattaaaaattgatttaatttaattacatgtattacatataatatttattcatatacaataatttaaattataaatttcttttttatttgttgtttactaattgtcaataaactctattacacttaattaaagaaattcctaaaccaaatcctaagaacttacatatagttggtttttatataatttttagttaacattaaaaagcaagtgttgaataaaaataatatttatgatacccacccctagtctaaacattgtgagagtttttttactaaggtgtaaaataactttgttgtgaatagtagttttttttttttctacagtcattattttataatatattttatcttaatactaaacttttgataaaaataataaattaaaagttataactaattaagtaagattagatcgaataataaaaatatttaattcacccattatacaaaaaaatttaattttgggacaaataaaagtgaagattaatagacttatttatactatataggaaaacatacaaaatagtttctcaacaatgtgcaattgtttcaaaaatatttatcttcaaatttttttacaaactgataaagtgtcacacattagcaaaaatacaaagaaaatcatataaaatgctatctatcagtattgttaacccaaaaactattcctagtgatgtggacatcaatatttgacatgtggcaagaagaataatgtcacgaagttgagtagacccgagtgataaattgtacaacctttgttcttctagagttctcaacacatgagcatgaacaatagagaaaaaaaatagttttcttttaatctctatagatttcaaaatatatagtgtaaagtgattctgatttcccaaatcaggcttctatttatagtagttaaatccctttaattaaatcattatttaattttttaaataaataaatatctataaacgaattcaattactgatatttacaagggaatctctcaactacttgggagaatatctcaacaaccttgaaatattttataaccacttttcaaattagatatttacctaattgaattaattaaataattaattaaaccataaagacaaattcaatagggacaggaacaagcatagacacctaccattgtctgtaggataaggtttgtgtcttttgtcctgacaaatcttgtctcgataaattttgtcgtatcaatttttatcttttttcctatttaattaatttgaaaaaattatttatttattacaaaaataaataaatactattttgccaattcaaaata

SEQ ID NO: 115433 - DNA, 2445 bp, Cannabis sativa
atcaaaatgaagtagcttgtcaatggccgtttcatgatcatttcttcagagaaagtgagtgtcacacagatatgccaaaattaaactttatctctcttgacagcaactataatattttcatatttgatctgcaattgagccatttctttggatttactcaatttttgtttgccaatcagcatttcctgctttctataatttaaaatggcatcagtattcagctggaaccgtagtttaactctaacatatgcatgctttttatggctaatttcggtacattgttacttctttcagattgatttgctagaaatcttgcgggtatccaagtactggaagagatatggaggcagagaccatgtcattcctatgactcaccccaatgctttcagatttcttcgtacagaagtgaatgcatccattcagattgtcgtagatttcgggcgctatcctagaatcatgtcaaacttgagcaaagatgcagtggccccatatgtacatgttgttgaatcctttacaaatgataatctttcagatccatttgagtctcgcccaacgcttctcttctttagggggaggacattccgaaaagatgtatgtatttgtgttttccctcaatacttctggtcctaaaacagtagaatttttattttatgcagaatttaactggttatcttgtactctgcactgtgcaggaaggtattgttcgtgtaaagctggcaaaggtactggctggttatgatgatgttcactatgagaggagtgttgctactggagaaaatataaaagcggtatgtgttggatggagttttgtagatgattcattgtcgatgttgttaaatacataatttttcccctatttgatccaagaatgagattcttatttgctcaccttggtacagcagagggactaggataaattattcatacaaatcattcactctgtccttcaagtgatttttgattgtcatttttgggatagttcttatgtgaaattacttacattacatcatagttaaactcgatatcctcataaccttgtatgatagccttattttgatactacaattttttgggttaaatgtttactgttgaattagtcattgttggtttccattcacgacaggaatattttaatctgttcttatagactattgtctattaaatgtcctcaaaataaagaattgatcttcactttgcggctgcattggaaacctgaataatcatctgcagattatatcctctgtttaaaaaacaatgcagtttgcttaaatgtttgtactcggccatctctaattttctaaattgtgtttcctataattataattattatacttctgacattcatctcctttctgttaatcttattgtgttacagtcttcattaggaatgcgttcatcaaagttctgtcttcatcctgctggagacactccatcatcatgtcgtttatttgatgctattgtgagtcattgtattcctgtcatagtgagtgatcaaattgagctcccattcgaggatgaaattgactacagccagttctcattgtttttctcatttaaagaggctctggaacctggttacatggttactaagctccgcgaatttcccaaggaaaaatgggttgaaatgtggagacagcttaagaacatttcgcatcattttgaattccagtacccaccgaaaaaggaagatgcagttgatatgttatggagacaggtgaaacataagcttcctggggttaaacttgctgtacatagaaaccaaaggctaaaaattccagactggtggaggcgaagatgatctcaagattttaatctctcattgtacattcagaatctttttacggccacagttgaaattcttaaagcggggaagagaataactactggtaattgcaaaccccagattcagttagtgcattttccagtttgtgtagagtagtgttgttttcttcatcttatacttgtctattctctggtctactcttcctagtatataaagatgagtggcatgtttcatggtttcgtttcttcattgtgatctgatagctttgttgtcaccccttgcttgacaattttggtgacttttctgatttttacacggaaaatatttatttgatattgtagttagtaacatacagggatgtacatcagacatttttgtagttggttatgattggttgcaattgtatttttgggtattttttttatgttaatcagtgcaaagtgttagttgtaacttgtatctactttcaagatggtactttgtcgttgaattttgtaagttactactgttgaactgtttttttttttttgttcttctttattaaaataaagtaaaatgttaataaataaaaggactcgttcaaaaagacaatgagaaaaaagatatatattattaaattaataatatatatagttttgtttttttttttagatcggaagagc

SEQ ID NO: 115434 - DNA, 3480 bp, Cannabis sativa
tgttgtattctgtttgtattttatctgtatttttttttttttcacttcatcttgtaacacagtaataataaatattacagtgagatctaatttaacaccttttaaatttccaaaacatcttggtatgtgacctgataacttgttatgagaaaagtccaaaatttgaagctgattgagtctacataattgtgatggaatccacccactaaacttgtttgaaggaaaagaaagaacaatcagatcagaaagactatctccaatccatgttggtatgtgtccctcaatcatatttagcccaaagtcaaacacacttaacattgtacaatactgaagagaattaggtatttctccggaaagactattattacgaaggtgcaacgactttaagttaagtagagatcccatggaaattggaattttcccagtaaaattattattacccaaatttagaaatatgagtgattgccagtacatccaacaattcggaatgttgcctgataacgaattgccttcaagatgaagaatacgcagaaagtttcttacaccatcatcatttggttcatcacaaagaaagggagacatatcaccagaaaatgaattattggaaagatctaactctttcattgaagaagatatacatggtaagtttgtgagattggcaaagtgaatttctgagacaacaccttccaaatgattgtcggaaatatcaatagactctaaactagacataccaccaaagctttcaggaagagatccattgaattggttgtaacgaatatcgaaagtgttcagtgaggacagttttccaagagaagcaggaatggaacctgaaagcatgttttgactaagagaaagatagcttagagtttcaaacttctcgaatgtgtcatctttgagttgcccagaaaacatatttccatccaaaattaatgatgtgattttgtttaggttgcaacctcgtaaattctcaaggaattctgaaagtcctcccccaaatttattttcatttagcaaaacactctctaaattacatagttctcccatagatgatggtaaattcccttctagagaattatatgataggtcaagataaacaatggaagtcagatttccaatggcacttgatatgattccgtgcaaatcatttccaccaagattcaatctttcaacactattaataccataaatgcaagtgggaatagttgaatgaaagctattactagaaaaatcaacaactttcaaagaggttgagttttggaaatggcaggcaattgaagcgtcaaaagcgtttgtagaaagtgaaagatcgacgaggtttctaagatttaaagcactgggaagtgggccttcaaaattgttttctctaagattaagacttgcaagattactgagattgaaaacccaatttggtactgaggattgaaaattattgaatgaaatatcaagaacttctagggatgtaaaattaacatgagatagaggatgaatatgactgaggtcacaatgattcatgtataattccaataaagatgggagtttgtttactgagagtaaccaatcagatgctgcactaaggttagcttcaatctctagatattctagtgaggaaagaccagaaagccaatgaaggctatcaacatataatatttgtccaatattatacaaataattattactaagaagagtaagatggctcaaacgtgatagatttccaagttcgtgggggatatttccctcgaatcttgaatattgcaagctcaaatattttaaactacccaaagagccgatgaaacttggaatctgagtccccacaaaatcattgtagctcaggtctaaatgagttagatgtgtaagattcagcaagaaagaatttaccttgccacctaatccttcatcagaattaggagaaaatgcaaggagaagttgttggacatggcctgtgatgttgtcgcaaacaattccagcccaactgcaacagtcactcgattcgttggcaacccaagaacttagccagtttgaaggatctacaaggtctttcttgaaactcagaagtgcttctttttcactttcgatacaaagtgatgagcctaaagtatttttttttggtagaagaggaggaggtagcaaagatgaaacataggatgacgaaaagagtaatttgaaaagagagtttcactgaatgtaacgccatggtggtaagtaatctatattggatggtatacaacactcagttgtgtctatatatatagaggagaataatattggaaataatggcaaagcaaccgtcattaattattattccaagtcttttctttgaaatattattattattttttgttacaataaattccttaaaagtcttttctttggaaaaaatgtatatagtggggccagtgcgtccatgcatggaaatatcttaggaaagaattaataaatttgactgaggtattgctatacagcagtgccgactctggtataggcaggctaggctcgcacctaagacccactaatttagagacccaaataaaaaaataccctttaaaaaataaatatatatattttaataattttcaaaaataccatttgtctttctagtaagggcctaaaaagcttttctttgcctatatctcatttgaactcagggctggccctgctatacaatatgctataaggcatctcaccttaaaatctccatctccaaagatgcaactaaataatgcaaatgcaaaatatagatcactttgttaaaagtttaacaaatttgatcattgttctatcccttataaccttatcaatcattaccttgtaactttatcaatcattatctgcttactaatcgtactccactactcaccaaagcactaaaagtgttttttctccaatattgaagaactaagtcattcattaatcgaatctactggaacagaacgaaccaatcaaacagggaaaaggtcattcctccatggttgaactaccactggtttcttgtcgaaatgaatcacactagtttccaacactaaatgacgagtaacttcgtctatgaagctcacaagagtgtatcccgagtgcatacgaacaattcgctcaatacccaaattcttttaataaatccttcaaacatacgaaggggagggttcgctcccaaaaccacgcatatgatgactgagttctgcaagttttgtggttggggtacaaacttgattagctttgaatttactccagatattgacagtcgagctttgaaaatccttctcttcaacctcctcagcttaggttttacctttgtagttcaaatctgcatcgcgagacaaccttgggtctaaatctctattgcaggttcaacctcaagctctgaaagagagtcctaaaaatcctcaaccaccggcgcatcactacaacaaactgctacttttagtgacaactttttagtgacaacataatttttttgtgactaaatgtgtgacttttagtcacaacaaa

SEQ ID NO: 115435 - DNA, 2514 bp, Cannabis sativa
aaacacaactatacacaccatcaataaactatcaacaaataattgagaacgcaaagataacatgccaagtatgacttttttttttgctaaaacacatctcaatcatgattggaaatgcaaaatcatttgccatttcgacaaactgtcgagaacctatcgagaagccttcgagaaaggtattccctaaccttgggacatccgagtggagaacctttcgataacctattgaaaagccttcgagaaaggtcttccctgaccttgggatatttgagtcaagaacctttcaagaacttatcgacaacccgtcgagaaaggccttttctgaccttgagacattcgcatcgagaacgtatcgagaaactgttgagaaaaaatatgaaaacacagaatactctaaaaaatgagatctcagaattttagcgaaaattatattaaaaacaaaaggataaaatgggaagatcgtgtaattaaaggaattaattggtacaaattaataagggaagtcacaattgatatgaggtgttttattaatcataaaaagtaaaatttccctatttttattgacttctaatgtggtcatagtatgtgatactatctcctcacatacaacctctcaatatgttatactgccttgggtacagagagaataatatgttagaagatttttgcaaataacatcttaagcatttttcatcttccccatagtttttaaacagtacttagttctctaaagaaaatatcaacagccttaaaatttgatacttttcatgggttgaagaaacagccactaggcaatatttactcatcaaaatttcagatgttggaatctgagctccaaaagaaaaaaaaacatcaaaagtaattggggatcatttctgtattaataatgagaacaattacaaagttaaagaagagttatgagaatgaatataagaagagcagcaatgagagagtacttaacagccgcaagaagaatggctaacgaaataaacaagagttgccataacacttgaacactagcccatgtcagcagccctgttaatccaacggccaatatgttatcaggatctgggctcagcactagatctccccatcttaagccactgaatatagaccgtcgattttccttccccgattcatcaccatcgctatcgctgattcctcctttatccgctccatcattttcttctctctcgcttggatctttcttcaactctttgtcgtttttggtcgcaaatgccactagtgttgttagtctttttcttcttcttctttggttattgttgtaaaaatcaagattacttctgtatgtaagttcagacagagaaagtcttagtgttgagggtattgggatacggattgttgggcacaagggggtggtgaggcctaacattttatgggaaaatggcaaaaggagaaactttctaaaaaatccaacaaaccaaatacaaatatcataagtgaagaagataatcactcaattctgaagcaccaataccagccaatatttctacaaaattgaaaaaaaaaaattagtaaaatataaagatcaaacatttataaacttgttcatgtaagaacagagtaaacagaactataaagatgctaaatggcatgatgtactaaatacagatatataaaaacagagttatttaaggctaaagcttctaattttcacattctataacaactaatccctcaaattcttaatttggtgccaaactacaattcaatttacaaatttggtttggctgttttatttaaaaatgaaaattaaattaaactataaattttaatttcattcctttttccattttttttttgttctgttcttgttttgttagaagcttctccctaaaccctaaatcattacaaaaccattattatacataaagaaaaatcaaatagttcaaatccttccctctatctcaattctcaacccaaattccattagcatacacataaattctcttaaattcttatcaaatcaacatatatattcaaccatgggaatacccatttccccaaacactaaaatcacattcactatttaataacaatacataatccccaaactcttatatgaaaaaaaaaaaacagatataaaatcagatgtaaacataatcagaaatacaagacaaaccagatctgggtttggggattggacgaagccaaggtgctggttgggcgagtgaaggagggcagatggtgcggcggcgagagagaggggaagggagaggggttttggtatttgacgaatatcatcggcgccggagaaacacagaaagagaatagagtaaccgtattattaccatttactcataaatataccttttgcaattttattcaaacaaaaatattatattataattttttttattaaagaaaacgttcttacatatagaagacactatcctttataaaaaaaaaaaaaaaaattatatttttacatttaatggattttatttttatatatttttatggtttcccctaaaaacaacacgaaaacaataa

SEQ ID NO: 115436 - DNA, 2705 bp, Cannabis sativa
  modified_base (2666)..(2670): a, c, t, g, unknown or other
tttttcgatttttatgaacactcctacttcaatctggtggtgtcggttggctaaaaatagaatcaatgtttgttctcaactaattatctcaataggattaagcatttatttttttatgtataaagtttggttattgtcgactaattatcgatgggttctcaataggattaagtatttttttattgtcatgtttggttattgtcgactaattattctcaataggatcaagtatattgtaaacaatcaatgggcaagtttggttattgtcgattgatttttgataggttctcaataggattatgcattgatttttattgttacgtatggtcattgtcgatagattatcgatgggctctcgattggataagcatcggttttcatgtttccatgtttggttaatgtcgataggttatcgatggattctcaatatgttcttgatatgatttactattgaatatctttgttgtcatgtttgattttacattgttgtcgatgggttatcgactggttctcaatgacaaatcgattgtttctatttattgtaaaaaaaataacatttttattttttttttattacaaatagctccaaagcttattgctcctacttcaacccactttacagccatgtgattatgggaggagtataatattcaatactatcattgatcagtttgaaaaacatgaagacttaattgacagggtgtagggaatcccttcggctaattttggaaggctgaaacttctgttttctcttcaattttgttgcaccaattgatgttgcaaaaaatgaaggttcaagttgagaaggcggaagaattaagattgtacattagcaaaaatgaggcaagatttggcgtggttgagttcgctctcataactagcctgaatttcatgcaaggtccatcagatgaggagaagaatgctcacattggacatgactaatcgttgaatctttatttcaacaagtctggaaacgtgaagatgggacatatttacgaccaattcttgaactgctagggttgtgcttgtttgcgaagggatttctcatagatcgtgcgaagaacacatatattacgagtggtatactgagttttgttgaggatattagcttctttttccaaattctttgggggaaaagatcttctagcagaattatgtcttatgtgcacaaagacatattaaaaatgaaggctaatatagacaagaagaatgctattgaggcgaagtacacattttatggctacgcactgacattacaatattgggccaaagagaaaattttataaattggaaagaagttcaatgtgaagcatgttattcaggtacctagaatacttagctaaagtagcaaggaaactagtggaagtgttgacaatttgaagaaaatacttggtccaatattttctaaacggccgggtatgattttatttctactattattgtattgtttaatttttgatagtatgttgctatctttttgctaaaactttgcatgatttatatagtctctctatttaatgataggttatcaatgtgtttttgactatttgacaattgtgtttcaataatatataagctatgtttgaaatttttcattttttctatgtcaatgtgttattgacgggttctcgatacatttttaattataagttatgtgcttttgcacctattgtgttatgtctctctttcttgattggttatggattggttctcgatgataagctgtattttttcatctattgtgttctgtctatttcttgatagattttcgattggttgccgatatgttctggattggatattatcctttagtttgttttctttcttaaacaaaaactgattgttatgagatggttatgtcctcatcaaaatcaagaatgtatgccagaaaaatcacttacaaccatgctgagatagtgattgagatgggtatcaatgagacgcagtctgaaaatgacacccatcaccctgctattttcaaagctaagcaaaagaaaagtagcaaaacatatcgaatctactacttttcttgagccaaaacctgaacttgttgcatcatctttagggctcgatcgtgcgaagtaccaaaatttagtacagagattagataggatggaggctaagcagaagggtctttacgcttgtcaagttgagttgaaggaggcatactagactagccacctagaactgaggttggctagaaccttattacatatggagcagctcaaggtgattttgagtacattacagaataagcctgcaacagatccaacaccaaatccttcagtagatgcacgaaccccatcacatcccatggaagaatatgttgatgtgttccctgatgggtatgattattatgttgatgaggatccatgtactccagtggatgccaccattatttccatagctgacagccaatcacagggtgaggtactggccttagagaaccaccagaggggattcaattttgaaagaggaagagaaacaagcctacttggtttaaaaactatactaaaatgaaaagaaaaatcaagccttctacgccgcttgatcctcttattccaccagatgatagtttgttggatactttttataggtggttaagtgggactattattaggtttcgtgtcctaaataaaaatcattttaatataatcagatttacnnnnnaataaaagatcataaatcattttatatgttcacat

SEQ ID NO: 115437 - DNA, 1027 bp, Cannabis sativa
ttattattattattattagtaagattttattaaaatatttaataattttaattataataataatagtacagtaacaattaaattcaaatttttagtttagaaaatttattaaagaatatttaatatttagttaaattaattgaaacaaaagacatctggttgtcaacctgtggtagatgtccaagagttctttgcgtggttcgcttgtgggtgcacccttatcttcatttgaatgtcttcgttctttccatgtaccggaaggctagggaggcttctgggccttggaagagcattatgttcccgaggagaagtttagggacttcgtcgggcttgggtttgttctaggtttggactggccttccgagagcgggaatgcttaggcctaactttaagtggtgattacctgtagattatgtcacatgtgtatcttattgaaactaacacctttagtcatttatatatcttgttactctttcacttagccactattgtatttttaaaaccataaacagtcttactatatatggaaattaccatcctactataatgggcattctaaaaacataatagaaggttgggaacccgatcctcaacactcgagtctcataaccttgaaagacaatgaaaggaccacgaagggattaagttccccataactaagcaatatgctgactcttatagcttcaatggaaatcccgctctatactattccatctaagtaatttattctttcgtttacaatacattattgtttttcattctggattgatttattactttttcttttaactcggaaaagggcccgaagctagctcaaaattacttagttacttacactattacgaaagatacttttggtggtgttggttttatgtgtcagttataagtgccatttaaatatactagtttgaagctacgtgccgaggcacgtaaatattagttttatttgaagtttaattctttatttttatttagatttctataactaaaggtatgattatgaaaatgatttattatattaaagtaa

SEQ ID NO: 115438 - DNA, 1422 bp, Cannabis sativa
taatccaatcttgtccagtccagtccaatcattttcagtccaatccagtccaatcctgcgtaccaaacaggccctaaaagaaaatagtactgtactttatctaattatcgtaaaagaaattccaatattttgtgtaatttccatacgggcccatcttttcagttcgttttcaacccaactagagtccactgctggcagtctataaaatagtctcatttaaacttcataaataccactatttactaattccactatgaattttgacaccatatttagaattaatgacctgtaccacttttttctttttcctttctagttggtacaaattagttgtagacataattaagtaaacatcagaaagtgcctatgtaaaataataaacttgtataataaaactaatatacaaattaaataaaaattgacctatcattgtgttttagctcatttggccaaagttgaaagggaaagaaaaatcaaactctgagaaatggagttgagcagcacatgaggttttgtttagagcattgttgctataaggcactttagcatgttctaacaccctatggtaataatttggttagggggtttcatatgttttaatttaaatttaaacaagtggagtttaatattcatttgcacaaatagcacatatagaatgttgttggatactcatatactgagaccatgttaattttatcatcaatttgaaaaagaattacctgtaccaaatatatggatggagtggtttcatatatgccaatgccatagtctttctataaagatatgggaaatggtgggagcactagatataagcctggcccgttcatacttataattgggccttatggaaaggaaaaaaaatgcaacaaagatgtagagttggtgggtgtcactactagaccaatcattttgtaggcatgctgaactaagcttgcaattagtgatcaccatgacatgctttaaactagagattctttaaaatgtttaaagaaataaattaaaaacattctacatcaaatgctctaaatttatgctacatcagatgctttattatttattttttaaaaaacttctttataatttactattcatccttttcctttatagtatagtataatgtaaaaatttaaggtaaaataaataaaatagagttttgataatgtattttaaagaatagagtaaacaagttgatgggagtgctctaataaattttttttatgagcttttgcctttattaaaatagatcaaataaactttatttgataggtttgaagtccgaattcatgatcttggttcaagttggaaaatttctattctggttctgatctgctgctgcagagcccgattctaatgctgcaaatcaagaaattttttaagaaagttttgtacggctagaaaatcatttttgtggttgtctctagg

SEQ ID NO: 115439 - DNA, 1313 bp, Cannabis sativa
gacgcccgaagctctttcgtactaccctaaaatttctctaagacgagtagaactctcacggaatgccatcagacctataaatatgaccaactatcacttagatggtagattttggtttctagttaagcaaaaacgctatcaaattctttctacaaattaaaatttctaattttaatacaaccgatttgttgactagggtttcattaacaacttaaaccacataaacttgttctattttcaacttttatgatcttttttatattttcttttatttttttaaaattgacggaaaatccattcaacaaaatcattgttattaattaataatgataatgtaattgtgatgattaatttaattttatatgattttttatttatgattttttttgtctttcattatatagaaaatttgtagattgttctatatacacaaattaaatattgaaagtagaagaaaaaacccaacctacacataataaaagagaatgttaaaaagtattattggtgcctaacactcttcatagtgatcaaaccactattgatgtaattaagtatcagattctatatatataatttaagaaaataacttttaaaaaatatccctaaccaatcctgaggcatacatataaaagtgttggacaccagcaggcccgattctgggcataagcgggctaggcctgtgcctagggcccacccccaggggcccaaaatttattttttcctcttttaaaattatacattttttttaccgattttgaaaaataccacatgttttttaacataagagcccaaattttttttttctccctatgacccactttgtttgaggaccggccctgacaccaattgtgtctaataaattgttcaatctaacacattcttaatttctttcaaaaaaaaaacacatctttaatttggcctggtttatccaattcctcaacctaattgaatataattatgatcaattatcgattctaaattttgattttaagcaaaaactctatcaaaatgtctgtagaacttcatcaatattgtaaaagttccaatcctaatacactaactcatgactcgttaactaataattaaggtttcatgaacaatttaaatcacgtaaacctgtgtatttttcttattatcattttcattctctatgaacttttcttctatttttgtagttgacaaaaaattcagcaaacaaaatcatcattattgattatgataatataattgtgttgattaatttaatataataaattatattatttatgattttcttccttgtacacaaaataataaatattgaaaaagaacaa

SEQ ID NO: 115440 - DNA, 3321 bp, Cannabis sativa
ttttaccattttagaaaatacagagtttattttgtcatttaacaaaacagatgatccaatcaataaattttgcaaaatacaaaatctaaagtaatatttaccctattttaaataacttatgctattaaaaatataattcaagcaattagttgtataaatatttataagtgtacaaatatacttacaaattttatttccacatcataaattacttaaaatttattaaaagaaaactaatgtaatatgttagttataagaattataatgtatatttttatagaataatttactgtatagatatttaaatttaaattttaattgtaaataaatatataagtttaatttttagcagtaataataattatattatatttttggaacttctataagtacctggcaagttattgaccacgtggtaatctctgattggtccatgccattaaatttttatttttatttaaaaattaatttaaatataccaattaaaaaatgacacgtgaataacaacttgacactcaacggtcaggtctctacagaaattttaaaaatataacttaggtgttattacaataaaaaattgaacttaggtatttatctgcaactgagagttaaatttaagtattaatttacgccataaattacttattttcatatagaaaatttaagttatacttttttgtgtactgctaaagggtacccatgttaaatatcaggtctcacatattttattttaataaagattataaagaatcgttaactaattgtaaagtatcacatcatagacaggtttgatcctaggctaaggcgagctaggcccgtgcctagcgcccacccaaattcagggcccaaatttttatatagtatatttttttgtattgaaaaaatagtatttttgtaaaaatttgtgaaaaaaagacccaatattacttacactttactttagatataacacacacaaaaatttctaagatccatttatcaggggtgcataaatcaatccaatctaataataactgactgatccaattacaatcgaccgcaaaacattaaatatctgattgtgatcaaatcagattgaatattatcatactactactatgagttctatattttagataataacttttaaaagatatcgcatacccaataaaaatgctggtacttctgatagcagaaaatgaaatcctattcaaaacaaacaattctttcatttttaatagtaatgtttaggaaggaagaataggagcgctatacgtctctaacatatgctttagtaccactctccaccaaactgactaattataataaataataaatattaatattatactattatgatttttatataattaaataaaaaataaaaaataaaaaatcttaatctatttgagttggactgtgcgcataaaaacgttactcacacacttcatcagaggcatcaatattttctctctctctttctctttctctctcatctcttgctctctctctctctctctctctcacttgaatccacatgaatcgttccttcagattgttaggcggcgtgaactcgtcgtcgtcgcctccgacaccgtcgtcaccggaaccctcggtagactcagacttcgtagtaatcctcgccgcccttctctgtgctctaatctgtgttctcggtctggttgcggtggctcggtgcgcttggctccgtcgcctttctaccgggaacagtggtagtagtagtgttggtggaggagctagctcgaaccggcctcaacctccaccaccgaacaaaggcctcaagaagaagatccttcgctctcttccgaagctcgctttcactcccgaattagcttctaagttcaccgactgtgcgatctgcctcgctgagttcgccgccggagacgagatccgtgagctcccgcagtgcggccacgccttccatgtcgcctgtatcgatacctggctcggatcgcactcttcctgcccttcctgccgtcagattttggtcgtcgcaaggtgtcaaaagtgcggtggtttccctgcctcttcgagctcttcaagctccgatgccgaagccagattgaaggagagagaggactccattaataggttcttgccttagccattaactttcaactgctatctctctactttccactttccaccctaagttatattactagctacttacttagtactgttattataattactataaattattattttagatcttaactcgatcttatttatttccatatagatctagttcatcaatcatataaatacatatatatatataaatctatgtataaatagggatttcaaggatagcagagagaataattctgttgccattgctgtttatgattataattacttatataattatgtttgtatatagttattattactatctaatctttaaacttgtctctatctctgtctattttaaatgaatttaattttgaaaatgtattaatttaaatttagggcttttaaataaacactatctgtcaagattagttaaggttaatttagagtcgatttttttaaaaaagttacatttgggctaataatatataattatgaaatttgaataattaggtttttgggggaaaagtattgtggagaggagaccccatcgtaagaattgggttgggttgggttgggtgtgctctttaaggacgaaactgactaggtctggggaacttctatttgtcaaacccataatcatatattatataaatataattctttttttttttttaatgaatataacaggtacaaatgatttagtgctttgaattttcattatttctttttctttctttcaactcataaaaaaaaaagaacaaaagaagggggttcacatgtctagcattactaataaagattttgaagaggttttgcttttgctgttgattggtgtttttatacctatttactttcaaaatagcttaggttcgtatttttttaaggtaggccatggaatggaatatagtgtaaaatgaatttggactatttggagtttgggattgggactgaaaatggacccattttcaaaagagtatctctattgggtaccaaagtgattagtacttctacgacataataacttataattggttaacagttttttataatttttattaaattacaataataagtatgactcaatattacacattataacgatactagacaccataaatcaactttagcatttctctttttagtgtgttttgttggctaattagtaatttttcttctcgaattttgatatgtactaaatcatgctccaacttttttggccgttaaaattttttcctgaactat

SEQ ID NO: 115441 - DNA, 1934 bp, Cannabis sativa
ttttttttttttttgttattttagcattagcctataaaagctctcaattttttgttagaatctattttaaaaatttatttttattttattttatttataaataaaaggcccaaatttttaaattttcactcaggctccatacaagctagagacagtctgttatttaaagcacgtgacactactacaaaaaaaaacctttcgtgttatacatttgtgaaatataaaaaaaaaatgacacaaatgagatgttctaaaaatttgaattagtaatgaacatatatttgcatcagtgcaaatggggccacaaaagcattactaacgcaattgggctttgcgtgagcccaaaatatatttatgggcttatatatttgtgccaaacagatgctgtcttggacttgtcttggatagggttactcgatgtggtgaaattatatgtagtaggatttgttggtgcattgtttgactgatctgaagtgtaatggtgggacttggaggtgggggcttggagttggtaaagaccttcagtgagggtaccctgaagaagtgcttgctttgttgtcttgtccttgataagacagcaaacatcatcaaattcaatggtgacattgttatgcttagtgaactgagaaatactaagcaaatttttggttagactcggaacttgtagaatgccttttaaaactaaggactggtgaggaaatggagtgggaattgaagtacaaccaattttatttatagaaaggttagggccattaccaactacaactttagctttgctttaatagtttgctgaggtggtcagattttttgatgcatttgtgatatgatgtgttgccccactgtccaagaaccatgctccagatgtgtctgatggtgcagtcgttttagacaagagtgcttgtggtgattcagagggggaggcagatgaggaggatgatccttgagtttggggagggccagtaaaggttatatcaaacttgtgatagcacttcaaaccagtgtggccagctctgccacataattgacatattggcatgtttcctcttcctcctctgttgcctttggtgtcctcaaccgcctctttgaccacaatagctgcgtcctgggtttccttggtatacaccatgagtatgagggttcatggtggtgttgacaaagttagcttggacatttgctaaagaatcaacagttaattgatttattcgcatttcttgagagtgaagcatgaattgcacttcttgaagtgtaggattgtcggtgcgagaagtaagattcacaattacggcttcatactcggatccaaggccgccgagtatgtaaagaatcaagtcttaattggagagaggttgatctgcggtagctaaggcatctgtatattgcttcatcttcaagaagtattcatcgatcgaaagagatcctttctttgtggattgcagtaatccacgaatctaaagcattctggctctggatcttgttgcaaatagttgattcaagattgtccaaatctcagttgatgtttaacaatttatcacatgagcaagaattgcctcaaatatcgaattcattaaccaatgcataaggaatttatcaagacgaatcaattgattaaacgcatgattaagagcattacctgcaagagttcgttgtggttggggaattgttccaagcagatgaccatcaagattataggcatgaacagcaagaagaactaaggatctccataacgtgtagttcgatcgatcgagtctcagattcaacgggagcaggttggtgtttggtaatgctgctggtgcagcttcttgaacttcatttggttgtaggttttttggtgcttctagtcgaccgatagccataactctgtaccatacaagaacacagaaaaacaaagtattggaccagaaaagagtgagcttgaaagagagagagagagagag

SEQ ID NO: 115442 - DNA, 1844 bp, Cannabis sativa
  modified_base (1795)..(1800): a, c, t, g, unknown or other
tatatatatatatatgtattacatcaaacactccacaatttcccattatttcaacttgaactcaggatttccacaatcataataatgatggcatgtcaataagaaaccaaatgtacttgtgtagattcgatttgcatagaattaccctgtatgtgcatgatcagagccatatatataaatgatgagagaaaattacaagtactttgtgtagtgatatgtattcatctatataaacataaccaatcaagaacatatgattaaatgcatgcagccctttgtaatgatatcataatatatgtaaatatatatttaatatatatggaaaagaggaagcaggctaggacagaataagattctcatagttatattttatgaatattgtgtgttttgcttagctatttttataaacaacaaactgcaggttgcatttaaataaaaccaaatgttccaattgctgaatgttgtgtcttttccttgaataaacaaatataaataagtttgttggtcaataccagccatatcttggagttttttagttcctccaaatatgtcagcacttctttttttatttatttgtttatttttttctttgagtcctcttgtgttctggttcaattgtcattgtgactaaattagagattgagacattataatagtggtgtgtgttcttaaaattatagatctacaatcatatatgctcatcagtacaaaatttgacaatgatgtgggtttcaattttttattcttcatgtttttgtatgattaattttggttgctttgatgactaaacaaagtctttcattaccctcttatggtaataattaaataaaacacatttacttttcttttgtgtgtgtgtcttcaaaactaagtcagatgaaagttcttacataaaacttatgatatgaccctttttgggtgtatgaaaagtatggaatttccaaagtgatttttttggggagcattagttttcatgccacataattgtttctcagtttactataaatgattaattcaccgaagtcttatgcatgaatagctgtatgcatgtaattgtttacaagattccatttccattataagataactcttaattatgagtcgaattataatacaataataacaattatgaaaataattaattccactaatttgctacaattatttaagttacatatctctatcatgcattgttttaaatacattttaatttaaaacttacaaaaacagcatgttagctagtttctaatcattgaggaaattcgtaaagaaaacaatttataattacaaacaatattattaattaatttcgtaaccaaaaaaaaatatatgtgttattaactcattttgaaaatttgaaatgtcatatcattatagtctaagtaatcatatcttcaagtatttatgtatgattattctttatctttgcattttatcacatgatacaatattgtcaccaaacaatttcaatcaaatcttcagttgtctttgactgaaaaatttggcaatgactcatgtgacttcgatcagagcatgaaatagtgtgttaagattttctttgaaaaagagattgactataggcattaatcgagaaattaacatgaagaatatttatagatattgtaatattagggttctctccttgtaattttatttggcatatttctaataaatatgaaaacatgtattttcaaacaacttattatatgtatgtgctttttttaatattaaagatattctttctatacaaaaattttggaaatttacatgatatactaacttttgttattttttnnnnnnaatactgtaaggcggtattttttacttttaaactgtattttttt

SEQ ID NO: 115443 - DNA, 3321 bp, Cannabis sativa
aattgaagctcaacgacgaggtgccattgaagccattgaatccgacagggagagagagagagagagagagaggtaccgcgtcgcctatttgctgctgttttttttttcgttgttgacatcgacaacgaaaaagagaagggaggccgctggtggaggaagacacgcgggagaagcggagagacgtgaatcgtctcccaagctcgtggtgaggagctgccgtcagaatttgagaagaaaggagatgagatttgtgaatcgtctcccaagatcgtgaatcgtcggacaaaatcgttgtggtgaggtctgaaacttagggttattgtcgagagagagagagagagatgagattttgggtattagtctgaattttcagcttggtccaatattcgaaccacctgtcccaatagtttcaacccaattttttttctttttttgaataaattattaattagatataaaatacatcttttcccaaacagttgggtatactaactattctccacagttataaaccgttgggaatacttactattcgcaacagttaaaaaccgtcggaataaactatttttttttttaaaaaaaatctatttagtattgccaacggttattcaatgttggcaataactatcccaacagtttttttgctacagtgctaaaccgatgggaaaaacttacacttaccttttccaacggttcccataattaaccctcttctaaaccgttgggaatagcctattttgtagtagtgatttgaaataaaattacaatttaattgtattaacaaagtgaaagtttacaacatgaaaagtacttaaaagtttaagtctaaaagctatgtctaaaattgaaattccaataagtctaaaagaaattgttgtattgtgtgtcctgtaatatactgttaagttggttaatgtcataactgtcttgacagttatgacagttagtcttttgtctactttggactattataaatacattgtatattttgtaattcaaggttaacgagttgagtacattttgtaagattcaatttcaaagcaataaagaattaccattctattctctctagtttttactctctttctctctcgatagtttgtgattgtgtgtatgtgtttgaatgcctatttggaattctggtatgagtgctgatcggaactgtaggtttctaacaggtggtatcagagctaagggagttcttgaagatcttgaataagttcagagaagaaattcttagttgatgggaaaagcaaagtttaatctggaaaagtttacgggcaagaatgattttgggttatggagagtcaagatgcgagctttgttggttcagcaaggactacaagatgctttgatgggagaatcaaaactccctgcagctctatctgagaaggagaaaatagagattcttaaaaaggcgcatagtgcaattattcttagtcttggtgattgagttacagggaagtgtccaaagaaacaacagcagctggaatgtggctcaaactagaaaacctttacatggttaaattcctggcaaatcggttgttcttgaagcaaaagttgtattctttttcgaatgttaccagggaaaagtgttgaagatcatttggatgatttcaacaagatcgttcttattttggagaacataggaatcaagatcgaggataaagaccaagccatcattgttttgaattcactgcctttagaacagtatgagcattttgtcgacaccatgatgtatggtaagagttctttgacattagaagaagttgttactactttattgtcgaaagagattaagaggaaatctgagaactcagttgaaaatgctggggatggcttactagttcgaggaaaatttcaaaagaaggggaacaagacacaggacagtccaaacaaagggaaggcaaactcaaagactaagagaaggtgttatgtctgcaacaagccatcacatttgagaaaatattgcccaattctcaagaattacaacttgaagaaagatggagatgctagtgtggtctcagatggtgatgatattgatggctatgacagtgcaagtgttcttgtgatcaccaagaataacagggataaggtatggataattgactttggatgttccttccacatttgcccagataagagtcaattttctaattatcaatccagaaatagtggtactgtcaagttaggtgacaatcatttctattccatacaaggaattagaacaattaagttgcagatcgataatggaaacatggtagagctgaagcaagtaagacatgttccagaacataagagaaacttaatttctgttgcaatgcttgatcatgaagggttcaaagtcaagattgaaaagggactgttaaaggtgattaaagggtcataaaaggtcatggaagctaccattgataatggtatctatgtgctacaaggatgtatcaaaagggaccaagcaaattcagtcatgaaaatttatgatagtgtcactcttaaatggcataggaggcttggacatataagccatggtggcctgaaagttttgagtaaaatgggggtatttggtaaagatcaaatcaaggagttagatctatgtgaacaatgcattatgggaaaggctaccaaagcaaagtttggagttggaaagcataaaaccaggaacattgtggactatcttcactcagatctttgggggccataaagagctttatccagagaaggagcaaggtattttctgatctttattgatgatttttcaagacatgtatggttgtttatcttgagaaataaatatgaatcacttaacaagtttaaagaattgaaagttatgttggaaactcaaattgagagaaaaatgaagaagctgaggacagataatggattggacttctgtatagaacagttcaatcagttttgtaaagataatggcattggaaggcaccttactgttccaagaaatcctcagcaaaatgcgcttgctaagagaatgaacagaacaattcttgaaagggttagatgtatgttgatatatgcaagcttgcctaagaaattttgggcagaagctgctgtaacagcatgctatttaatcaacataagtcattcatcaaccattgaattcaaaactccactagaagtctggacagggggcactcctagttatgatcatcgaaggatctttggttgtttggcacatgctcacatcaaacagggcaaatttgaacccagagctaggaaatgcattttccttgggtacccagtgttaggctaaaattagtctaagtttcgggtcgtattttcggttagttttcactctttgtttct

SEQ ID NO: 115444 - DNA, 3246 bp, Cannabis sativa
  modified_base (87)..(88): a, c, t, g, unknown or other
aaagggacgaaaaaactcatatgagagagttcctaaaaaaacattagaaatctgaataagattgacttgtggactatgcagaatttnnactgcaaaaccacgtaaaaaactatgtgttcatattttcagtttgatatcttttattttttctgtgtgaaatcaatattgttaggctcaaatttagttaacaaaaatctgcgttaaaaattattataatcaaatactaactaaagtagggagtctgattgaagcaacaaccataaaagtagctctctaatttaactttttagctaaaaaaatagagtaccattagagatgctcttaccattaaagatgctcttagataagagcatctctaaatacactccttagctaaaagagaatgatagttgaactccaataatataaaagacgattctctataatagaaaatgaataggaagctctttacctttttctaaactttttaatagtattttaatcaaaaatactattacttttttattattttataaaattaatttatatttgataaatttaaattataaatattatttaaataatcacatactaactatagtagagagtatgttggagcatcaacaataaaaatagctctctattttaattttttagctattttaactaaaaaatgtaaagaatagaaagaatagggatccatctataataattcactgtctaccatgagtgcatgcgctactaattcatgactatgaacgtaaattatggatgccttagaaaaattgaaaagtaaactaccacaatcctctaaaaatgatcctaatccagtacaaataaaaaatcacatataaaatgcataaaaaatttattggtctcgaaaaataaaaatgaaagtcaaaagctaagcataagaaactaatccaacaccatcaataactatcttgagtatatgtgatcttccatacatattaacatactaggtgaggctagcacgtgcaatgcccgtgcctagctctcattgttttattttatttatatatttgtttgtttaattttcatttcataaataattgtaagaaaaattatataatttaatttttacatcttaattatagtgtatattacaaaatatatatttaaagcatatttagtttaatataatgagaattgtaataattatattatatattgaaatcctcattatattataaaatcaatgtaatgatgatcacatgaaaatacttcatttgcccttttttttatttctttttttttctacttttagttaatttttaaatagtaaaaataataaaactaaagaaatttttgtcaatataccacttactttatttgattacaatatctataacagaattaaaccaaatatcataatactatttacattataatttttattccattatattaccatttatattactattatgatttccattacattgtattacatcaaggtaaacatcacaattatattaaagatacaagaaaaatttgaaaaatagaaattttagttgtatttaagtggtcttatataatatgattatttagatacattttacatactatttaacttaataatcaactcaataaaaatttaatggatctcttatttttttttatttgttttgaataataatttctaattattatagaacatataattataaataattatttaattctaaatttaatgaaatatgacaacataattctacttctaagcatgtacacacacagtacgttagttatattaattattttattaaaataatttattgtacattagttatatttatactaaaaagaatttagtaaataaaagtgaggtcaaatgcaacacaaaataagaataatcacacttacataaataattttattgaaattaagaaagataaaatttactttggaagaaattattagtttctataaaatagaatggtcatattgattatcacactatttctattaaaaacactataaaacttaatatgaacaaacattaatcataaattaaaaaaaaatatcatattataatggataataagataaataatgacatagagaaataaaagaaaagataaaatattgtcttaaaagaatagtcaatataaaatagagaaaaaaaaaaataaaaggatacaaatttggaagtattgttttcaataaaaggtaaaatagtactaaaatcattatattatcattcaaaacaatataaaactaaatgaaaaaaataatattatataataatggataataggataaatattgagaagagaaaaaaaataattttatttcaaaagaaaatagttaaatataatataagaaaaataagaaaatgacaaatttagaaatattgtttttaatagagggtaaagtagtcctaaaatatcattcaaaacaatataaaacttaatgacaaaaataatattacattaaaatggaaaataggataaataatgtgaaagagaaaaaaatagatacttttatcttaaaagaaaatagttaaatataaaataagaaaaagaaaagaaaatgacaaatttaaaattatcgtttttaatagagggtaaagtagtcctaaaatatcacactattatgtaacttttaaaatagtaagaagtaagatattagcaaactaaatattcacaaactaattagcatatattaaagtaatattcacaaaataatattttaaagtaataatagttagtgttttttaaatagttacgtaatagtaatagttgtataattacgttagcgaaaaataattgtatagttacactatatcttttctttttttctttctttctcattctgtttaataatagttgtagcacttaatttagaaaaaaaaaaaaaaaaattattattataataattatttttttgagagagaaatttattcctaaaaaaaaaggagggcaaatctaccctaactaaggtagatgcacaagaaaggaaatccccaagtcaaagtttggttacaatcattcaacacaaccatcttgtctaaattagaggtgttcataagttaatcaattcaattcaattcgtatgatccaatccaatatccgtaaagtgcagatatccgcacttgtgtggattggattggattaaaaatcaaaaattcgtacttgtgcgaattggatattatttgacatgtaaaagtaaccgatataattcaattcacacatatttatatatattctaaaaaatttatatttacaattaatattttaatgt

SEQ ID NO: 115445 - DNA, 3144 bp, Cannabis sativa
  modified_base (26)..(35): a, c, t, g, unknown or other
  modified_base (2487)..(2488): a, c, t, g, unknown or other
ataaaatggattacattgaaatggannnnnnnnnngggcataaaacccaacaataatttgataccccttagtccttttatatgtttaggttaagttggtcactagttctcggagatattattgttttgtggaaatgaaagacttgaagcttcaagcttctggatgagccaaaattgaagttgtgaatctggttgatctgacttcatggatcattgcacttgtgaaaaactagatgaacgatgaagacgatattagatttagataagcagaacccaacaaactaggccaaatgttgacctgggcactgggacttctaacctaagcttcgggattctatttttgatactttcaaggcttctgaacttgaggacagtgtctctccccctatttttgaccacgtcggattcaatgcttacatcaaatttggcattcgagcattttaaggcagcgtcccaggataattatcaacatgggcattgggcctagcaccatgtcaacctaggtactgggccttgtttccaaggacataggtttgtggttttctccccgagtttacttaaatctttgttatttctgacgacaatgaagatttcttgagcactttttactgaactaatttagaaacaacccaggttgacaaaatgccaacctaggtgctaggtccctcttctgccccttcagaagttccgtttggtacctagacctagtttatttacaattttttctaaatttgaatgtgattctcaaaataattttgggaaaactccatttttttggccaatgttgacaaattgtcaacctgggcgctgggccctggttttcttcctagaacttgttgttttcctcggaaggattttttcccccatttttgatgtagacagattcaatgcaaaaaatatattcgatctgacacttggaaggtgcccaaattgacaaattgtcaacctgggcattgggtgcttgaggccccgagtgtgtaaaagttaacttgcttcgaatctaattatgatgcctcaatcatgtccatggtatgtttagttgatgccccaatgcatgttttggccattttgcactaatacagtcctggaaacttaaaccctaattgaggatgtcaacttgggcgctaggtaaaaccctaggtgcccaggttggcttctaggttacaagttcgtctaattttagctccccaaccttgtattaagttgcttcatgtcttcatggtacaaaatactaaaagatagtgggttggattcaagttattgaagtttagaattccatcctagaaatcccaaagtcaacctgggcgcagggctagggtcccttcccaagttgactgctatgactcgggtctactcaactacgtgatgtcatccttcatgccacatgtcaaacattgatgtccatgtcaccaggaaaagtttttgggttaacaggaacatatgaaagttatggaatctttaatcaacagttgctagtacagttcactgatgtctatttcttggtgtaagcaatcttaatttggaccatagatgtagatggatatcataataaaggtgttgtatataataataattatatatgacaggaccgatgtgtaattaagctttctttatcgaagtagtcattcactataaagacctaattcatatcacaacaataatcaattagtaaataggcataaatcttgagaaatcatgaagtcttgttcatgttattagtttctttgattcactcattaaagtttcttagagaacatgattattacaactttttttttttggatatatgataatatggatggctggaaacttgatttacaatatggaatcttgacttccataatggatcgaatattaattcctttcatgtgttagttttggaattgaaaagttgtgcacaaatttagatcggatctaaattatactttcactagtgaattaatggtactaaaagataaaaaggtaattagaagggcaaaatagtaattttaccaatgttaattatggaccaatacaaggaaagctaatcactcgtattaattatataaatggacactataattaaactaagtaaacataattctataattactaagaatgtaattccatattaatattttagtaataatagaattaatatatttgattaacgatacttaataaataatctaatttattgcagtttattattataggtccatggttcttagatcaccactgtaaaacacaattaagggtatggatgatacaaaataaagcggagaaagaaaatttaatttgaagtaaaatgatattaattatttatttttaattaataagtaatttattaaaaatgtattattgtggagacaagaatttgccaagataaagcatcatcttgtaattacaagtggtgcttacaacgtatcactgtatagtgatgtcgtaaatgaagggccccactgagtttatttttggattaatattaattaattcaaaagataaatanntatttaaatttgaatttaaaagttatttatagatatttatttgtggttgagatattctctcaaagtggttaagagattatttgtaggtggttgagatattttctcaagtagttgagatattccatcaatcagttattaaatatgtagtttaaactaaatatttgaatttacaaataatatatatagcagaattggctacataatacaaaacataaaaaagttaatcggtttaaccttttcctcactagtaaactattcttacattgatctttgtgtgtggtggtagatttagaagatcttttgcgagtgtcattactgtttccggatacaacttacaaaaagatagcaacgaatcttaatttttcatcatgagttaaattatttatgttcatccttttcatttttgatttaatatttaaacatgtggaggatcctagggtttagtataatgacaatctatactaaatgtttctgatgcacacctggtttagtaccacaaagcacacacaatttgtatttccatgtttcttgtgattttaatcctttagtactgtacaatctcttctaggatgtgaggtgtaacaccctaactgacataggcgtattacgtgcttttaaacatgttgtgcagctcgttactaatcaacgaggtttat

SEQ ID NO: 115446 - DNA, 3666 bp, Cannabis sativa
gggaacctgaaacaatgaaaatcaagcgtaaaactgctccaaaagacaccaatagacgagaaaatactaactttacagacccgaaacataggctaaatataacctaacaatgaaccattgcaccagaaaattaaattctacagtaactgccttactgggaagagacaaaattaaacctgtgccaattcgcgcaagaagtacaattagattatttctctaaaagatgacagcggtgtgtgggtcgattgggatagttgtttgagtacattgatggttgactattataaaggtctattctcggcttccaatacaaattgggactgtgttactgagtgtgtccaaggcagtatcacatctgatatgaacttagagcttgtggctctgattgatagtggagaggtgaaaaaagttttattccaaatgcatccggataaatctccgggtcctgacggtttcaatccagggttctatcaaaagttttgggacatagttggttaggatgtaatcaagctggtgcaacaattcgttttgtttggtgagtttccgaataacttgtatgatactcatattgtcctcactcctaaaaaatctaggcctgaaactatgagtgatcttcgccctatatctctatgtaatgtgatctataagatagtctcgaaggtgttagccaaccgattgaaaggtgttcttcatcatatcatttcaaaaactcaaagtgctttcattcttgacaggcttattactgataacattttaatatcctttgagattatgcactatctaaagaggaaaagctcgggcaatgagggtgttatggctattaagcttgatatgagcaaggcgtatgatagggtggagtggggttttcttcaggcaatgttaaaaaagatgggatttagtgatcactggattcagttggttatgtgttgtgttaggtcggtgtcctatcacattctttcgggtggaaaggaattggatcctattgtgccaaagcatgggttacggcaaggtgatccgttatcaccttatctatttcttctgtgtgcagaagggcaatcagcactaatttcagattttgagaggcaagggaaacttaggggctataaggtggctcgtggggctcctgttatcacccacatgttttttgctgatgacagttacttgtattgtcgtgctactgagaaagaggcccataatgtgatggagcttctccaatgttttcaacttgctttagggcagcaggtaaatttgaataagtcatctacttttttcagtgctataataccggtgtggatattcgtgcaagaatttgttcgattcttaaggttcaggaggtaggagagtcaagtacttacttgggtcttcccaacattttgggaagaaataaaaatgtcttgttgggttttttaaaagaaaagatgaagaaaaaaatacaaagttgggaggggaaattcttatctaaagcaggtgaagagttgttattaaaaactgttgctcagtctttgccaagctatgctatgaatgtcttcttgttacctctcaaaatcgttaatgaaatggaacaattaatgtgtaaatattggtggaagtattcctcaaagaataataaaggaattcattagaaaagttaggataagttaacggttcataaatcaaaaggagggatggggtttagaaatcttcatgattttaatctctctttattgagtaagcaaggatggaggttactttgtaggcctcatacgcttattgggcgaatgtttcaagcaagatactatgtggggaaggatttcttgaatgcagaattgggaagtaattccagttttatttggcgaagtatttatgaaacaaaggagctggttcgaatgggggcacgtcagtgtgtgggagatggatctcaaactaatattgtttcggacccttggttaccatgtgataaaaatcccaggatcagttagaatcatcctacacttttgaatcaaaatgttgttgctcttatggtcactgatagtttggtctgggatgttgacttggtgcgtgatttggttaacaacagagatactcaactcatattaagtattcccttaaattcaagtcgaattgatgatgtttggtactggtcttttgagaacttaggaaacttttcagtgaagagtatgtatagacatttgcaattgagaaaagaggatgatttgcagctgtcggggtctgacttctgaagtaaactgtggtgccttaaggttcctccgaaggtaaaagatttactttggagagctgcctcgaattgtcttctaacaaaggttcagttgcagttgcgccttaaacatgttaatgtcgactctaaatgtcctttgtgtctctcgaacagtgagactatattgcatcgactggtggaatgctcttttgctcggtcttgctgggaaagaacgggaattggagttaatttggactatgctggaacttttacatgaaggttggatgctagctttaaaaagtttgagggggaaaatagaaaaatcatagccatgacttgttgggctatatgaaaagtaaagaatgattgtgtttggaaagagaagagtgctaatgtggcaactatctttcttttagccaaaagcatgctggaaaaatggactacgacacaagataaatttcaacattcaactgctgcatttttgacagcagatgatggtgctgaagtatggcatggcagaaaccagtagtacgagaggtaaaaatcaatgttgatgtagctcttttctcagatcctaacatgtacagctttgcatgtgttgcaagagatgaaccctgccatgttttggaagcgatttcttgttgtaaacagggcaatgttgcccctgaattagctgaggctatcgggttacaattgaaactgattgtcttaccgtggttcaagcgctttgcagcccactttctatgttttcttattttggaagtgtaatatcagatagtaagactttgtggaatgatgtcaataatgtgtctattttatttgttaaacgatctgctaacggtattgctcatgcgattgttagagcttcatgttgggtcgctgatcgtgtcattaggagtgatgagtttactcctgctattggtgatgtaatcatgaaagaagtttgttaataaagcttcctttattttttttttttaaaataattttgtttattaattctataattatttcaatataaataaagaattgaactcctaataattataaaattatatttattgagctttactgtagtgcccattggtataattaattttagtgagtaaccctccttatgtcggttcgtaattatttttggtaaaattaccattttaccttggtaattatttctttatcctttaatgtcgttaattcacactactacaaaacaagcctttagagtcgcttttttcagcataataattaataaccgacgccatagggttaaaaatttttagaagggaatttgacgccacttttggcgtcggttatttggaaataaccgacgccatagggtgtgctcccctatggcgtcggttattaataacaacaaaacacgattcaaaacaatataaaataatcacaacaacatttagcaatataaaagtttaccacccatctgactgcagtatatgtattcacagaacctactt

SEQ ID NO: 115447 - DNA, 2746 bp, Cannabis sativa
gttcgagggggagtgttggaataggcatttagttagttatcagttagttgtatctgttagtttgtttgtttcagttagttacaactgactgtgtatataaaccagtgtactcatctctttcaattaatgagatcttttcattcaatctttctctgtctttctttctctcatttcttctttctgttctttcatggttgctctgttttctgtttgaacctttgttcatggctagaagatttaacacagatgataaacaaaaattttaaagagaagaaccgaagaatgggcagagttaaaattcaggctctactatccgatcatacgacggctgaaatcgccgattgtggtggtggaggaaggaaggagaaaagggaaacgaaggtgcgacggtgcacacggtgtcgatcgtcgatcgtggtaattagtaggaacgaaggtggcatggtttcgataattgtccgtcttggtggtggaggcttttttcgaaaggaataactgaattatgtttcttccataattaagggtacaattgggattttacttataaaagtaggtataaattaaataatatataatgaaaggtaaaaataaaaggaggtaatgaaaactgggtatggggtgcaatttcttttattttgttccattaatgaactccggcccaaggcaaccttagtgatccttgattctgtagatttgggtcacgcttgcagttgcttgcctctgtgaagattgggccatatattgaagaatattaaagcctaaagtgggtttcaaaaggtctttcatagtgtatccctttattacttggtatttttatttatttatggtgttaattttgaagtgacattattcaaaatatttgctcttgtccttagccggtgttaatttgtgtccctttagtgataatattttacgatttaaaaagaacaatagaataaacaaaagaacattaaaagataaagaaagatgcagagagaataaaactcacaattacaaattacaaattaaagcaacgacgtacgtgtttccatatttcataacagtagttgttttacattttactgttgtgtctaataaacatacaaaactccaatgttttgaactgttgtgtttttattcttttatccttttcccctttaaaggatttttacttgtgaaccatccaagtacaatttgccattggcatataaatatttatatatatgtcagacctcatcactttaattgtgaaagtcacaagctgggccacttaaaactttaattgatgtataaatatatcgattccttaccaaataatgtaatcttgtccacttgttatgaccttatacgaaaatcaaataataatatatataatacaaacttttggttctcgttttttctaattcactcattcgaatcaaatatatggtagcagtctttgcatgaaatgatgaaaatggagaacaaaataagtaaatataatgctaagagtcaaatgcataatcaaaatgtatctttctaaaatctctcctcttcagaaattttcttcttccccatttattttgttatatttataaattattgattccctttctttatttgatttcagtttttgtgtattttttgttaccccattaacaaagttaaggttagtaattattaattacgcgcaaaagaagtcaaactccacccttctttttttgtcaatgcataattgataattggcagcactttcaataatatatttttagtaacaacactttcacagatttagatcattttgggtttgatggtgaggttggtatttgatttcaaatacattagaatctctctatatatattatatcgataatttttatatttatgtcacatcatcatgtcattttttcttgcactaaaggattccaaccattatttccactattttttttttttgttgccaaattcagttggcatgctggaaaaaagagtcttcccttttgaggaaaagcaaacattgtatgtattgagatatattatgtcctactcacctgaatttttttgagcacttttgagatggcttcactgtacattaagagacattcaaaatagacatattacttaatgcctatcaagtactactgttgatctagattttcaacagcaaaaataaacgtttactttcgattactctcgaaatagttaatactttcacaaatatttgaagctttttatatgcatattctatatacataggaaaaataaaatatactaatttagcattccagtattttgcttgaataaacgcatataattttaataaagtatgttaaatgacatttttgtgatcagcaatcgttgattgttctcaaaattatgataaaaaagtcaattttgaaataatgagtgaaattcacacttgatttgggcctctagccagccacaactaactcctcgatgttctcatcgagccctcttaatctataaagggaaacaagcaagaagaggaagcctgcggatgcctttcaatccatacgagtcttatttttgtatctacggatacacagatttcattctgtttttaggaaaagatatctcacttcttttttttttttcatatcacagtacacatttaattattcttgtatacttttattatattaccaatatagggaaagtataatttaaaatagtcaattattgcacacatatatatatactaggtgattgttacgtgtcaagctacgtagtgttagttttatttaatattttagttttttattttaat

SEQ ID NO: 115448 - DNA, 1427 bp, Cannabis sativa
gaataagataattagtttttgaacaattaatttgtatgtttgtagttgtaaaatgtagaataatgtgtttatagaataaattggatcaatttttttttaaaaaaagtccggtttgggcggttcaaaccgaccaaaccgtggttcaaaacggttggttttaagatagtttctagattggtcgatcggttttcggattgcaccaatccagaccgaaaactgaattctgaatttttatatagaaaaaactgaccaaaccgaccgatgctcatccctagttgacatcatgtcgtcatactacccacgaatactttaatttttgaaaaatcattcttcaacaatatcattgacaaactatcaaaaaagtgtcgatatcatgttgacatatacccacaaacactttatttttgaaaaactattcttcagcaatatcattgagaaactgtcaaaaacttttcagcatcatgtcgacaaactacccacaaacgctttaatttttgaaaaccattcttcaacaatatcatcaacaaattgtcgacatctcattaacactttatttgtaagaaaatgataatttagccaatattatcaacaaaaaatcaacaatgtattgacatgctatcgatatatcatgaacaatacgttatttgttaaacaaattcatctaagtaaataatgtcgataccatgtcgacataccatcgataaactagtaaaattattggaaaatagaaaataagtaaaactataacaattaatggttacactaattgtttaaaaagatggacattaaaaaataaaaaataagtaaaatatataaactgtaacaattacaccaatgggtgtctcaaaatataaaaagtatggcagattacacagaaatatcaactggcgttctggtaatagagatcaacacaccaccattcacaaaacatcatcacgcgatcatgcgtgagctatgggatattgcatcatcagatgatccacgtaaacaatggcataaacgccacaatcaccactaaatgcaacataaaatacagaattagtagaatataaaacatattttaattaatatagtacttttttaaagatatttaccttttttttaccttaggaacaaagtcgtgactgaattttaagttgaatggatcttcaaaagttggttgacattgttcatatcaactgccatgatctaattattatttggaaattctctagatgcatagagtaacaatggcaacagattttcctaggtcattaggatggctaccatgtccttccttttataaatgctagaatcacagtcgtacactgtaattttcaacagctcaatctcgacttcaacagccacacattgctactgataggaaagattcagaataaagtaaatgaactcattaccccccctcccagatagatttggtcctgtaa

SEQ ID NO: 115449 - DNA, 1542 bp, Cannabis sativa
tatgaaaaaaagttatattgtcatcgtctttctttatatttttattttttattcttctaataataattattttgtttgttctttcaaagtggatgtgtagaggaggagtgatatttagaaggcttgatttccaattcaacaagttagagaagctatgttggattggatcttccatagacaaggctaagagagattctttggcttgtttcttaaacatatgtccttcattgctcaaactctctattgaggtaaattattatgacttagtctcaactcaatttgaaaattttgtgacaaaaaattatgtgtaactatattgcaaattgtcatcatctgaaaaaagaattataatttattaatttaccaaaaatataaaacaacattaacatatttatatttatatgtatttttttttttgactccattgttcacttacttaaaactaattataattgttatgtttattgtgtgcagatgaatcataggctaagcatcattgattgtccatttttccactattattggcatgagcctcatctttggatggattgtgaaagtgtgaaaagtaacacattacaactaaaacaactcaaaatgttaaggttagaaggatttttgggtgaagaagatgaaattttgttaatggagctattgcttaacaaagctgtggttcttgagtcaatgacaatagcataattaactactaagtagagcttgttaaacaaggtagagcaaaatttgctcatgattttcaatgtaaatgtaattaaactcattaatataatattataaatttggttaaaaaccctcatggaggcaccttatttgtaaagttttggatgttatctagcatttgtggctaaagttagtcaaaaacataaattgattacctaaaggctaataaaatgaaattggggacttagacaatacgccactgaaaaagttagggaccttaagtgctgtttaggaaaatatgaattatctattcaaagttgaaattttataagtcaaaattatgagatcataatcataggaaaattagaataatgacttttttttttctttcatattagcaagtggccataaatgactagatgccccttttctccatgtggatgggacctgggtttcctaatgggatagaaattttttactgggaattttttaccccgttctcaatagaaaatgagcgggaatgagaattaaaattattaacagagatagagacggaagagtactccctgcaaatttttcgctccatgtgtatctcttaattgaataaagtcattaatattaggggtatacattagtcagtttgaccggtttaagttgcattttatttaacccaacgtaaagaccgagttataaaaatttaaatgtaatccggccaattaagaaaaataaaaattcaacctaccttatgaattggtcggtttggtcgggttaaccagtccaactccaaaccgagcactcaatactaatatattttttttacaatgattgatttaaactttgaattcaatctatatctattctatataa

SEQ ID NO: 115450 - DNA, 2980 bp, Cannabis sativa
taaataatttaatattaaaaaattatcaattcaaaatgatcgattcaatccgtacttttacgaattaaattggattggattagaacaattgtacgaattagattgaatccaaaaaaataaaaatatgcagttagtgtaaatcaaatgtattataaacaatataatatagtaaagagaatagtaggcaatggtataacttttagcaattctctaaaaacaaacatatacatcaacatcacctcattagcctctcacacatttccaatttccatatatgttaagatagagaatttctttaattgtaaagttggtgatgtcatatccttaactcatcacataagcaggtccagacaggctcgggcttaggaaatctagtacataattcatggggtttttaggaaaatcatcaccctgtcccatcagtataataatactgttaatttactcatctagaaatctagaagggctaaataaataaataaataatatatataatttaaggaaaaacaataataagataattaattgagcacattttttcactgcttctttctttgtagttggtagtggtagggtctaacattccaatctaatatattcttttttcatttcgttcacaaataaaggaaccgcgagtttggatatatcatatatattatgatatgtattatttgaggccaataaatggagaaaatggtccaaaaatagcttaataatgccgtccaattcttgtccatacaattcttattatataaaaacgtgcatgaatgacgatacactgtttattattttgtttttttatgtgatatattacacggtcagctgatacatagatcaaatcataaaatatcagtaaccccataaatatcaataaaacttcaatctcattactaattggatctaactttaactaactaaaatataaggacgttgatcatgagacagaaaagagctcctttcttattatctttattacatatctccagatctcttttacatgactaaacattacacaagaaggaatatataataatcaagaaatttttacaaaacaaactaattaattaataaatatatataataacaattaaattaaatacttatacatttattatataattaaaatctagcgagaatggcagctttgagagcttggtgatcagatctcattctttgatcgggaaccttgacgacaacgtcttgaagcataaggtcattgatggttgagacgctggcatggttgacctgaaactgaagctcacgcaacgcatccattagcctggccgatgggtaattctcattctccgactgaaccctaatcatcgcatccgtaccaactatcttaatatccagctcgattccgtcgcgatcgacttctccaacggcggccgagggggactgataattatcggaggaggagttgtttgaattattaacggaagtggtacacgtgctctggttgtctaagctgctattatcacaccccatttcaacctttactctcttattgttgtgataatccctttgggaaataactaattgggactccaattcctctatcttcgttttgagctcgtttatgtacgaaacggcgtcggataacagagacgctttgtccatcctcgaaacgttagggacaacggcgcgtagcgcgtagaaacggttattcagcttctcacgccgctgcctttcagcttccacgtggttcaaaggtgtatcccgacccagacccggttttcgtccacgctttttcggtacccgtttgctgacgttatcaaccggtactggatagtccgaaatcgaacccgaattatcagactcagaatatatgctattaatattcgtctttatcaacggtagtaaagtcttcgtttcatttgtgttgatgtccgtttctttccgtgctccggctgtgattccaatgtcggcgaaggaaatattctggcggtgtaggaactgaatcgggttcggatcggttgacccgaataaggactttgctttttggactaaaccccaattctccataatgattttggaagaacccagttcaagaaccccacaactggttgggatacagaccagagtctcgatcccgtgaagttgagcttcgtttgctcggtcgcagttatagtaccgaagctcatggccgccggtcaaccaaaccaacgaaccagaactcaaggccttcccgggaacaccttctccggcgaagaaagatcgactcaacgacatgacgtagaaccactcggcgtcggcgttagcgtccgtagctccgttcgtgttgatgacatcatcatcatcgtcatcatcgataatctttctgtcgaggtgtagggtttgaggatgatgagtggtcctagtagtggagtagtgtttggaggcttggaagtggccgtctccccaggttagaaagattcgtccggcgtcgtcgtttgaggtctgccagaaaatagcataattccagcaatcaggctgggtttggagtaagagttgaagcctctgttgcaggactactactgttggttgttcttgggataatgagactagagacgatgatgaggacggtgaaatcattaggtcttccatataaatttgatgggacaggggagaaattcaggtgagatattagttgtggagtgatgagagttagaaggatatgagtgaccggatatatatatatatagtgtataaactaatggataaatagagacacgccaaaaactaataaatagtagaaattaatgagatcgaaagagagagagtgtggtgaattgaattacgaattgtagtggtggattaattaagtaatatagttgttgtatagtaatagtagagagtggttattaattaggaaaacttacaaaaatacttattttttattaaatattttcaaaaatactgggacacggcaaactttacatttttactgtccaatcccatttttatttcttttatactgcccaggcccaatatatttact

SEQ ID NO: 115451 - DNA, 2863 bp, Cannabis sativa
taaaaatgttgatgtaggcgtgtaggagtaaaacagtaataaaatgtgcaaaacagatttttggtgtaaaaatttcttttttttaagagattacagataataataataataataataaaagaaattatatatacataaaattcactgtccatgtgacaaatgtatatatttatttatggcaaaaatggagcacatacatgatacatgataatatttaattcgatcaaataacttaagagagaagagtgctactctactagaatgaagatctaaaaaactttctattttaaaatatgattaaaaaaataagaaaatttctattctaagtaatatatatatatataaattatttgagtatagtgataataataaattaaaaaataaaaattaataaacaaatgtcataattgttgataataaataattaagaatttttatataaaaaatacaaaatttaacttttattacacttttatcttcataagggtagaataatttttatatctcttattttattttaagctaattaagattttttttttccgaactttcacatatactaaatcataattttttaaaaaattaaaaatcttaattaatctttattttatttaccaaaatagatttctacttgtgttgcgattggggttgcaatttgttgcaaacatatatatgtcttgtgagttggtgagttgcatcttgagttgcgattagggttacgatttgagctgagattcatgttgcgatttaaggttgcaaagataataatataagagggcttttcaaagttaggcaattgtaggtggttgcagatgagacaaatctgattttggctaagaaagaatgagaatgatagaagaaaatcggcctggtttcgatgaggaaacacaaaaagaagaaatgatagatgtattagatttcaaataacattgattatatatataaatagacgaaagaatatatacccctgattaagcctttgctgttcttgttctacaatttcaatatgcgttgcaatatgtgaattgaattcaattttaggaatcttgtggtatgggttgaaatagggatttagggttgcgaattgggcttaaatgttttgtgttttgtttttgctaaaatgggtatcaaataagagaacaagcataataataaaataaaaaaaagcagaaggaagagatgctgaaggtctgtaatggtgttggcttccaatggtctctggtggtctttagcgaaactagagggtagaagaagacaaagtataaaaataagaaaagagtgagtgacagaagaattgggggaaatgttaacaacactgtaaatcaaaatttagtcttatgagaatcaaacaataaattagagaggagaggaagcttaccgtgtccatataattgattttgtaatggtatgatcttctaattttgtagtcaaatctttctttgtaacctttatctcttgatgatggggtttcaagagaataaaaagataggaaattgcaaattgggaactattaataccgtttatattactaactcacaaaatagttaataatatttattgactatttttatttggcccctcatcaaattagaaattgtctttatagtatcaacaatattaaaatcatgacaattatgcccttaaattataaactttattctaaaatagaccacataaatttgacttatttatttgataacccaacacacattttatatatacaattgtgatcctaataaatttttaacagaaaatggaaacaagagaccgtaaaattgaaatagaaaagtattttttaaaaaaataaatgttaaaaaaatacaatatagaaaaatctaaaaaaaaagtcataaaaatagaaaataaattagaaaaaagcataaacaaagtgattcccctatattaaataataatagcttactattgtaatattttagaacaaaaacaataaaaaataatataaaaaagaaataaaataaaatattatatttttaaatgatgtagaagttttttttttattattttttttgatgaatcaagtgttgtattgctcataaatctcatttgtacaaacaaatagcatcctcattgaaataaggacctgtatgaatcatatatgatctatcattatttacatcaatgctagttactctatcttaaaaattgaaaaactaatcttgatccttcttcttgacttccttcgtccagaatatccttacatgggtccttacaacctcttttgtgtgctgaataatctgatttgtgcgtactatcttcatgtcccatatgtgttcattccttgctttccaaagattataaatcaaagaagcaatgacagccgaaaataccttcttccttaaacttgacagctttgctcttcttatccctctcaccagctgctgcattgagttgcattgcgagccccattgcaaccattgttttacttctagcaagcagtgagctgaaaccgaacaagtgaagaataaatgctcaatgttttcttggtgttggttgcacaagacacaagtatcttcctgcactatgttatgagctttcaatcttgcttttgttctcaaccgattgtgcattgctaactagaaaatatagcaataacatctagccttccccaaacctttctatcccaggtgatcttcggctgaactggacagagcatcttatatccctcagcaatggaatatcgggttccaacaaaccgttgaatatccatcatgctcttgattttgtcttttgcattcaccacctgcttccaataccagctgccattttgtgggaacttatattcccaccaatctccttgtttaatatatacactatgtatccatcgaacccacaagttatcttc

SEQ ID NO: 115452 - DNA, 1157 bp, Cannabis sativa
  modified_base (1114)..(1132): a, c, t, g, unknown or other
taggatgttaaaaacatacatggtagtaaatctagatccttgtaaaataattccaacactagattggtgcttcgtgaatgatgtgtgggactcctcctttgtacaatccaaagtttcacatctggaccattttaactctgaccaccgtgcaatatcagcagttatctccaatgatttggctactcctcagcagcataagagatgcaacagattttgttttgagaaaatatggttaacagaccctgaaagtaaaagcatcatctcaaattgctggctggtagaaagcacatcaaacccgataaggagtgtcattaataatttggattcctgtgctaaatcattgcaacaatggcatattaaaaaatatggccgaatgaagaagagtatagctgatgcacaatccaaagttgacaaccttaaacaattctcgtactctcaataatgagacaactgctgcattgaaacacaatgaatcaattctggatgatctgttagaacaagaagagatatactggcaacaacgctctagaattgattggatgcaattaggggataggaatataaaatacttttactctaaagcctcggcaagaaaatcaaacaaaaagatagcttttctcaagacagatgatggtctaaaagtcacctccaaacaagacatgagaaaagttattcgagattatttctccaacctgttccaggctacttctattgataataatgctcttacagcaactttttctaccatcccagtttttgtcactatggacgtgaatgaggctcttgtcaaaccgttcaccaaatcagatgttgaaatggctctacaaactatgggacctgacaaaagacaggaattaacagaatgtctgtaatgttctactaaagtaattgggatgttgtcgggaacatggtcacttcaactgtattaagtgtcttaaatgatggtgcggaccctacacctcttaataaaactatgattacctcattccaaagatcaagaaggcacaatacatgagggatttcagaccaatcaacctatgcaatgtcatctccaaacttattgctaaagttctagttgctcgtttgaagaatgttgttggaatatattttaccnnnnnnnnnnnnnnnnnnnaagtatgtttttaacatcctaaaca

SEQ ID NO: 115453 - DNA, 1979 bp, Cannabis sativa
aatcagattagattgaaatgggttttatttagggcataaaatcccaacagttatgttccatgatactatatttcaaaaactcaatccaccttcctttattggattacatagctcattctaagctatcgttcccgctccaccacgttctataacacccttctaaagaaatgctcttcaaatagcattaattttttgtagaattttcttaggcaagagcattatttgagcccaataagcaaatatagataccagtactgagttgataagtgtcactctaccaacaaatgataagtttctagaactcttcctatgtcttcagctattaccaggtctccgcgtgtaggcttattgttaggtttttattagtactattttttagtttgattataatgtatttttaaataagtttaactcttattttgtgtaattttacgcttttggtagttgttattttggaggtctagaatagaagaaaaatgaaaaaatattgaaaaaaaaaatgagaaaatggtcaaataaatcaactcttgaggaaatagtactaagaaattaattcgtgaaaaaatccagaagtttcggtgcgtttggagctcttaaggcgaagaaattacaaaatgtggaggagcgcatcaacactaaaactccatatcagggcattaaaaggcaaaaaattagcagagaggatcgattttgatcaaggcataagcgtgccttaacgttggaccttagtgttgaaacagaaattcgtaaagagctcactgcctcaaataaggagattaatgcctcaacactagaagctagtgtcgaggcgtgtgtctacaaaaatatcaggaagtatctcattcgcatacacaggccacgacactaaggccctagtgtcgcagcccgcccccttgttatttggaattttatatttttctatcttttttatcttttttcggttataagaagaagtagactttcataattttcagcaagcaattagatagtacgaattagagagaaacaaagtgaccgagaaggctttttaacagaacttttcaataatttcttcttctctattttcttctaatgttcttacttaaattgtgtcgaattattacgatgaacaagagtagctaaacagttattagggtattgatggatattatttgacatttgttttatagttttaatatgatttgattcttctccatttttctatgtgttctattttatttgtacttagtccttttaattgtctaaccatcaattaattgtttatgattatgatacgagatctgagaagtgggtttcaattatgctatagcaaaatagaaataaattttgatataggacaagagtacctatgtggtttggatagcttataggatttttgtgtttaataccttttacatgttttaatttttcacaaaagtataaaattttcatgtaattgagatttatatatctgaatagattataaattactggagtaaaccagttattgcgtataaattagtactaagaattgaattatgttagaccataatagatagatatgattaaaatcaataatcctagttctattcattgttaattcacacattaatttacttgctttttgtttttataatttttttagttttaaattttgatatagccaaatagaaataaaagtttaattttaatgtacttaactataattcttgtgggatcaatctcactcttgtgagtctattacttgctaacgatacatatacttgcgtgatccacaacacctatgcctttgattgttaccaaataactgaagacataggtttatgcttaccgagaatttcaaaaactcgatataataaagtaagaactaaggagatttttatgtggattgggtattattgaatcctagtgtaacgcccgtattttataataataaacttgaaaattatttttaataatttatatattaataatcacatggatcgggatcccgagtatca

SEQ ID NO: 115454 - DNA, 2432 bp, Cannabis sativa
  modified_base (47)..(61): a, c, t, g, unknown or other
gtgaaccatgcaatataaaatgaaatttctgatttttattaattagnnnnnnnnnnnnnnntgaaatagattttatttagggcacaaaacccaacacaaacacctagctaaagctagcgggctttacctctattttctgcttttctttcttcaactacgggcaatatcttttgtaatggctagtcacactgcactggaaacattctcagcctttacactatcctgaatgatgcttcttaaaatagtggcattctaggtaagtgtaatgactctctgaaccaccctaacgaccacctcaacctcagttcccttgaaacctcttgttctcacttgagccatcgaacacaaatggaacctttatttttttatcagaggttgagtcactaccacccctaccaaaacaaaagataggaggagcagtggacccaccaacaatttgagtccctcaggactcttgaatgcactctactacgccattagcttgcaatgctttctctaccgtaagagcatcggtagtcctgtcatccatagtaattatcaaatcacgtttgattttagggttcaaccccgctaaatacttttccttcttactaaaattggttagcactattcctgaggctaacctggttaacctgccaaactaagtcaaatattttgtaactgacatattctctccttatgtcaactgggtgaattctttcctgtttctgctacaaactgtctcattgtagtacttagcattgaacagatcttggaactcctcccaggtaattctagtaacatcccaagtgaggggcatcatatcccaccaggctagggaatcctcctgaaactgaaaggtggcacaaacactctatcattgctagtgacacctatgaagttcaatattctattgatgactgctagtcattttttggctttcataacattcagacctcccagagaaactggaagttcttacttataaaatctttcatataacagttcatacaattaccaacaaaaacttgctccactggcaacccaagagtaggagctatcggtactacggagcaggcaccacaagagcaccctgttgccttaagcgtccaatttcttcatcttgttcattaattttggcttacatttttgtaaacctctattcccaatcttgggaagctcgaggtgggttagcattaccctgactgtaagccctaccccttcgacctctacctcgaccataggcattagggggattctaaccacgctaacaaccactggatttgactgaatttcctttgcttctcgtgtttcgctggcgtccattctattaaactagtctgcacaatcatgggttagcctggttagattgcaatcaagattaaatcgggttaccgcttacatgggaatttaaacatatgcctattcaactgtcacgctactagcatacttcccatcaagcttttcttaatcacatactaataaatcaaactactaaagcataaagaggcttactaaatcgtgagttgagcttatccctgatgataattgtacatatcatgatcatcttccgaacacaacctagcagctcaaataccaaattataacaccttactagattaggcacgctatcgtgttttcttaattactattcacacctttactaatcaaagagtttattaaaaatgtgtctaattaaaagttttcataaataacttaaacatatatatatatatatacaaatacatatttcgagatcctgcttaaaaagttataatagctttcaaagtacatgtattaaaaagcttcctagcgactatcaaaataaaggcctaactgtcacgaagatctgaacactccatgtctaaccgcctcaatatgtacaatcttcatctagcccagaagtcattgttgttcagtctttgtcttgcctttaactacacatgtaaacaatatatgtgagtcaacacactcagtaagaaaagtataaacataaatatataaccagatcatgacaaggcgcccatacacctaatcacaaacctattctgtttctaactcgtactaagtctggaacgttagtacaatagtacgattgaccataatatagtctatactcaatacactagtcgtaccgatgtgattgcgtcaatccgtactttgccatacatatattcgtcaatagttagtgtaactctatgtacactaagacctctcttacggatatgttatctactaggcaatcataaaacatgcacgctaaatatgtaagtatgcatataattacattaaatcatgcctcatttcggaactcatgtgttgttggtcaacctgagtggaaactgctactcgacgaggccctaagtcacaatttacataaactagtaagtgacccgctaaatcacttttggggacttagggcccgtttagcacaacttttagaaaaactaaaa

SEQ ID NO: 115455 - DNA, 4414 bp, Cannabis sativa
tgatttcattcccaatcagcatcgaagaaaccggcatctttcatctccgagtagtatgcattttccaagttcaaattttcctcctgcattgattaaaatatagaatatacagtaatttgcaaggcatcgatcgactatattaactgaacaaagagaatcttgtcttgcagacaagggttgatgaagcttaccatgaaaaagtcggcaagaaatgttgcataaataagaggaagataaaaggcatggtaacagacaatggtagtgccatataacctgcgatcaaaatgttcgaaacaacaaaaagccatcttactaatttgttgccacatgataaactgaaatcttttagctcctaaagatcaatatcagaaataccagaatccaaaaccagccccattccctgtaagtccgcaagcaaatagcgacactgcatttaatgagaacatgattgcagtgtatttgtagaaagcaggtcttgctgtaaagaagaatagagctatcagattctcccttgaatcagtcataaatttaagagctgacttgtacctatggtgagcttcttacctggtaatctttctctccacttggaattgtacatgaacaatatagagccataaattgcagtaagcaccatcttgtggacaacccacaagccccacttcattttatgtgtttgatcattgctgtcaatgaataatgggattccaaatgcaaaaagatatattgcctgcaagaggaacagcgtctcattagtgttccaatgtgtgcattttctaaccataataaagcagaagaaaaccagcacagttttagcattcatcgcggacaagtaaacatcactcaaaaaagtattaatgaggaaaacagataagataccttcagaactatgtccaaaccaacaacaagccctgagataccaaaagtacgtgtcaaagcctctaatccatttacggaatttccttggaatagaaaagccagcaagcttacttccaaaaacagcatcccggccttggtaaacaaagataggacattccaagccatttctttccctggagtgcactcccatgcctgtgaaattcaagaattaacccagtctaagctgaatgattggcaaaatttgtataaagaaatcaagcagtaactcaatgagaggtccttagttccatagtcataacaagatccaaataaatagcattttgttgagtatgaagacaatttatatttccaatccaagtttagaaaataatgtattccaatcaaaaccatacaaaaactcccaactagataccatccataatatataggcataagccattaatttcatgtcaaatatgggcactgtcacaacccaaaagcatgaagagcagtctactatacaaagttgacatatttgccttgggtagaaagtgattcacttattatttagataagttggcagtgttgggtcattagaattacaaaaacaagtaagagttatgctccagattttttgtttccctagtgaatagggagtgtctaggggtttccttttacagattcattgaatcgaagatccattagaagctgacatccctttgttctgatcaacagttagaatttagaagccaaaccacactactgaatgagagagtaccagctaggagcgcagagatagagagctatcttgccaatcaagtggaggacgaatccttctagctccattatgtcatctagctgcacttagagagttactaacccaaagcaagaccaattcctcagaatcttggccataaccaaataactaaatggtaattcatctaaaccaccaacctagtcacaagccacaatcgatcgtcagtagccaaaccatataggaaagctcactcttggtagggtaacatctcaagcaatcaaaatagtccttgatttttctaagatgaaaactttgataaaagacaatctcaaagcaaactagcttgtgttgtgaacaaagttatatagtttattcacttgaggtttgcgcacatcacactacctatattaacaaactttgtacgaataacttatgcaaaaagactccatattacatattaatatacttgtcacattcatgtactgagcactctaagccacattaagaaagtcctacttcatacacattgatccacagggtgttagagtccaaataaaataatcaagcataaatgattgattaagtctttgttcttattctggcctcatctaatgatgcttattgaacacactttgaaaaggaagaaagttgcctgcttgaagctgaaaccttaagactttctcttgggcaatctatgaattacaaagctcagaactcctcaactcaatcgctgaacctcaaaattattcatttatgaaaagaattgtggtcacagagtgggacctacctctaggctctaatccataaaacaaattcaaaaagttgtttctttataataaattaaggcatttaccctttgtttggatggacttaagattttaaggagaaaaaatttgatgagggaaaaaatggaggaaaatgtttcccacataaatagttctatatttcataaaattttactatacttaagttgaataattctagaaaaagtattcttacttattgatttaatagaaacatgtggaatcctttggaattcattttttcccactcaaaatccaagttccaaccaaacaaggccgtatctaaacatataaaggggcttccaatcagatgtcatactaatagttagcagagaatggtgacccgtaccctatttctaagattatagtgaagtccttgactaaattacttggtggaaagattgaaaatcttgattgaagagaaacctcctttctaaggcctagaaaaatcctcattctttaagaactcggaaagattgaatttcttcctttcattaaggaagacaccctcatcattccaccaaaaaagatggttattcacttcctattttcaaagcaggaaataagaaaagaatcttagatgtttgttttgggattttaccacatatttctctttgtttcctcctgaactgaatttacttctcttcagctaagtctatgattttcaaaggatgaaatcaatggtctaaaagactaaaacaaagccaactccaccatccaggtcaagccaggccctcaaatagcataatgaaggatcccccgtttataggtaggcttatttgataacgtacttcttataaaaggaattgcgtaacgtaaatcttttgtcatgttgatgctatataaagattataatctaaaattaaagaaagaaaaaaaaaatcagtagcacaacttagttatgaagtcgaaagaagagcgaacctgaaaaaggcaccaaccaagattgagcaaactgacaatccaaaggcacgcgtaatatgaaatcataatataagagcggccatgggagagcttaggcaagctctgtctggcctgaaaacccaggtacaggacgaacagaagcgatgccaagatcagggccgcattatgccaaaacccatggcagtctgtgagccagccgtacaatcgtggacccgaatctccgactggtactgtcaaattcgagccaagagtgaggggtatttggagacctgacggggagagaatttcttgaagatcgcgcattttcgcatgagagaggaaagggaagacttgtgatatgggtgatttgttgatgaagtggtagaaagtagaaaccctaatcctaggtctgatcagcaaaaatggggacgaataatgtttttgatactttgatacgcaattgaaaaaaaaaataataataataaattatcacttttaattttcttgttggattttttaatatgcatacagaaattgctgcaacaaaagaaaatggttttagcttttaattttcagatgggaaaacggtacactatcacattttttattaagtttaaaagttttaatatattttctatatcgagaacatcggtagaaaaatgtaagtataatttgagtgttcaatttttattccacttaaaatttttattttttttactttttttattgtgagagagaatttttttcaaaaatactgtatattgtgttaagtttttacagttgtttcacggttgttttttagttgtactattgttgttttaattgtttagttttgttgttttacggttattttataaaaagacagtatttttgtaaaaaaaaaattgtgtaataataaaattgtaagcttttatccaaaatccaatatttttataaaaacccctatattttagggttgaggcccgagatgatatccagctaaagattgaaatataatttgcagggatggtacctgtgggatgggtacatgtgggacccacacctaatcgagcggggatttctcaacttggcgggtaatgggattgtagtggaggtg

SEQ ID NO: 115456 - DNA, 1970 bp, Cannabis sativa
taactaataatattttttaaaatttttaattgtatcaactttttaataacgtagaaaaaaactagaataaaatttagtatacgtgcctcacacgtaattctttgctagtattaatataagcatttaaatactatataacatctcatatttatttactacaataacgatatggtacttctagcatttcttataaaaagaaacctaaaataaaaagagggacaatacatacacacaaacaattgaaatatctcatcaaataaatttatatgaaagaaacattattattctcatgtccaaagaaacgtcccaaatcaaaaaaattaataagaagaagaaaaaaataaagtccttaattttcttagctattttcttatatatatttttcactctataagttaaagctaacacactccaattactaaatggtaacatttatttgttacaaaacaccacaaaggatgctaaatgattacttctcaatcatcacctcattgtacaatcaagaattgtaattccatgaatgattatgttttgtgtttttgtacctttagatcgtcgtcatcggacatgatcgtcggtgccatgtcgcgatagtaaattactacaagacattggtaatcagctctgtttcatccaattttttacatatgtatatgaagtgagaatctggatcttccaagatgaaatccgttgggagtaaaccattttcggttgtgggaataggttccaaactcggccgtgttgatgaactatcaccgtcgcgctttttgaatccaggtctagctgttgaaaaataaggagacaagttcaagaaaaaccgaaagaggaataagaagctcaaaggatacataattcatagatattttcatatttaaacttaaaattatcacaaatcgagaaaaaattctcgaataaaatattggggatccgagaagttttaagttagattaaggataaaaaatggccaacgagaaagctttatgattgtaggaccggtgtctctttattgtttatcggtctgctagctaacagagttgctcatagttttgttagaacttttcattcttttccagatcgaagtttcaggatgtttctaacaagtttatgtctattaaaaaactgatcaaacacgacaaaatcctctaaaaaacttacgtataatgtataacatgattttccaattgtataccggtttgttcaaatgaggcatccgtactctaggatcgccataagttatctgacaaagaagacgattcagtaaccgatcatacttttccatgaaaaaagaaagaaagaacaaaaaagttactaaattgacaaaagacatgtctaggtgagagtatagtttaccaacatataaatacctcctggtttaagaagcctacaacagaaaaacacaagtgattactttagaaataaacaaatgcaaaacttaattatgaaaaaaataacacagatcagaacagaacaggaatacaaaaccattgtttttttaaagtctacaacctactgacttctcctagcatttgggaagtactgaccggcgcgtcggtgccacactacagtcaaaacaacaagaaagtgttaaagcatgccccgatatcgctaaaaaagggtaccgttaatactagaataaatatgatttttgcctcccaaactatgaaatttgtaggattttgcctcttgaattatttttttttgtaaaaaattccactcgaactttggaaatttccccctttaataacattatgttcatttttgcaaacagttttctaatgtaaaactgatccagaattaatctagtgtaattcgagtatccatgcaaaaaatattagcatagttagtagtagtctagcaataaaatttgggagtatatattcgtaattttagagttaatatttgaaagtttaagattattataattagttctaattagcttaaattaattaatatttgaaagtttaagatta

SEQ ID NO: 115457 - DNA, 1769 bp, Cannabis sativa
tagtagtttctaatccattctcttaatcttaggtattacataacacctccaacccttgttcaattccaaaatgaaccggtcgtacccttctctgcttatccgccagggtattgttgatgttgtaccacaggctctagagacgtagaatgatcactgctaactttccaatcgtcaaatttggaaattgaggagctttcattaaatggagatgaatctgcaccgagccaaggatgattcttgtagaagttgaaggagatcctggtcgatatgatgttcacctccccagaactcaccagggttcatctacaaaaggagggagacaaagggtgagagctagatggggaaaaataaggtaaaacatatcggaaatgctaaccaagccaattcaaagaaaaaagaagggatttcacctcaaaaatgaaaccccaaaaactaagggtttaaaagaacactgatattcataaacttatgaatggatattttcaaataattctggccaaaatggcaagaaattagaagcataaagaatcaacacgtatatcagttagaagttaaaagctctaatattgtctaaatcttagatcagtcaagaacagattcaaggacccagaataacattaaaaaattcagaaaagtaatgcatgtattcaaaggaaatcacataaaaaagaaaagaagatgacttactcactgttcgcatattcttgagtttgctttgacaacttcagcaaatgatctccaacagagggttcttcgatggtttgagaagaaaaagagaattttttgctctcgtaatatgcaagaaataaaaatggctaaaagattgtcaagaaagcttaaatctctttttataagaatttggagggataattaagtaatttaaaatttaaattttggagttttcccccaaaaaggaacgttagcactcattgaataagtacaaacgtcatgcatgcagtgtcatataactgtcattgcgtgaatcgaggtacaacttcaaagtaaggtatttaatgctctagattgcgaagagacactccattagtcatgttggatcaagggaagaaaatggacacgtgtcactcatctgatcagatcctgaccgaataagtccacgtgcgaccaaaaagatcccgtgcggacttgggggaaaatattatccaaatttctacacaaagtgatgtgatatctacttgggtgacacgtgacagattccataagcaggatgggtaatcccacttataatgaactgtgtagggagatttaatagtaaacagaagttaagatttttgagcagagcatgtgaaaacacctgaccagcttctatcacgcaggtggcttggatacaccaactaggggatgcgaattagacaatttcagagatatatatcctcaagcttgcaaggtacgataatatccctaaatttatgagatagattcgcagtcataaagaagaaataaaacctacctagtttctcattctgtttattgtaattatagaaagtaaacaaatttctcatttaattccttattgattttggaaaataaaattgatgtaattaatctctataaatcgtggactgatgtgtatcgtaagccacaacaaatttactattatttatttcatataccttcaattattttagtataattgtaagtaagggtctatcccacgagaactataattaatttattattcactatcaaacagaaattaaagggggggttttgagttgtaattaaatagcataaaaagaaaataaaaacaa

SEQ ID NO: 115458 - DNA, 1416 bp, Cannabis sativa
aaagctatatgaataaatatctaacatattaacacagcatggtactaaccctttgtttggtagagtgaattgaaggagagatggattgaggggtgtggaatgagacaatccatccttgggttgattttgtttggtaagaaggaaaaggagcaaaggatggaaattcttatggattgtcaattacttgggtccataaaaaatgatcctcccacatatgggtgagtggattgacaatttatttttcaaaataattatatggctaatttttttaatattgtaaataatagaaaataccaattctttctttctttctttcctatgatagcaaacaaaactaaagaaagatgaatctatcaccatttcatattttctatactttctacgtaatcaattttttcttattttatctttcttactaaacaaatgataaaaactaataaaattatgtgaggcacacataaacaatttatctttacaatcaacaaaatttaatgcatgaacacgttaacatattaagagagtagtggtttgtcagtttttgccataaaggaaatagaggattagttgttataattggtaaagtttaatgagtttagccgcaaattactcacaataatataatttcattagctttggtacaccgtgcccatttggctagattatacgtcatgaaatcataatttcgatcgacccaaactagtttttaattctgcagtctatttaaagactaattaaaatctatctaagccacatttaagtttatcgtcactaggaattgaggttgaaagtaattgtgagagggtgaaagtgtaaaaaaaataattaagagaggtgttaatatttttttttttagtaaaaaaacatgagaaaataaatatttggaggaaggtgggcatgacccccataagatcaatatacatccatccctaccaacctcgggcctaacatgttgaagtctcgaaacaaacacagtgacattattatactagaaaataatattatcctcatggtcgattttgaaaatatgggaggctaagataatttaaatttttagactcttaaaatataaatatatattatgcacaaatataagaaaataaaactatatgtataatttaattattttctataatattctaatagtctaaaaaaaaaaacacaagtaaaaaaacacaaagttgaaacttgaaataagcaaaagagaaaataatatatttgtatatttaactaaacttgaaaaataaaaaactcatcttgaacttttctcccacatagtcaatccaaatagcttggttgcctacaagttctatacttatggcgcgtttactaaactgtaattggaattagaataatcaatgggagaaatgtatcagtttaaaatagaaaataatcggaaacaatattttattatgatgt

SEQ ID NO: 115459 - DNA, 3773 bp, Cannabis sativa
  modified_base (1438)..(1454): a, c, t, g, unknown or other
  modified_base (2068)..(2082): a, c, t, g, unknown or other
  modified_base (2306)..(2309): a, c, t, g, unknown or other
  modified_base (2867)..(2867): a, c, t, g, unknown or other
taaacccaaaaaaaaattgggattccatatatttgtttgtgtcgacaacttttgccggcgcatgtcaccaaatgcgccggcaaaaagcccttttcttgtagtgtaaccaaaatacccctaggattgactttaagttttagtgcttgagatgggcaatttagtcttttcctaagattagaattttgtctttatgtgattaatatatatgctgaacagaataaactgaatttagattatattgtttaagtattagttttttttttggaggaaaatttagaaactaaggataattgcataacatcacctctctttttctcctccttcgaagcctaggaagccagctgctgcagggggttttcttgagtttttggctaagttaatcaaagattaatgtcatctaagttgtgaggtaagttctatatcatgttcttatggatttctaaagattacgttaagtgttagattagagtttttgggattttggggttgagattttaaattgagcttaaaataggtttttagatgttaagttaggattattggtgtctgaattgagcatttctatggctgtttgtttgagaattagaaattttggtttaaaaacccaatttcttagttctaacttggtagattggatattatggtaaatttttgagaattatttgattgcgtatcttgtttttatgttattgaactgttctggaagagtatagcaggtttggtggagcttgtattgggttttggggtgaaaaaccagacttccccatggctgcccagaaaaccggtcgaccgattttgcaggcaactagcgaaccggtcaaccggttggctagcagggggaatctcgggttttcttctcgaatctggttttggctcggggtattttttggagtttaattcagaacctttttagtttgaactagtaggaaatagggtttgtccggttgcgggagttagggtttattctcgaaaatttgattaaggtatttaccgaattttgttgtcgtgacataggaccctggatcgtcgagcgtagttccacttaggtcggctcgcacacttgactagtggactgaggtatgaaaagctatatgcactgcacatgttaagtgggaaacgattactatcatttgtgactcgattatgatcaaggtagcaattattactgtttgtgactcgattatgatcgagatggcaatttttactgtttgtaactcgattatgatcgaggtaacaattattatcgtttgtgactcgattatgatcgtagaaaaaaaacggtcattaccgtcatgagtatcaagttaggagtgtattttgtaaatgagaggaaattaactccaaaacattgataatttttaaggtttgtaaaggggtcgtaacttgaggttcatacccagattaaattgaaaattttgataaataataataataatannnnnnnnnnnnnnnnnaataataataataaatactattttggactttatattatgtaaaagttatcaatcggatttttattttgttaaatgacaaaatagacgatgtattttctaaaatgatacaaatagaatcatgaactgatttttttcaaaataaaatttaataataatccgatctagagatgttatgacaaaactagttacattttctatatctgttcgttttacgaattgtcttcaagttatattaaaaatattatcaaaaattgagctcaatgccctattttcaccattttggaacatacatggttcattttagtagaaattacacaatatatgagaatttttagagttgacttttttatggcataaataaataataccatggagttatgtgttttttttttttatatatttatatgaatttttttatgccatatttttgtaaaaaaagatagaaatttcatatttgtaaaacaataataagtttcgtcgagagtcactagtgctgaaaaattcgccggtgctgaaaaagtcaccgtcgccgaaaaaagtcaccaaaagtagatgtctcagatataaacaaaaatagaaccggttatagaacataatgaataaaaataaataannnnnnnnnnnnnnnaccggttataattaaaatataacaggttctgtaacataaaaaataaaaataaataacacaaaataacttaaacccgttataattaaaatagaaccagatttataaaaatattataatgaataaaaataaataacacgaaataaatcaaaccggttatattacattatgaatgaatatttttggggtatatatgatatgagtataattatttggtgggttggagnnnnttgaatggatgtttttgtttgagttattttatttaactagtttttgtatgtgagtttttatcttagttgctttacaaaattagttttttgtgttaaatttttaactagttgataaatataaccgttttctttatattatatttgagttatcatgtgttattatttgtgtttatttattttgttatgaaaccgattcttttcatatttatgcctcaatattttttggaattgatctctatttttttaaaaaaatttataatccgttttatgaggtattatgtgttatgaggtattttgttgtggaactagttttgtttttaatttatgtgtcagtattttaggaactaatttcctctttgttttttaattgtaatcgctttgagttattgtgtgttacttgtttgtattcattatgttatataagcggttctattttagttataactggtttgagttatttcatgttatttgtttttattcattataacactgttatagaaccgattctatttttgtgttatttatttttattaattatattacagaaccggttatatntcaattataaccggtttgagttatcagtttttattcatagaatcagttctatttttagttatatatgagatatctacttttggtgacttttctgacgacagtgactttttcggcgacattttcggtgacggtaattttctcggcgacaataacttttccggtaccgaagatttttccggcgccgttgactttttcggcgaaccttattattgttttacaaatatgaaatttctactttttttttacgaaaatatggtataaaaaagtccatacatatattaaaaataaaaaaacccataaccccttggtattatttatttatgctataaaaaaagtaaactataccctcaattatcatattaataaaaattcactttaattttatcttttaacaaaatagaagatccaatcggtaacttttacaaatcattggtccaaaatagtaattatcctaataataatagaaccaacataaagatgaaaatttggatgtaaaccaaaaatcatacttgtgctagctaaatatctagaaagcctaaacaaaagtggtaaaattctctagttgggccatttaatgattaagtgggcctgggcccaggcccaacttaggtgcaacaactgaacacgaacgaaagctttccatctccttcaccccttcagagaccattcttccgccaccgtctccgactccgacttctcctccatctcaagcgacggtcggtgatgactgaaagaagtacagcgctacaaggttttctcccatctcaatttagtaatcacttttctccttttctcttttactttactgttggaaaaattctcaataaaagagagaataggaggattacaatcaaaatactcaaaatacaaataaaagtatttcatcaagattacaagaaatttaga

SEQ ID NO: 115460 - DNA, 2245 bp, Cannabis sativa
  modified_base (1811)..(1819): a, c, t, g, unknown or other
  modified_base (2210)..(2219): a, c, t, g, unknown or other
ttattattattattaattattttttaatttatttttgggtgaatgtgaagaaagaattaattcagctaagtttttgcttttaattttttttttttaaatacaaaaaaaaaaatatacataaataaatttaattgtttagggttaaggaagtactttgggggtggtattttggaatggtaaatttttatttacatttcaaaaatttctaaacacgtactattttaataatttttattttatataaaaatttatatttttaattgtattaaatttttttaatttttttctttcaattcatattcttaaaaagtatacctatataaataaaaataaaatatattttaaatattatgacaaaaaaattatataaaattttcttaaaaaaataaaaaatacatatacatgagttggaaaaaaattatgaaaaaaaaaattaaaataattattgaaattaacataaaataatatgagaaaaaaatattaagagtaatttttaaaaattatttaatttttttttttttaataatagagtgtatttatcattttataaggtgcaaatagaagtctcttcttagaaatcagtggcggttggtcacttctgaaagtgaaatgactataacaaccctaacatgcttcccattgaccctttttaatcattgaagctaatctgacacattatttaattaaaatcagctaattagtgatctgggtttgtttctgtttaatccaacaatttcatatcaaatttaacaaatctttttcattcccaataataccctttcccaaaaattaacattaaataagcaaaaattaagtttaattttcaacttgttgggtggtagcactgtagtactctacaagtggtgtaatgtaaaggccctactgtgattgtgacaattgtataatttgacaaaaaggaaaaagaaaaataatctttatcataattaatattaataaaaaaatccctacaaattataaatgatatgtaaataaattattttgaaattttatggtgtaactttaaaaattagtttatcaatacactctttaatatttttaatatttaaatagttgtaattttattattttatatatatgataagatatgtttgaaaattttgaaaattttaaaataattttatgtgctgaaaaaaataaattttaaatagtctatttgcatgcatgtttttttttttaattttatatgtataatataaatttcttatatcataaaaaaaaaattatataatagaccaaaaatttaaaagaatacaaaatacactaatatagaaaaaaatttattttactttttaattttttttatttacaaaaatacatcttgaataaaaataagaaattatttttttagttgttttataatttatttattgttgaattatagttattatgtggttgtttttctagttattttttattgttttatagtttatttatagttgatttataattgtcatgaggttgatttctcgtttttttttactttttatcgagcaaagtttatttttcgtaattttaaaattttacatcgtacttttataattaaaaattttaaatcgtaacattgtaaataaatataaaaaaaaaaagagtatttttttttaaaaaaaaatttattttaaattattcttaatatttttaaatttttaaaaatatcttaaataattaaacatacacactgtataacaaaattaaaatcataattattctaatataaaaaatacaataggataaatacactcattttcaaaaagtgtaccatatagaaactctaaattattattattattatnnnnnnnnnttttttttttttttttgcatgattgaaaagataattatagtgataataataacaataataataatataagacaattttgagtgggttccactgttgaattaaactttggttagtaggtcatgttattaggccaagccatttatgaattgaagtaaatggtgaccaattcagttggcttatcgacctaccctaataaatggcgtggaaatttcgacggtgaagatctcatcatcaactcctcatcacaatttattaacgcaatttttgggaccatattattcaatttcatcactccaaccttcaaatttatttaattctacagtattttattttattttattttaattttccctctctctaactctaattataatatatatctttatatatnnnnnnnnnntatctaacggcatttcttggtttaac

SEQ ID NO: 115461 - DNA, 6139 bp, Cannabis sativa
caaaacttatctcagacatgctaagtggcagccaatacttgaaccaaggaatgtgattgaagctcttcagtagaagggatggaatagagccatgtatgatgaggtcatagctcttaagaagaacaaaacttggattttgattccaagatcaaaagccaacaatcaaatttgatgtaaatgggtgcacaaaatcataagaaatgcagatggatccttccaaattaaggtataaatcaaggttagtagccaagggctttcatgagagaggaagattagattatggagaaacttttagtccagttgtcaaagcctctacagtcagaattgtcttgagtattgttgcctcaaaaaacttggatattagaaaacttgacataaacaatgccttcttgaatgggcatcttgaagaagatgtatatacatgtgtcaaccagaaggctttgaagaccccacaaagcctgatcatgtgtgcaagttactcaagtccttatatggactcaaataggctctaagagcctggtttgacaaattaaaaggcactctgctaaaatgaaattttagaatctctaaagctgatacacccttgttcttctacatcagcaatgacatcgtcatcattattttgatctatggtgatgacattatagtcacaggaacaacaatgaaaatctggacaggtttattggaaaacttaaaaggttttttactttcaaagatcttgggcactttatttctttcttggtatattgatgttgctagaactaaaactggtctttatctcactcaaactaaatacattgaagatctgtcggagaagaacaatttacagcatctgaaaccatgtcccactcctatagctactggtaaatctttgtctctctctgatggcaagctaatggaaaatccaaccacctacaaaagtcttattggagctttacagtatttgaatcacaccagacctgacatcagcttgaagttaactctctaagtcagtctcttaaagctccaacaacttcacattggagtgcagctaaaagaatcttaagatacctcaaaggtaccagcactcaaggcccacatatcagctgcagtggcagattcaatcttactggctactctgatgcatattaggccaacaatgttgatgacagaagatctgttggtggatactgtgtctatcttggagagtcacttatgtcctggtcctctaagaaacaagcagttgtatcaagatacagcacaaagtctaaatacagagcacttgctcatgttagtgttgaaataacctagattgagtccttgctaaaagaaatcaagtttcctcttcctgtttttccaagcacctgttgtgataatatgagtgcaagtgctttggcctcaaatccaatttatcatgctcgcactaagcgcatagaaattgacatacttttttgagagacaaggttttgaacaagacattggaagtcagatctatctcttcagcaaatcaaatagcagattgcatgacaaagcctctctctctctcattcaaggttcttgtttaaggggtggtgttaagaaagttaattaattattgcttaatgttaattactccattttgtatcattgtcaagggttgttatcattattttctgtgtattgctttttcgattttgtatgtgcccttggcaccggacattagggccacaagtcaccttgtcattggttcttgtattcaccatcaaagtataaatagaaaactttatactcagcctcctttaagctgaaatttccaatcatttttgtgcattaattctttaattggttatacgtgaaggtttaagtatatcaaaattttaattatttttacctatttctcggtattattattattttttcgatttttagtttggagatttcagctaggttgaaagttgaaacccttactgctatattgtaacaaacaatgactaaactaataaacgttcaatcaggagatgttcaagttgagtcgtcttaaccaaattgagtgaagcaccatgtgaatcacatcaaacggttgagccggtctattcaatacaaaatgtctttttacctgagaaaccttatgatatagtatcaagtacttctcatttgaaatatcacttaagatgttcttaatttcaggtatttttgagattgggatttgaatgctaaattgattccaatcaagtacatcattgaagggtaatgagtagctatcagagattattacagggacacacccagcattgatcgcctccaccactcttgggctagccacttcgtatccacttggacacaaacaatacttactttttcccatcagcttagtgtaattttgccctcttggtaccttgtcaaacacctgaatctctttatctttgtctttccattgctcgaacaagatctttctaatatatccatggagtacaccagcaaaaaaggctaatattttgcgcctttgcggggattggcccaaatctgctgggcccaatgttcctcttctcaaatagatttcaggtagtgatacatctcttttgggtagaaatccttctgacatgttggcattacatataactcttataaagtttttgaagagatgagaatttccatgtgatacttctggaccctgaattaagagtatagcagaaaaaaaatatatgtttaatttcatcaatgaaataagagtttacacattgttttaataagagtttatactagaagaatgtacatgtatctcacccaatcatgggaggaaaccatgaaatgatcagcaccattgctttcattccaaaatgggtacttattagccacaacactaacatagtcattcatcactcgatagaggcgatctcgattgtagtcagacgggtgaataatagggctataaataaacataatgatgttaaatacactgataggaatcaaaaatgtgtgcgcctcctcaggatatttagccctgaaaggactctcctcactctctatttcttcaatgaattgtccttcaatagcatacacgctacgcattgggcccatgtggaatattggtcgttctccttccttgtagctccacactttgaatctttttaccatctcaatatgactcctttattggccccaaaaaatatataagttaattaaacatagcactctttttgggtgtcaaacctattaatgcatatttaaagtggtaccatttacttactggtgaaaagcatatgggtttctgtaaattgaaccttttggtacaaagctctcattcttatcagacttaaaacttttggaaataatagcttgacgaatagctagtcgggccttagccagatcatactcaattctcttcaacttattcttcttcttcttgattatctgctcaaaagcacatacagtatacacattagctacaaataaatttaactaaaacacttgctgtacataaatatcttctatatatatatatattcccatataccagaaaaagaaaaaaaaccaatgatgctcacctttttagcaggaatgtgatagttattaatagtaatcattgtattgttttgatgctttaaacttgagagaaaagtgtcttcatcagaaacttttggtggaactataacgttactggtgttcgaaatatgataaatgagaataggaatagaggtattaatataattattattgataaattggatttggctcaaggttatattattatgcaaaaggaaaggaagaagaagaagaagtagggaagttgaaatgaacaacaaaattgtggaatggcttaaggttgaagccatggcttctagtggctgaaataattgatcgattacatatatattaacttctaggttcattacatatataataatgatctagaattatgtctagcacgtgtcttccatatatacgtatctaattatagttaatttaatataagaattacatctccatacccaacatgagattaaaaatgtgataaacggtcactaaatttatatatttaaataaaaagtgaaagcctcgaagttcagctcacgtggtctgcattaatgtttccaagactcactactagaagatagacatgttaagaggaactatatcgtctatatatagttatattattattgttattgacacaaatgtattggatcttatataatatattaacttttacacaatattgctaacattcacaagctaccacttttaggaagctgccacctttaggtgatgctatactaatccttttttataccaatgctatataaagttgttacattttttttaattctatctatattgcataataataaaaattatcttaatctttattacatctcatataattaatagctgtcaagagagtaaatgtacttaatgcaatctcttaattaataagagaaatactaaagggtatcagtagtgcctagtgtcgcgggctcacctttttagagagcagaacatccatacgacactttgacttctctaagccaaggccagccttctaaccatctgagtaacaatgggcttatttttcgcgcgaccgtgtgcctcgtgcacactttcgtctcttaaacagctctcgccgagttatgctcgcaaacatccatgcatcgaggctttctagccaagatactcgcactatccataggtttctacgatgataaggtaaattccaacactgtcgctcacctcgtcactcgtgaccaaggtagcatgtggggcaagaagccaacaccaagctaacgtgcaaacgcttctaatcgttccccattcgatactgtccgaacagtcttcctcatcgcccaaagactcaccatgcccccatgcatgttgataggccctcgagacaagccaccaaactagtagcatatatatgttacacctctatctcttctagcatggtgcatctctctcatgcgcgtatgaaaagtggcccatgaatgactacccgtatcatctcgtgttgagactcgtggccaagacccaccacaacatctcttggaggtttaggccacgtcccgtgcaagcggcacaccagcaagcaaatagaaacatacacgctaacctctgacagcattctaaaatgcactaccgggttggcccgataatgtccatgagtattccaactcatggagacatataaatcccctcgtggtcctcatatgcccgccctactagtcccactgaccagtagtatctcacatagcaccatggtgctaggggatggtggagagctggcaactggtacttcccccttaaagagcattataagcttttagtcttctacgagaaacatatataatttttgctctatagacatatcgtcatcaccatatacctaatcacagagtttcttaaattcgattgcaccattatattcgtagacctaaataaattacgaataccaagcctcatcccaatccagacaatattgaagatatttacaaaaattccactgtcgtacaaactaagcttcagcatgccaccaacatgcacatcaacatgcaccaccacttgaccactgcttggccaacttgtgggtatcacctagcttgtaacgtgccatcttggcacgcatattacattctctccaacttcaacatgtcgatacccttattgatggaccgttggcaaatcttcctgataatctcgactcctaagcttactccaagcttcatctaaatcctaagtctgcacctattcctctatctccgtagaaccactctcttggtgatgatctccctcgcccactcttggacttgatcaaagaacccgtgccactgtcactattcagaaccacccatggagtagtgcctccgcacttgaatacttctcccaacatgaaatccttcaagttaatcacaatgtccctccaattaaccaataagcccttgcaacactaatgttgaagctaatacatcctctgatagtacctcactcgccaattgtcccatgcatactccttttaaaaaggactaactatggggcacccctcggggtgaggttcgcaaaaccaactgtacccaacgacaccttgagaacacgcttccactgaagccaagtccatctggacaagatctttcagaaacttcacacgctaatttcatggtgcaccatcctcctgatggcaattgagcaagac

SEQ ID NO: 115462 - DNA, 1135 bp, Cannabis sativa
  modified_base (595)..(611): a, c, t, g, unknown or other
ttattattattattatttatggaaagggtggaagaaattctctaaaaaggattttttaaaaccgtgtaaatttatctactaaattttaaatatactttaaaatttaacgaaattatatccttttaactttatattcctataatgaacttacaataagattactacaaattacatgtaaagtaactaggcaagccactgatctccacggttgttttaaacaaaactagaaattacaattaaaataataaatataaaattaaaatattttatatttgaacaacaaaaattaaatatttaaatataaacacatataggaagatgaaaattaattgtatgatattattgattcccatttatttatttactaaattatggaatatgagaacctatggaagcttaagaaagaagaaaaaaggtacttctccccattttacaaagaatacatttcttcattggcttattttattttgattatttaaaaataaaaagacaaattatatgcataatttgtatataaaataaaaagacaaaatttataaataaaaaataattaaattttttagggagattaccccatatattatttttttaactnnnnnnnnnnnnnnnnnttacggtttgggttgctccggtggcttctatatgagttgctatacgaatttcggttgtgatttaagttgttctgttagtttctgtagtggtttcgaggtcggggttcgggtccgagtcaggggtttggggttcaagattcgaggttcggggtctggggtccaaggactagggtttgggtcccggctagtatagggtctagatcgaggtccgagttagggtctggatttgagtcaggatccagaccagtttggggttagggtttgggtccgagtcgggatccaggccaatctggggtccgaggttcggatctgagtttgggtgcagggttcaggaaaagattcgagtttggggtctggatcgggatttcggtttggggtctgggtccaagttcgagtgttggtccggattccaaagtctaagttgggttgggagtcaaaatgttgataaagaaaaaaatattgttttaaaaaaatttaaaagtaactttttttttgtttttaaaatttttaattctcaattaaaa

SEQ ID NO: 115463 - DNA, 4907 bp, Cannabis sativa
  modified_base (2802)..(2802): a, c, t, g, unknown or other
acaaacatcttacacaaactccttaattaattagttaatagatttggaaatgagccttagtattctcaaagacttgttcagcaataatggctgcattgccatctgcctttttaatatccaagtgagccttttgatagaacccagttcctctcaatgcatctgctatgaaatcatcaaacccaatagcaattgcagcttcagctttggctccataaaccagcctctgttttggtcatcatatatatatatagtgattaacaataataataataataataattaaaagagtttattaattgtattaattaaaattgaaaattaaccttaagtcttgaaaggtggatggcaccaaagcacatggggcaaggctcacatgatgcatagatttcacaatcagatagctcaatcctcttcagtttcttacatgcctaccacaaccataccacaacaaaaaaaaaaataataataataaatcataatcaaaatttcttcaagtcaactttaaaataaatcatataatgattgagaaaagatataataattgtggaatttttcattaaaaagaatcttattgtacctaatggtatgcaaaatcaaattataagcaactaatttgtgaccccacataaaaaaaaaaaaatatatatatatatatttatatataatatgcttctgctccaaaaatttaaacaaggaaagatatattaattaaaaatgtttaaatagtattctataaatttgaagaattattaaaaaaaaatgtcttttacaaaataaaaaaaaaaaatgttagatagacttggtttacatggtaactagtctacataaattgattgtgtgactttttatatggcctggtttggttaatttttttttttacttatagttagaattataagataattataagataagtataaattttaatttatttttatgttcaaataattattataggaagattttttttaatgaaaattactttaaaagtgtgaatatcattaaaaaaaaatctcttttgtaaataattttaaatcatgtacattactttaattttaaaaataagtacttctcgaaaacactattgagaaaagtcataaattctaacttctctccaaaaaacacttttcaatttttatctaagaactcttaaaaaaagacttattttaattctaaaaactaaaaaagagtttataaaaagataatctaaacaaatcgttaaaccaattaaaaaccagttaaaaacaatcattgttcattctctaaacaagaactagcaaccttataagttataagtctacaaaaattgatgatagtagtaaattttaacactatttattacattatagaaaagaaaaatgatgtagaattatggtaggaaaaatgctaaaagacattagtggtgtttaacacttttctatattattattaattcaactaaatatcaggtctcatataatttaatgtaataacttttagataattaatcgcaaagtaacatatttagaagtgctaggcactagtggtgcccaataacaatgctcttgtggtacagtggtagtgtaagactaacctctctaatggcattaacctcagcatgagcagtaggatcagtgcatctcaaaaccatgttatgacaacttacaacaacttcatcattgcatacaataacagctccaaaaggccctccatctccactttcaactcctttataagcctcctctacagccctactcaagaatttctggtctctatcttctaataaaccaccacctaattaataacccaactcaactcaataaccaatcaaacatatgacattaatgtaaataattaatattataattattactaccttcttgttgaatagcaaaggcagaaacagctccacacttggtctccaacactaacatatttcatcacacaagagaaaatagtttaacaacaataacacttaaaaatgaaaaaaagaaaaaacagagaagggttggagttaccattaggtacttctctaaagcccatatccacaaaagcaagaaataatactaggtagagagaattaaggttaatgtttcttttttggtttggtatgaaatgaaaagtgaaagtaatatttatatatatagagaagagagtttgagaatgtgaaaattgtgaaaggagtgcatgtgaggtgtttcttcactacctcttatatttgactacatacacatttttttttaataatttattgtttattcttgtcattgatgaaaggaggctgagtcatgaatttatccaaaaaataaggaaagtgattcatttatatccaaaaccttcatctacacatattcccaaaatgcatataaatatattaaaataattaaaattggatgagcaccacaaataataatactttttaatttggatttatcatacaatgcaccaaaggtccaaaactcgttccaaacccaaaaatgtaaaaaacatgtttttgtcattccagccactaattgggaaggataatgagtgtcggttaaaaattatgaataatttacttttctaatatttaactttaattaacacatatgtttcatgaaatttaaatttattttggattctgtttttttgaaaatttaccaaaaaaataacataattataactaactataacaagcattgtagtaaaataaaattagaaaaaagaaataaaacttaactctgtattttttgagacaaaattgagaaaaataattgaaataagaggttgtaataaaaagttaggaagaaattacactgtatattaattttttattttttattntaatttttacttttattttattattttttaatttatacttaatttaataagttatattcttattatgtgtgttaggaactttaattttaataaattagagtaggattatattttatactttaattataaaaaggagtatttattaattaaaattatttattaaaaagaataattttcaacttatgcctatatgtatatatatcaaaaaaaaaaaaaaaaaaccaagtctatcaaagaaatgatattaatctttgcatatatttgagtaaaagtttagaatttgaggtaaatagaatgtatttatggaggttaattcctttttaaaagtataatttttttgataaaattaggtgtatttataaaattaattgtaattaatgcaccattgttttttgtaaaaaaaaaataatcttagaaaacaccacttaacaaatatgaattagtaaattttacaagagtatcaacgaaaatattacaagcagagttaatgggattttattatgtggattaataattgaaaaaattaaaaaaaagttggttttattttatgtacacaaaacgacatgtagttttgagaaacataaaatcagaatgtgaggagctcaatcaatcaactggccaccaatggcttctcctgttggctctttcttcagatgccatttctcaactgttgaaccctccaataccaataccaataccaataccaataccaataccaatactagtactactccaccccttttacctttgagattacgctttcaaaacccaaataaagataaagattcttcctttatactttcttcctcttcttcttatggctatggtgatgttggtggtggtgtttccattcaaatggccaaaagattaaagcttcaacccaaacctgagttgggtcttctctctcttctctttgtactatcaatggtagtattcccaataaaaactcattatttttcacctttgatccttttcttgactcaactttctcaatctcatgcatgtgcaggcttttggggcaattatatcacttgttgcagtttcaattcccaccttgaatgtaataaactctcaaacttattttatgattatgattttgtgtgatttggttatgaacatattgtttataatgtgtttgtgaaaaatacttggtcaggcatttagaagattggcaacttcaattcaccagctttctaatgtagtctctgaggaggtaccaggaaccttgatttctctcaaactttctggtttacaaatccatcaattgacccaacagcttagaaatctcaggtaaaaattgctttttctttattgggtcattcattttattggtcttttttggtgcttaataagacctattatatattatatattcatattatttttctgggttttgcaaaggcaaaagatttctccctctgagaaaaaaaccagcaagagcagcaagagtagagccacttcttttggaaagaaacagtaaaaagcatcaaaaaaataatcatcacagagttttattactcactcagttaatataggattgagtgtatctcagtatgtacttacagaaatatgatcttatatgtcttaagaatgaaatgtgctccttcatttatttgaattagaagcatataaattaaaaattacacatatcagatttctgactaaatgtatagaagaaaattagcacaaaaaatgtctgatgctaagcctgattcacagctttgaaattttgtttgtttgtatcagtatataattattttgactgttgtactattattcataactttgcatacttcatgagagcatctcctgcttctttagcattctctggtactggcaggttagataaaagggttaccctagatgatgctaccaaagatttcttctccatgtttgaaggatcagttttccatagtttcacttcccacacctgctcaaaaccccaaattaaaggtaattatgatatgaatggtgcttttgaccaattgggggttggggtcacacaacagatagaaaaggggtaagaacaaacctgaactgttttaccaacagagatgggtgtggcttcagccagaacaagttctcccaagtgagcactcttcaag

SEQ ID NO: 115464 - DNA, 960 bp, Cannabis sativa
  modified_base (29)..(32): a, c, t, g, unknown or other
  modified_base (893)..(907): a, c, t, g, unknown or other
atagaaaagattacattgaaatagagttnnnnttagggcacaaagcccaacaacctcaacatgatgagccaagggctggccatgttgaagaacctgtggttgagcagcccatggctagtccagatgaagaggcttcgactgggacaaatagtgcatttgaagtcaaagaggctatgcctactaggaggtgatacaagacttgtactatgttttcaaacaaccctttggattcttatgatgaggcagggcagcctttgaatgctcctggccatctatcaaaggtagggatagaccatgtcttggaggagactcccaagccgtttattattgagcggggggagcagcaaagatggatatcccgtccactgtctttgtcagtcgggaaatttgatgagatcaacagtggaggactcgtgaaaggagtctgttgtgacatgcctacaagagtccaatttgcacactgcttggcattcaactggattttctagtcgaatccccacttggagcgaggagcagtattaccattgcatctgtattttagggacatcgccaactacttcgtgctgtgtcctactcagatcaccccgaaaggcatcaagtacctctcgacactttttgttctttatgttgagctgggctaacctcagccctcaccctacgaggttgggtacttctttgagttaaaatctgtactaaagcaaggccaatcaaaatacttctgtttcagcctattaggctaccagtgtttatgcaacacaaatagtaaggctttgtcaaaggttggaaggtacttttaaaattacttccttccctgggacatctagtatgttagtcaatgctttcagagggtccccacatacacttgatcgatcctgttggaaatattttaccannnnnnnnnnnnnnnaccaagtatgttttattaacatcctaatatgtattctaaaacaatgaaataaa

SEQ ID NO: 115465 - DNA, 705 bp, Cannabis sativa
actaaaaataagatttttttttgtaatttattgtgcggttaagcacaattatattgcctaattaataataaccaccactctagaaaggacactcaaattaatgatcaggttttgttcctacaattttgaggtaaatagcaattacaattgttaatagtttatgatctccaaatattgataaaaataattaaataaagaaataacctcttttaaaattgcatgtctggctttggtacactttccacgtcttaatttctatttttttttttttaaaatgtcttaatttcaaatttcactgctaaaaaactgaagatttagcattagaagaaaattgactaggaaaaaaaaacattaattagtagccctatgatgccaaattcaacgacccaattgacatcctctattgacataatgtaagtcaattgacaccgacgaaaagactctaaacatttaatgttagtgtcctataatttccatcgttttttttttaaatattcttgacgtatagtaacgcactaaatgtgactagataaacatgtagtcacacgtttagcgcgtcaccatatcataaacataaatttaattaaaataataataaacatatatatactacaaaaataacttaatatatatatatttaaaatgatatatatttttgaaaaagatgatatatatatatagggataggatttggtcccgttatgc

SEQ ID NO: 115466 - DNA, 1210 bp, Cannabis sativa
ttaaaacttacagctttttgatcttgtatataacggttgggatttacacgtgtgacgatgccagtcatgtatttcaaaacataagaactacattcttggtgtttaagttatcttggacaatttgctagtgaaatttttggtcacggcccaagatacgcatttgatgcccctataatctggtatgctctgttttaaaaattataataacatttcaattcattagttaattaaaaaatttgttatataaaaattattacctttctaatttgcagtaatttgcggggaactttatggctacgtatagggtctaaatagataattttttcatatatgtctcatcgtacctattataataaaaggctgctgaatggccataacacccacaacttggcatgttggtttagcatttcctccactacgaccaccacgaccacgttctcgatttttagaatttccaacacctctattgtagtttacatttctacgattttcattcccagattgatgtgagtttgagctccttctaccaaagaaaccaaaggatctcattaactgccaaacttgtagatggtgatgagagaatattggaaatgtccatagacttatttgtccctgagattgcccttaatctctccattttagtgttaaaactcaacaagatatcttgtagttcctgccaagaggtgaactgtctagcttcgaccataagaactataggtagatactcaatatctaaaccagataaaacattggaaacaagtaatttttcagtgtgttgccaacctgaggaagaggaacattagctcccagagcttgagcgataacattgcttgaagatgcttgagtgttatgagctgctctagatctgccattggagacacacatccaaagattgctctgataccaagttaaaaaataaacaggaagggaaattttgaaagctcaactcaaatgtaataaggttggcaatattgtatttgcagtgtcaagtgcaaaatatagtacattctagaatctattacaattacaatgatttcttaaaaaagaattaaaaaaaatatcctaactaattctatcatggtataaataatttgttaagggatcgtttggtatgccgtataaaggtcatattgtattaaataataaataacactatgtttggattaagcaatgtattgtattaattattacgaccaaattttttaataca

SEQ ID NO: 115467 - DNA, 3660 bp, Cannabis sativa
ccgggttgattgaagccggatcaagactcgtcgctactagcagcgtcaccatctccctatctctctttagttcactgtcgagtggaatttagtagaagaaaaagttggccaacgtacaaagagaaaagaagagaagagagtggagtcttattacatttttcggtttactgggtgcgcccggaaactgtggtttcctgggtgcgcccgccaagtgccaactgccgtttttgtgctgccaggatggactccgccgaaatggatacgacgcgtcggttttgtaagttacaagtacacccatgtgccgaatatatttacacccccaggagatcttctaaaaacttttttttttttgttgaagaaggattaaaaccaacagacttcgtggttgttacaaaagatattgtttggtatagaagatagctcaaccataccaattacttcattagtaaaagcccacttaaccacattataggcaacaaaattacataataagaaataaaagaaaaattacaacataacaaattagtagggaggttattacaatgccgcacatagttgtcaatcccccagctggaacaaaatgcccttcagagtattgataactgccttaaaatcgctctctacaagaacaaaaggatgatgcaaaaagacggtcatctccacggctaatagacaactcccagcttcaccaatgagaggattagagaaattgagtttgtttgtagccacccacaaaacagcttcgttgtggtccctagctaaagccacagtgcacatggtgtcgcctccaactttaagatcacagttgatcttgacccaatcgagtggcggtagggaccaaacaggggtcaaaacagcctctgaagaagaaaatagacaggactcataatctacgtaacaaaatgatatagagtcaatacaatgcttaatgtcactcagaaaattattatgaacgcgcccgacaaatcatatcaatcacaatcggagcgtagaagaatagcttatcaccatctacccctttatgatgtaggttccacaaaagttaacccattcccaaacatgagcacctgattccaaaattggcatgaccccccaaggggaagaccgccacagatgaaaagaaaaattacaatagaaaaaaaagatgttccatcgtctcctccccctccccacagagagggcaagagatctcctcaatatgcattcttttagcgagatctgcttggataggcaacacatttgaaaggatgctccaccaaagaactttgtattgctctagcactttagaattccaaagcttattccaaagtactggtgccacattgcaaaaaggagcccgttcaagggcttggacaaggtagacagatttagtagaaaacaaaccaattgactcctttgtctagacccatttatcttttctctggccacaaagcttgccacctttgatgatgttattgataatttcctggtcaaaaaggctatgaagcttagaaatgtcccggtctccattggataagagtaggtccgccactttcctcaaaccctcctagaaatgagaattgggtttagggtagaaatccctaccatgaataatccacgggtcatcccaaatctttgtctcttttatgtttgaaatcagtttgcaagccccttttttaattatatcttttgatcacacaacattcttccaaaatcacaaatttgagttttaaaatcacaatccaagaactggcaacctctaagatacttggccctcaacacccgacatcacagagattgctcctcattaaggagatcccagccccatttggccaataatgcctgattcatctccaaagacttatgaaatccaaggccgccctgagattttggaagacacaggtcatcccaagccttcaaacggatagcatgattcccttgttcacatccccaccaaaaatctcttaccatgctatcaatcttagatgcgagtttttttgacagctttgttgtctacatcgtgtacaccggcagagcaagccccatcgatttaatcaaagtagctcgcccccgctttggacaacttttttaatttccatccatggagtttagagaccaggttgtccaagatgaagttgaagtctgcatctttctggggagacctaaacaatagaagccccaaataattgatgttacccatggcattattgagtcccaactcccgcatgataccacttttcatacccgagctggagttcttgctgaaaaatatcgatgttttcaataattctttggcctaaccaatcacaaaatttctctaaacactattagaattcctttgcttctgttatcgttgtcctaccaaccaatatcaagtcaactgcaaagagatttaaactttgtagaaatgagtgacaaaaatcattcctatgtaataatatgagtggcgtctaatattttatagaaaaattgttgcaaatgaccttaaattataccactatataagtaaatatttttattttaaaatttatagagaaatgattttttttacaatatttattatttatattgtcttttgctacataaaaaaattaatatttttttttattttttttttaaaaaattagaagtaaattactaaaagattatgctatatctatattaattttgctaaaatcttttttattttaaagttataatgatttttttactttgctataggttgttgtgggttgttggtatataaattttgttgtaaataaatctttatgaagtcttgtcttgagttctttgagtcttggaattcacttcgggtcacttcgagaattttagtaatattaccatttgcctttggaattaatattgccttaggaaaatatttattgtatctctaattgtgttacaaaaattaacaaatcatcaataataaataataattaaatatttgttaatcatcaaaataaagagacttaaaaaattgagtcaacatatatgtacattcctcattgaatgtattttatacacttcccattgaatgtatttatacattcctcattcaatatatttgtacatttctcattgaaagtatatatgcattcctcattaaatgtataattataaattaaggttacaatacaattctcatcaattgtgtcaaatttaactaaggctatagattttcatctttaaacataaaccaattaaatttttggagatagtaaaaatctcaacatcaattatattacattaaattaaggttactaaaatttcctcattaaataaagtaatttaattaatttattcaacaaagcaatgataacaatatcatttgatataatcctaatttacattcgatcaattttacaattgtcaaatctcacatgatgatcaatattcataaacagatcaaatatataacaattattctttaatctcacaaatgtactcaataaactatcaataagctctatcttaactcaaacacatccttgaaattttcacaattaaattcaaggattttagtgaggtgtgtagtttcattgagaagttattatttaatgaaatctttaaactcattctcgcattcatactcgtgattaaactcagttgtgcatcatcatatttgcatcaaattcctaatacttgatcactactactactacaacaacaaaaaaaaaaaaa

SEQ ID NO: 115468 - DNA, 1253 bp, Cannabis sativa
ttatcctggggacgccgtggttgctagactgtcgtgcacacttcgggcagagccgcgaaacgtcttaaagaaagcgacattgtccgcgactcagacataattttctatcggtaattcgtcccagtttcattgtttttaattttggtataacagtgcagctccaatttttttttttttgaacaatgcagaagtagcttcaaaaagtactttaatttcgttggttgctcagtataaggtttgatatttggccttatcattttaggtgctggtttggtttgattgtaaattggatgtcttagactagtgtgaggtcagatactcagtttggttctttatctttggtttatttccttgtagcattttatttgttcagaacttgacaacaccatttcgagaaccaagtttggttagatggtaggttggttgttctcagttataaattagattttttttttcttttatcaatctattaggttttgatgtgtgtagagaattacaacagctatttgtgaacttgtttttgcatgtttatctactctcttatcttacatttatctctcatttttgtattgtttgtttccttttgtgtaagttccatgtttatggtatgtttttcatgtcttggtgatttttgggcaatctagaatatattttaaaggtaaagaggttgttggtgttatctaatatgatttacgcatctagtattccagctttcgagtttactgactgttcttctgatcagactgcttatttggactaggaacaacattatgaatttgtctaacaaagtttggtaagatcgatggttagttattctcagtatgaggttagaaatttgattttgatcaatatctttgctttgtttcccatcacttttgatgtgtgcgaaggtttacaactactgattgtgtactgctatttttttgatgtaagttcggatattacaatatcttcaactgttgatttacacttgggaagttgcatgtttatatgtatgcgtttagtatattctatctttatctaaatgagttttagttcatgttttagatgatatcctagctttggttcgaattcactggtttttcagggtgcaataatcctagcatgggtgataatttattgttgacataagtaatttatgcattctctctttttagttgcttaaaaatatttaaaaaatattttattaatatttttttttgaataaaaatcataagatctattaattgataaattcgttcaaaacaatagaa

SEQ ID NO: 115469 - DNA, 3566 bp, Cannabis sativa
  modified_base (3538)..(3539): a, c, t, g, unknown or other
gttgttttcgtgttattttttggagaaccgtaaaaatgtaaaaaaaatattctttgaacgtaaaaatgtaaatattttacaaaaaagaatgttgccttatgtaattattccaaaaaaaaattgtaaggcccatgttattttcctaaggtattgatgggcatatggccgaagagtttagttggtcacctgaaggcccaattactggtaaagtaagcccaaatgaaaccccactttctatttgatatttctgcaagagagaatgcacccaaattaaattaaattttatcctaaagaaaattgtattttatcttttctcatcactgaccccggttcggtggagactaaagatgacgtcattagcatcttctgttgctgttggtggtacatgcagccccaaaaggcttagacattgttcaggaccaagtagaagactgcccacatcacaatctgtaacaaaactcaaaatctcaagccactgccatgaagactcttctctgcgacttctagtagatgagaaaccaaagccaagtttgtttgctagaagagaaatacttggttttgggttatgctcaggccttttgagtgcacttactgaacttcatccttctgcaaacgctgctgaagtaagttcctgtgatttcactgttgctccctctggccttgctttctgtgacaaagttgtgggctatgggcccgaggcttcaaaagggcaactcattaaggtaaaattaaaattcttatcttcccatttcgaaaccattgaacaggagagaggcaaataaattggtttattcatctgcatcgagcataattgaccaaattatgttagtttgtaatctagtctctttctggggatgtgttagaattattataatttttatgcttttcttcacaggcacactatgttggaaaattggagaatgggaaggtatttgacagcagctataaccgtgggaagccccttacttttcgtatcggtgttggtgaggtatgtatttaaatgagagttttcatgtgagtttgaatgctgagtaaagagatgaagatacacttttttagttggaactccaaacttaatttgaagattcagaaatgataagagtattttgcaagacaggggttgaataattgaattctggttgatgaccattctttgcttgtttataaaactcaaatgcttctcactgttctcagctaattgcctactaaatacgaatataagtataatttagtgcctttgtatttgattacttacacaagtatcaaacagtataagaatttttttttttttaaaaaaaaacaaagataataattggcttcagagggacaatacctcctccttgtcaaggctactgttcatagtgacagttagaatagaagttaagttagtgtgttggttgtcgttgttagaaccgcttctgtagttagttagtttgtaaaactaacagttttctgttagctttggaagcttgcttagcttctctttctttgtataaataccacttcatgtatcagttgaagaccctaatgacaagaagtgtttcataattatcattttaatataggtcatcaaaggctgggaccaaggtattctaggtggagatggagttcctcccatgcttgctggtatgacaacgactcatgaattgctgttccttttgtaccaccatttatatgaattaatgttaatctgtttggccaactttgattgtaggaggcaaaagggtcttaaagcttcctccagaacttgggtatggcgtgaggggtgccggttgtagaggaggtacttcaatttatcttcataaaaactgaaaatcaatatttggtattggtttcttttaatttcattaattttacttcttcttaggtaaggctatttatttttgcaacattgtatatgacaggttcatgtattattcctccagactcagttctcatgtttgatgtagagttcatcggcaaggcatcatgagtagacctagagagtcagcaaacaaatacttaaatcaactttttttttttggccttctttaaattgtgagaggcctcactcttttatggtataattttctattggtgatacaaaattaattatactaacatgaacttccctgatcatctcatctgaattgtataagggttgatgaagagttgcggataaagtgttttcttttcttttatttaattttttaaatttctttttttcattttaatggccatattttattttcgattttgattcattttcaattattcagaagtttgagtaaggattcttggaattaaaatgcataactcacgtgatttcaaaaatcacccaccaactttttactaaaaaaagaaacttttgttttacaaaaacgatattggcggctaaactacctgaattttacggtttgtaacacttaaccaccaaaattgaaattttgacggcataactatctaaatcctagtttcgttttgctctgtacacttccgtccaaaaatcactgttaagtgccacggtggactgtccacatgtacacccttgtacacgtggcaaatttttagtggtccacataatattagttttaaaaaaataattataaatatttaaaaaaaataaaaaattagatttttttaaataatttatatattaaaaaaatagtttaaaataattaaataaaaaggaaaaaaaataattaaaaaataatttaaaaaataattaatattttcttcttcttcttcttccttttttttccataaataaaataaccaccattatcaccttcacgagcaaaactgaaccccaatccgaaaatcgaaccacaatactcctagttgtaggagtagcaacggttccccgacgagttcgagtccttggctgcaaggtttcaggtaatggcaatactggttttcgggttcttgtagaagttcggcaagaagttttgggatctggtgacaaaagaaccgaatcttcatcaacctgagcatcatcagatctgggttgactcaaaaactactctaacccttcaacctaaaaaaatattcattttcaacaaattagaataaagggggaaaatccaaaaccctaaaaagaaagaaacttgattggagaaattgaggtaaattaccagtggaaaaagagcttagagagcatcagccatggcaatgttggttcgattagcggggattttgttcttcttgtacagagcttgaagctctctcctgttgacggtgtcgacgtttgcagaggagagatggagaagagttcggacggttggggttggacagtcggggatggacggcttgggctggacggttggggtttgatttttgggggtttgatttctggaaaaaaaacgaagaagaagagaaagaagaagaaagatgaagaagaaaaggaaagaaaaaaaaaggaagaagaagaagaaaaaaaatattaattatttttttaattattgtttttatttgtttttaaatattttaaagtattttcttaatatataaattattaaaaaaaattgattttttaattatttttaaatatttataattnntttttaaaactaatattacgtggacca

SEQ ID NO: 115470 - DNA, 2014 bp, Cannabis sativa
ccatcattcctcgggaaccttaactgttaattcggcctatcaccttgcctcttctcgagatccccaaacaacttcctctccttcttcctcaaactcagattattttaaaagattgtggaaaagtgtttggaatcttcacatccctcctaaaataaagcactccattcggaaggcttttaaacatgttcttcccactgcttaaaacttgtttaataggaaaattcttgataatctaaactgctctatttgctctaataatgttgatacagttactcatgtcctcctagggtgctccagagcagtccacatttggggtaaaactagatttttttaattttataatgatcataaacttgatgacataaaagattttctattagcaggttttgataatttgaccaaggaagatctttgtttatgttttagcatactttgggccatttggaatgggagaaatcattcattgttttatactaatacaactcccattacagatgtgaaaaattagttacttgattactcacagggatattcaagagctcaagaagatgtatgtcctttgtactgatgcaacacttagtagagaggattgtaattaagattgattataggggtgaggttgttgctggtttctgttcttcaatgcctggtgtttttcctccaattctggttgaagctcaagccctctttgcagctcttcaatggtgtgaacatgtgaaattttttttggattcagttagatccgactgtttagttttagtgaataaaatcaagcacaagtggaaggacaaatctcctctatcagacttagttagtagagtgttatcatcttattatcttttcttagtgccaaaatttatcatattcctagagaaagcaattccattgcacatgcactagcaaaaaacgcattaggaacggataaagattgaatttgggattgcaatagtttcaatgtttgtatcttttgatcttgtaacttaacttttgagtgattcttaatgttacatatgaatccttcaaaaagaaaaaaaaaagttacacaactcacacatgcataagtaaattattgtatgatatttcgactatttaattttgacgatattcactaatatatatatatatatgtatatttttaaacatattcaccaacatatattttaatattatatatattgtatattatatgcaagtgatgtattaataataatattaaccaactaatgccaacccagaacattattgtcatattatttattgaagtatatataattaatttagtttagaaacaatccaataataattccttacgtatagaagaaatcagatcatatattggaagttgtagtacgtggtggaaatctgaacaatagtataagaatactagttagtcagtttagataattatatacgaaagcaagaatgccaaaatctaatttaaagaaaaaatggattaattggcatgtgagtgaaacaattaaagttttgtaaattgcaataataccctagaaaaagtatataattgcaattagaaaataaaaaataagagcaaatggggggaaatgagcgtgcacacttttgggtttaaatgagaggaaatcgagaagagatcgtgaggagatatgctggttggttacaactagggaccagttcggttgcatatatattatacacacataggtggctcatctttttccttagctacctaaatatggggctcaaaaacttccatatcctacaatctatttatttttattatatcacaaccaacatttaatttttttattttattatatgtataaattttggtacaacctgattggcagtaccaaaacataccctctttactaatttctctctatctcttatttatatatatatatatatgtgtacacatgtctagctatcttatacatttgtgatttgctatttttgttttatttatatctttatatattaaaagtgtctatctaacggtatttcttggtttaacattcttggtttaacagaatat

SEQ ID NO: 115471 - DNA, 4167 bp, Cannabis sativa
ttttagcctgcacgagttaagatatggtcaaggtcagtttaaaaagaaacagccaatcacaaggactaatggttgtaggccacttgtcaaataaggaaacagctatagaaagtaaaccaaactttatatacacagttatataatgtacatttgcatatataaccgcaaaaacaaaagggaactcggcaccagcatgcctagctacaagcactgaaaaaagcaccaacaaacaaaacttactacacgctgccccaaaaactaatatccatttaaagagtttaccagtacaacaacacgtatgaatcgtgagatcatacaggaaagaaacaagatagtaccatgaaatccaaacatggtaaatacctcatcaagtctcttagaagagaaaacattataatgctcaaatgcctcgtcatcctggggaagtagatgcgcatatctgcaacaacataataatgtttcatgaaacagtcgccagcaaaatctggagctagtccaaaatctcatgacagcaaattacaaacatactttatcagtactaaaaacatatgtatcaataggatcatcaaggagaggaaaaatcatcacattttccactagacttgcataaaaaaatggaaagggtagcagctgacaatctttacaagacataattcattttgggtaataaagcacagcaacatctatcaattaagaacaggaaatacattgtttgagaaaaaaaaaagaacatgaaatacaaaatagaatgaaatgaaaaagaagtctattagaacttccaaaggcaattttgcaaaatagtctcccaacataaacccttacaacaggcaagataacctgccaatgacattcttacggctgtgattcttatatttggtcccacacatggttttgaaaagcttttgcggcttacgcctcaaggtgaggcactcaaactgaagctaagcctcagcaggtttagttaaggcttacgcctctgagtcgtgagaggcctaagacgaacattgttgaggtcttttaggctttttgtttgcataataagcatatttaggtttcattttatattgtatttaacacttttgcagcttccattaagtgttgtactacaattcatctcaagtgatataatgatttcgactttctccaacttccatttatagaaagtctttcaagtgatataatgatcatgaaatgagcacttataaatcttttaatgttaaaatctacctccatgttttagactttatgttctactctcgattttgaacttttgatgaatttagtttgtggtgttatagcttagaaatagtaatttcatgaattttatgatcttcattatgcaattatcaatcatgtttttttaatacgaattcaattttatgaactgatttaaattcttattcaaaatttaacattaaccaaataagtgaaagcatatcaatcaattgaaattttcaaagtaaattacatttgaaatcaagtctatacaatataaatatgatgtactttctaaaaaatgagtcgataaactatcatagacgccaaatctcccacttcatcgtaaatcaaccaatcataaaaaaaaataactaggatagaaaagcccatttgttttggagctaaaaggagaaaaaaaaaataactcacatgctgtccagatcaataaaatcttccttcaccagcgaggctgtaagcttatagagtccaaatggaacaggaccgtttacttccatacgctgataatattggaacttaaaaccgagaatttgtgcagcatgagactgaaaaacacaatcaagcccataactaaacataataactaattcactcaatgagtgtcaaacaggcattcataatatatacatacgaagatcgcttaccttgggaaataacggaattagatccaaaaagtcactattatcgggctgaagttcaaaacactctaatacctaagtcaaaataaaaatttatcaaaagaggtattacaatggatcatcaaccacttctagaaacagaaaaaagtaattgaaaccgtgagaactcaacaacttacaatgtcaaaaacacgatttggatccaggtcaaaatgaccaattaacgactgcaggaataattgtaaatacggtaatcagatccgaacataaagaaatgagaagtaaactaaataaagttcaaccaaaaagtaaaaccttaattatgccaatagttgctcctgatacactacatgatgaagattctgtgtttccacagagaagggtaacctatattaagaaaatgaaacccaagtcaatataagaagactcaaattacattaaaattaattaaaaaaaatagcatttacaactgtctaacatcattggactgcaaggttacactgtacaaacttccaaactaagagcttttgttatgagcttaccagcttggcatagccttcactctcttctcgaagaagattaaatttagtttgttgataaagaagacgagtgtttactctaacctgaaagtaagcaatacagatacatcaaaggcatatcgcatatgaaaaaaaagttctagcaaatgagatcataaattgaaactaatctcatttgagtaattatatggatattctattattgtggagaatcaagcagttatacaagtccaacatttggttaaaacaaaatgcctttttatttaatctttctacaagatacatttacaaggattaaaaccccactgcactcactgacacacacacaaactgattcaaataaattccctatggtgatcaagggttcaattagattaaggtaaatgaattaaatgtactggagattgatcacatcattggaacaatataacactggtaccacaaggtacacacaatctgaatttactttacatgaaaataaataatagattttcttgttttcccctctggtagttgatacagaatataaataaaatatgtgtgcatacatacataaatatataataaaaacaaaccaatcttattgaaagtactttgggttgcttgttatgtaaggttgccaaaatatttgactaacatttgcctacctctttacttttcagctcttgagccttaatcttaatcatttcagcctcccaaagaaactcttcctacattagcaaatcattatatttattagtaaaagaaactctcaaaaagtgctacaaaagcaacaatcaaaaatccatcaccaatgaaaaatttaaatgacaattaaaagtcacctcacagcgctcatggagaagcctcaatggaactaacccagagtcaaccagccattttgcctgaaaagaagggacacataaaacacacaaacatagtaaaagaaaacagcatagaagaaaataaaatccagggtcaagcaagaaagcatcacctagtctattttaataatcggacaagtttaataaaaatgatcagaagaaaaatatatcagcagaggatgactaacataaactgaaaaaataaacaaataacaaatggaaatggtgacttgttgaagactatcatccatactttcaagcatagttaagtgattgatggactgaaacttcccaccaccaccacacaaaggaaaaaggataataacattattattaaataatagagtacgagtacatggaacattagtagtattaattaactcaatactaaccagctttgttagacgagcacgatattctccaggcattgtaagctgcaaaagtacaaatttatactttaaattaagatgtgcaagtaaaaaatagttagaaaggcaatttcaaattcaaataaatgacattacacacacatgtccaatatatcagcaaaaattcacacaaacaggtatttcaaaaaacataaatactttcttacttcttgtaataccaactaagtttcagttttaacttttatgaggattaaaacatgataattttatcacttccagcacaatgctgccaaggtaggcaaatttggaaaaataaaaatcaatggcaatcaaagttatcatagtgggagctctctgaagccacttcttctaagcgaccattttgttttatttttaatttctagtttttcaacacgatcctagttgcttccctagaaaccaagaatacgtcttacttccacttaaagtatacatgtaaaacaatccatatatatatatatat

SEQ ID NO: 115472 - DNA, 1255 bp, Cannabis sativa
  modified_base (1213)..(1230): a, c, t, g, unknown or other
aagcctaataattttttttatttttttattttgggcccccaaaaagtgtgggccctaggcacgggtctagcccgcctatgcctagggccagccctggttcgcatgccaatgaagaaaggaaaatttgtacgaactgttcatacttgcaatcttttagtatgaattctctactagcctcgtaatcgacataatttttccttctttctagcaaccatcgctcttcaagagttttggtatagatttcatgccctataacaatttgttagttcagtaacagtttaatgacacaatttaaacacaaacaataataaaactactataaacaaccatacatgtactgttgtttttaaaaatcgtcctatatttctctaaaattctccattgtagtcgatgtcatgaatttatgtacaaaacttaattattaaccccgaacaacacgagaacaatgttaatcttaaaaatatttgagtagaagaattgtgtttagttaaaatccagtataaaagttattatttaaaagtggacagtataaatgtaatactcaattcttccacttctgttttttattcttttggtcaatttatgagtagtgtttaattagtgcaaaccttagtccttgacgaatcattttgtggtccatgataagatttttattaaaatgtcatgtaacacacgaatataccatatttgtacatatattttctagacagtaatccactctatccactatggaatgaggtttttgggtttaataatgcaattaatggagatcaatcgcattaatttgacaattataatttagatttgcttttagatattgtgcttaagtagtgctacctcaactttattgtgatgatgaaacacagacacacatatatatatatatgtacacacatatatagtatatgtattgctcaagcagtgtactctactattggactatgtatataacatgtacttaattacttataacctacgtttagtggctaccgaccttaattaattgcatggtaaaccacccaacacaaatattaatttctatttttttcttgtcagtttttatctcacaattattttctctcttcacactcattcgcattgctttattatactttttccatacattatttttttctcctcatattgtcttctagccatctcatcacaacaaaaaaaaatatatattgttatgaaataatataaaataatatannnnnnnnnnnnnnnnnnaagaagaagatgaagagagaaagag

SEQ ID NO: 115473 - DNA, 2102 bp, Cannabis sativa
tttttttttttttttttttgcgactattgtccaaaaaaagcatttttataaccgttacgaatatcccttttggtagtagtgttctactacaaaaaattgctacctttagtaataactttttagttataacataatatttttgtgaataaatatgacttttagccacaacaaaatgttataacttgtgactaaaacatagtctttagatacaagttgtcactaatttgattttactcataacgtacaagtattgtgactaaaagtacatttagtcacaacaaattgtaatttttgtgactatagtttttgccacggacaatttataagtcacaacataagaataataatttataattagtcacaacttttgttgtgactaaatgtaaaatttttctattaattaaaacttgttattacacgtctcaaaaaaaaaaaaaaacttgtcgctataagtaaaaaatgtaattatcattattacataaaaaaaaaatataatacttgaatagttattatatctgtaagtgagaattttttaatattgtactcagataaaaaaaaaaaaaattaatacatatatgacaaaaaatgtgttaatttttttgactccttgtgccaaaatatggtttcgttacaatgaaataaacatgaaatatttaaaggcttataaaacacagacaagaatatttcactctatgaatggatatgccactggtaattaaggccctttattgtcaataacataagctacaaggatatctttctcattcttgtaaaactgcttttattatccccttctcagctggaaatatatgaacaaaatctccatattcttgaaatgagtaaaggtccaaaagcattcggacccaacccccgcactaaagagagaagtctttccatagatataattcctaatataagcatataccattgcttctaaggtttattccattatacatctatcaactgaggcttgaattttattctatataaggattcataatgtgttgcactaaacacacactgagatatatcatagttggagatgaagacaactggtggtgtaatctttaagcaaaccagttatagggcttatctcttttggcacgtattttaggatatatatgattgatctagcaatagcaatgcatgtacatgtatgtacaagcttgtaattatcctgtacttgccaaaggagatttgtcctacgacagctttagcttaattagcatgttactcaaaaatttatggtaagtaataagtgattatgtctctaattatggtttccagcaagtcactatttatcaaaaactgtcttaagattctaatgttctagttactagtgacgtactcgtgtgttttattcatgcatgtcaaatgctcaatttggatactttcgaaaaaagaatgtgaatgaaagttcgatattcatgcaaattaaatctataaagttttagatatcagaaaaatgaatatgttatatacacctgttacattagttttttagaacaaaatataatgcatgttaaatataactcactttgtaaaaaatccacttcaactaatattgtactaaattgtattgtaaatttgtcacataataaaaagtaatctaaattgaatcataatataacataatgtaaaatttgtatcacaataaatattatattttagtatatatcattatgttattttttaatattttatttttaaattttagttgacatactcatttgtattaaataaaatgcataattattatttgattattaaatttgatatttatccttacattatcatcatcattattttatattttcaataaaagtaatgaggccttaattttattataggagttagtagaaatgtaaggatttattttagggattatttctcaaatatataaaaataacaaaaaaattataaaaatacgatttcacggaattgtaaatattttaataatttttataattttatttacataaaatagagtccttttacgttgtattcttgttaatttgttgttgattttttattatttgtatgttcttttttgttgttgttttgatgttatttagatcttattttcatgttacttttatgta

SEQ ID NO: 115474 - DNA, 3977 bp, Cannabis sativa
aaacccaacaaaactttgcacgtccttatgcttcctggggaaaggcatgtcgataaatgctataatcttcttcaagtttgcctcaattcctcaggagctaactataaagcctaagaacttcccagaggagactctaaacatgcactttttgggattaagttttatcttatatttctagaggaccgaaaaggcctcctcgagatctgtgttgtgctctccaaaagttttacactttaccagcatatcatccacatatattttcatattcctccccagttggtttttaaacatcttattaaccagtcactaatgcatggctccgaccttcttcaacccaaacgacatcactttgtaacaatatacccttttatccatatggaagctggtgtgttcttgatctgcaacatgcattttaatttggtcgtagtcagagtatgcgtccatgaaactcaacaactcatattcagaaatggcatccaccatctagtctattcacgaaaacgggaagcaattcttgggacaagctttattaaggtttgtaaaatcaatgcacattctccacgtgccattaggtttagggaccaaaactgggtttgccaaccatactggatataatgattctcagagaaagtcattcgtagttagcttatctaccttcgcttttgctgcccgtgcccttaccggttctaagggcctttgtttttggcaaactagtgttgcatcttccttaatgttcaagacatggcagattgtgttggggttaatacccatcatgtcgaaatggttccatgccaagacatcctgattttccttgactacatccacaatcttcttcttcaccattgtgcaagtttttccccactttgatggtcttagtgggatttgaatcgcaaatttgggcttattcaacatcgtctagtggctcaattattatttctatccccactatggggactaactcatcttcaaaatcctcttggatggcttcaacttccacttgagtatccattatgagaacaatattagcttcctcctggacaatgaacacagtctgggcaaaaacattgtagcaactccttacacttttctaatctcccctgaatactccaatgcacccattgtaatagggaaacttcatgcacaagtgtcttatagaggttactgccctaaagtccattaggatcagccaccctagtatggtgttataagttgtgggagaatccactactacaaaggtgcaatgtttgaaggaaaaaacgttgttgtctcccttgagcatgattgggcgctggatttttcccattggcatcagagaatctccattaaagccttataattgaattgggcaaggtgataagtcagccttcgtgagcccaatcacttggaatgcaaatttaaacaagatgttcattgagctcccattgttcaccaagactctagaaacccttttgttggcgatacaggcctcaatgactaaggggtcattgtggggaaaatgtacatgcatggcatcgtcctccatgaaagtaatgggaaagttcgtggttcgaggatgttgggctggagactgtaccacttcacatgtttccccttctctgtctaattaccctaattaccttttttgggaatttctggtgcttcctgcaatgtgcggtcctcctgagatcatggccacatgtctgcttactagtggaagagctagacctggagggtatggattccttggtcccaaatttagtattgccactgtaacctaagctggtagagcaggtagggccgaaagttgtgatccaagagcgtgagtgtgacctactccttactgagagtttatggtaccctactatcccgaaatgatcaacgatatatgaacaactccctatacgagtcagataatgggatgcaggaacattgacccaagtgttcggctcttgccaacatctcgatttcatcctttaagtagccacattcatttgttctatgtcccacgtctccatgataatcacacctcttgcttggatctcttttaaacttttccccttaaggcattcttaggggcttcctatagcaaaccatattgcaggttgtcgtgtacacgttttccctaatatccattaggttggtatactatgtgtactttggctcataatccttccccgacttctgaaaaatttcaatttgaccctggttcttttcacttctcttactctcgcaatgacttacattttattctggaacttctgtttgaggcttcgattgtctgggataaattctacatccaatcgatgctactccatacctaaaaaatgggtgtgggtgtctgcacagatgcagaaggtccataaaaagtggggtatattgagaatcgagaataggggcttgtggagcaaacccttgagttgatatgaaaggggttggtacaggagggacttcaaaagcctgctggtaagcatcttccaaattaataaaactttatgtcctttccatgaactcagacaacgtctcaacccttcttctttgcatccctcccatagcagggagccaactgcgatttcagattgtaaggccacaagcttcatgtcatcagtcacttttattttagttgatgcctccatcatccattgaatgaaattctttaggctttctctggcctgttatttaatgttggtgatagatcccattttcgtgtcatagtcgcggacatctataaattgcttccaaaaggcagactgtaattccttctagctatgaattgatccgggagctaaccttttccatcagttcttagtggacttagtgagggtcagggagaagcataagcacttgacatcttcacctactcttgccacctgcatcattttgttctacatggccaggtgggtcttcggatctctgcactaatcataaaactctatcttgagaatcttcaagttctttgggagcagagcttctgtgatcctcctgagacatggcttcggatcctcatcctcatagtcagtgagggcccaacttttctttcgtaccaacttcgttagagcagcaatttgctcctctagccttttagtgtcattgtctgggagatcttgtccgagagatctcatctgcgaaccttgtcattcagataatttctgtggtcattcccttgtggcctcaccttttcacttttttctttttcatacttggcatcaagatgccttcaaagatctactgtggatcaactgtcatcaggatattattccctagtcccatcatcctagtttacaaaattaatggggcggtttttccttcccctgggcctgggtacttttgtaccggtccctttttgcgcagtatgacctttagagcagaagggagtgtctaagcccaaaggcattggtagccttatgtgcatgagcaagtctactggctggatttgcatttttttgaggaggtacgggagcttaagggttttgagggtcacctacttttgcttttcccttgtcctgtataggagcaaagttttcagcattagcagggttttccttattatttcctccgacacattccactaaggggtcatcatttgaatctcccttgtccaaatttccaagcttagcttggaggggagtcatcattatctccattctctaagaaaattttgcttgatgggctaacttctgtctagtctcgagcaactctctggacacccgaaccatttcggggtcatgctcgtagtggtagccatctttgtaatatctatctttgacatattctccatcattgtcttcctcctcatttttcagtatctctctcttcgtcgatgttgttgtgctggttgttcaggtcatcctctcggctgtcaaggttggacgtatccccacctctcgcattgttcgactgggtgtgctctagtgagagaaggtttatatcctccatgacagtgtcaatgtaacaccctaactaacataggcgtattacatgatttttaaacatgctgtgca

SEQ ID NO: 115475 - DNA, 2863 bp, Cannabis sativa
attggtcggtcggttttcgaattgcaccaatccagaccgaaaactgaattttgaattttttatatagaaaaaaaccgaccgatgctcaaccttatccccaagttcaaaattcttgtaattctatcagtcatctttttaaaagacttgttaattactctctaagatgtcacgtgttaatattaaaagaaaataatttttttaatacacaatggcttttttatatattcctgctagtagaattttttttttatttatttatgtataatattttttaatattaataaaagaaaatgaaaataaaattattaaagtttttaataattttattattatttaaataatttttatgttgtgaaccaataaatttttgacacgtgaaaattttaagaactacaaacagtgcactattaaattggtacctacggactaatgaaaatatcgagcttaggaactatagtgacaattttttgagattaagatttatctgcatcaaagtaactttttagggactcatctgcatcaaaataaattttttaaagacttatggcacaatttaatatcaacatgtgacatttagcgaggaattaacgaatttgctaaaaagaagatcaacagacttacaagaatctcgaacttggagactattgtcactatttttcgaagttaggttggggacttatttgcatcaaagtgaacattttaagacttttgctccaattttccttattttaaaatatctaattttaatttaaattttatctttttttaatatctaaatatataataagataagtttaaatataatatcaaagatttaaaggatattttaaactttaataattttgatacttaaaatatctgatcttataatttatactaaaagataaaaaataaaattaactaaacttaaaatataccatttaaatatcaagttaaaaagatcttaaaatctaaatgatattttattatttaaaaaatcaataaaaaaaagttactctgattttacaattttaaacttgaaaaatttattaagaaaagaattttaaaactcaagatatgccaaaatcaattttggctttcaaattgcatgtttggaacaggcacctagtccgtgtttctcggaccctgtccgagaaataggggcgtttgcataatcttgcgcccagcatgcttagcatacatctcctgcactcgcgcgtcccccaagccatggccaagaaatctgggcattccctttctcatccttacgcatcactcggtgtcacccgagtgatactggcagccaagggtgcaatctttcaaactttcataactttcttaatttttatcgaaatcaagttccataaaaagcaaacttcaataattttttaaatttttctaaactttcattctgaaataattctaaaataaaattccatgtattttttatagaaaaattcacaataacaatcattcatcaaagcatataagactaacatgaaacatccaaatctcaccaaaaaaaaaaagaacatataaaattgtttaaaaaggatctaaggctagttgtgggaaacttattttatcacgaccttatttacttttcatgtatgttaaattatgtttaatcttatatcctaaatatgaatttcttacaacaataatataacacataaatggatgtggaaatccttacaatggctgcaacataaattattgactccttttcaattttctaattcttgttcctttttgtcgcagagtattaccaagaactgaacttggatctttttctccttcgatcgtgttcatcacagtcttccacaaaggcctgagtatcacaccagatattttacatgattttatagttaaaatctacatactccacgagtctgtattattagggatatttatttgaatacagagaataattctcaataatgataaataatagaattctctctcaatattgccatcccttttcccatagattttgtccctatttataggtgtatatgttgacatttatttttattaggatctatttactcacaactgcttatgaaacgtgacattccccatgtttcatttatatacacatgtgataatatctaataactacccaaatttttcttatttttatcctttaaaatgttatgctgactaagaaggtcgtttctcgcggaatgtaagttatccttcttatctgtcttttgaggaaaaaatgctaagtatagttattcttcttattgcaatgttcttcatattataaagttatttgcgaggtggcgttgagagcgagatggatgaacgtaatcttctccatgtacaattgcgtgagtcaatgagttgcaagcttttattcccaagtatgtgggtcaataacctgcaagattcttgatgcctcgttttgtacattcttattatatactttgtttatcccgaggtgcacatattgtctcgtcaattaaattagttaatagttattattcttattttgcatatgcctatgtagttagcgagtttgaatatttctatcaacatataattaatattgaaatgagttgtattaaattgtatttaataatgtaatttaattattatattctttgagctgattcatattccttttgtaggacagctgtcagcttatgattaatagcagaatttagggtacaacaactctgatatggaccataagaccatctctaatgagagatgtaaaaagtgtgctatatttaacacaaaaagtaattttgtggtaaatttacacaaaattttagctttattctccaatgcacaattgtaaaattttcatgtaaaatttaatatctaattaatattttattaaaaaaataaaatctaataactttataatcaattt

SEQ ID NO: 115476 - DNA, 1539 bp, Cannabis sativa
gcttaaacacttagcctttttctagaactctcgtgagaaagaaaaactaaaagtagacgtagctccattaccatcacgacatggggatgaactactataaatttcgtgtgtctctctaaattatttacttaaacttatttatcatcctgctaatctagcgagctgatgttggccacttttcagcatcaacagatattatttttgaatttagattttaaatttcaaattaaaaataatattatcatttattttataaagggttaaaaaagggttttaataatatatatatgatatatatagtttataattaagacgatacaatacaatttttgggattgaaaatacgattgaaaaaccaagagtttttcagcctgtagtgtggccgaactctctctctctctctctctctacactctctgacacgccactttctctatctatagaattggtattttttcccccatctcaagttgcagtgtctcatgatttgagtagacactgtaatagaagaatcgttaatcatactaaatctataagctcactcttattctaggtgttgaggctgattttgaagatctggtgtgaatcttcaacaagttcattatcattttggattggatgatagaattgacatacaaaaagaaataagggtccccgaataggcttcgagaggtaaaatctattttcatgtagttagatttaattaatgtaattgtcttgagatcttggatttatatttcatattagatgcaacattttttttttaaaaaaaaaacctatttctattttatgattccgtagatactttgatataaactataaaaactagcaggtttgatcctatcaaaagtgtagagaagtctttggacctaactgtagggttatttatttccaacgccatcctttgctcgaactaaagcacacgttccaattgattgccttctccattgaacaatgtgaaggttagcatcatgaagcccttaggctttagctcttcaataacttatttggaaaatggagatttgactatatttcttatagttgttgtattcggatcatatatctctgcggcgtttccttttcgaattttggccacgacctctctcataacttgatctttccactttaataggtcatctttagactataccaaatcaggatcctgagactagatcataactagtagcattctttgagttattttgtcttgggcattattatgttctccttccttttgtttgtaactatttgttgattgatagtgcttctgaagcacctaccctgttttggcagcattttcaaaaattgataaggaagaaaatcttcctttagtgatgtggctgatcttatctcttcgagcagttctttactaagtgttatgaattctggctcatttcttacttcctttgcagcgttctgagagattattgcttgttgaaactgctcttgaatactaaattcaaattccatacattaacatacagtttggatccattgatagaaaatggatattaataacttgtgaaagttgaactgtat

SEQ ID NO: 115477 - DNA, 5977 bp, Cannabis sativa
aactaggcgatattgacttgaatggatattacggtaagtttaataaatctaagtcaaagttcaatatttatttcgttatgaaaatgcctgggcacgtgagccattttgcaagcaaattgataagaattgttgggaggagcattaccatcttcctctgtcggataaaataaaaaaatgcactgcaaatttgtcttcttggggttatgaactcactaggaattttaagaagagattgaataaaagcaagaaaagttgtctactatgagaggctctaatgaccaatactccactgccgactttgatgaagaacaaaaccattattttgaaattcttgcccaacaagagatttactgaaagcaaagatcaaagtaacattggcttcatttgggtgacaaaaatagcaagtattttcatgcttctacaagttcaagaaagcgaagcaatcagacactgcggttaaaagacttaaatgacaattggaaagaatggggtacaagtttggatgatctaattacaaattatttttcctcaatcttcactgccgatggagctacttgtaataatgtggtggataatattaaatgctctgtctctagggagcaaaatgaacatctgcttcggcctatacttcctgatgatattaagcctttttcaaatgcatcccgacaaagctccagggccggatggcatgggacctggtttttatcagcaacattgggatatcgtgggatctcatattgtcaaattagttactgatttttttgacacaggtgtttttccacaggagcttaataataccaaccttgtcctaattcccaaaaagaaaaatttctcctcaatgggtgacttgcggcttattgccttatgtaatgtcttgtataagattggttcaaaggttcttgccaaccgtatgcacaacatgattgttcttgttatatctaaaacccaaagtgcgttcatcctaggctgcttaatttcagacaacattatggtggcctttgacgtaatgcactacttgaagcggaaaaggagaggtaaaaaaggctttatatggctttaaaacttgatatgagcaaagcttatgatcaggttgaatgggattatctatgagctgttatgctttgtatgagatttgcagaaaggtgggtaaatcttatcatggcttgtgttacttcggtgagatataccatcatgcataacaatcatgttatgggtcctatcatccctacccgtgggatccgacaaggtgacccactctcaacatattttttcattatttgttttgagggcttatcatcaattatcaagaagtttgaatcaaattaactcctccaagggtgccgtgtggcaaatggggctccatctatatcgcacatgttgtttgccgatgatagttacttattctgtcaagcctcttcaggagcagctttaaatatatgcaccttgcttcacttttttgagatggcgtctggccaaaaagtgaatgtgaccaagtcctccatttttttcagtcccaacactgattctttgctaaagaatgaaatcttttcaactcttggaatgcctaaagctgatgagcatagcctttacctgggacttccaaacatcattggtaggaacaagactacaattcttggttttctaaaaaaataaagtcgtcaattggatcaacagttggaatggacgatttccgtctcgtgttggtaaagaaatcctccttaaaacagttattcaatctcttcccacgtatgctatgagtgtctttctcattcctcataaaatttacactgaaattgagacactaatggcaaacttctggtggaagaccacttctagcaaaggaaatgggattatatggatggtctgggaaaggatggcagttcataaagattatgggggcattggttttcgatgattacatgattttaacctggaaatgcttgcaaaacaaggctggcgacttctcgcctcaccaaattcgcttgttagccaaatttataaagctaagtatttcccttggtctgatttcctgactacagatcttggaaataattctagttttgtatggcgaattatttggcaagcaagagatctggttaaacttggtgcaaggcgtatcattggttcggggtccacaacaagtattctttctcatccatggttacctgataactcaaatccatatgtcaccactactcatcctgggctttatcacaagatggttaactctctttttgatcttgataatatatcctaggatcatgagattgtccatgacatgttcaactcccgcgatgcatctctgattcttgggttacccttatgtttttcagctggtgaagattgttggccttggataggagagagcaccgtccatttctctgtcaaaagcgcatacaacctgctacagcaatcagtacaacatcagcctagtgttgataattctaggttttggcgctatggcagcttaagatcccctcgaaagtcaaaaattttgcttggagggttgtttcaaactctcttcccacctgtttacagcttgtcactaagcatgtaaacatttcctcggtttgcgctgtttgcaagagtgaacccgaatcaatccctcatgctctcatcagctgcgtttttgctcaatcatgctggcaatatgcacatccgtccctcaacaatgccgataacaccacggttggtacttggctctacaataattttcttgttactaatattgataccagctgccgaattagcatgctttgttgggcaatttggaaagcaagaaacaacctcgtttgggataagaagccttctacaccacaacaagttgcttcattagcactagtttgatcaatggcgtaaagctcaagataaagtcaatttattgtcattggcgtttgaaaccgatggctctaaagttgagcaatggactaaacccgcaccaaatacaatcaagattaatgttgatgctgcgttatttaaaaatgaaggttcttatggctatggaattgttgcacgagactcttttggaaccttgctagacacgtggcagcttgcaaaaatggttcttttgctactgaagtagtggaggccattggggtaaaggaagctcttagttggctcaaagataagaattggaataaagtggagattgaaactgatagtatgctcaccgtacaagttatccgtgcctctcatcggatgtcctatgtttttgatttggttattaatgattgtaaacttttactctcaaatctcccaaatgtttctttgcattttgttagacaatcagctaatcgagttgcccactatgttgctaggtattctcgattcctttctggttgtagcattcacatacagaatattccgtctgatcttcaaggccttttgtactctgaatgctaaattttaatgaagttgctatttcatttttttttttaaaaaaagctactttttaaaaaagttgtgataaaaaggttttttgaaaataacttattgaagaattatggagaagttataactaaaagctaaagctgctaaacctaactttaaaaaaaaaaaaattattaaaagactttataataaattattttgtactaaaaatatatttaattatgtattgtatattacaaataataataatatttttatgaagaaaataagatttaaatttcttattttttagtttttattatctcttaaaaaaaatttatatttatatttatatttttattattaagaaactacatcaacctacctaaagtgagtgatttttataaactaactacaatttttttttaaaaaaaatgataaaaatataatttaaaaatattataaattatttatatcaaatgcatataaagttatactatagaaaaaaaataattaaaaatatatagaaaataaaaaaaattatttaacataatataatttttttatatatttgtgattataatgaactagattataacattatcattattataatagaatcttaacaacttacaacaatttaaattttagaatttaccaaacacttagctcagcttttttccacagttctactacaactgttttttctcatagaacaactattgtggtatagttcctccaaatgaaaaggtctccattagttattcctggaaattcgttcactcatgaaagccaatcttggaaggctctcttgtcctttcgggaagggtcttcaggataagctagcctctctctgggatggagttcctgttggctagttgttcctcctaaaaaggtatttcctgatagtcgactcctgttggctttatcctatccggaagctccttcagcgagtgtctttggttcgcgatcctgaaagctcatatacattccccgatgcactaagacttatgttgtcgtggagatcaaaataacaagtcagaataccattgtaaaggagacttgtcgtgaaatggatctgaaagctcaaaggagagttggttaagttagttattttctaactaacttaacaaccgtaattattgcagccaacaactttagaatcttgatcctaaagctataaataccaccttgacctgttatttcagaatatgtttcagattgagaatgagaggtagagagaggtaatagagaaaagagagagattgggtttgggttttgtaagaagaatcttttgtatatgaagaagattcttgggtgagagtgtgagagtactcaacagaaaatctttctcaattgtattgtacttgttcttgctcaatcaataaagaggatttggtggtgttatataactagagcagagccataaatcacatcgatctatggacttgaactagtatatatcttggtgttgatttttttactttctgccttaatcgttttttggttttccttactctgttcatccctatttttttcatttgttatttgtactttcttgatcttgtcattgttaaatatttaattgtttaaagtttcgtttttttgattctgcacagttagtcataattttctctcatactagagcttggtaatcgatcaagaacgtagaattaagattatttctactgtaaatcttgaagaaacattgaatttcatcaatggcgagattcaaattggagaaattgagattcaaattggagaaattcgatggaacaagagactttgtgctatggagagaaagtttgaaaggaatcttagtgcaccagaaggcatccaaggctcttggagatgaaaaactcttggccaaaaagaaaccagaagaaaaagtagaaatggaggagatggcgtactacacgatcatcatgtatctgtaaaatagtgttttaagaaaactcattgcagagaagacatcgaaaggagtttggaataagttggaagaactatacttaaaaccatcaatagctagcaagatcaattttctagaaaggatacggtttcagaatgatttcttccctttctttagttgataatattgatagatttaatgagtttattgtaggtttggctatcataaatcacaaggttgatgaagaaagccaagccatcatcttgttgagatcactaccaattgcatattaaaaagtgaaggccgctatcaagtatggcagagacattattgcattggaggatgtagcactaaaatcaaaagattttgaattataattggaaaggaatccaaaaaagaagaaatgtacttggcaagaggaagatcgcccaagaaagtaagctcgaagaactctcaatcaagatcgaagtctagagagaaggaaactaggaagtgttacttctatggtagatttggacacttgcaaagattttgcaagaagtacaaggagcaacaaggcttcaacaaatctcatattggagagaggaatgacatttgacatcataaatttgggaaggactctactgcaatcgtataggatagtgatgattgctcagcagatggggaattgttctccatctaagaatcttcaatgaacag

SEQ ID NO: 115478 - DNA, 2773 bp, Cannabis sativa
  modified_base (2573)..(2591): a, c, t, g, unknown or other
gctcttcccgtcttaaataaaatcaacaaataaaaataaaatttacaaaacacatttttgtttttttttttaaaaaaaattaacttctatttatgtaagtaaaaaatttaaaaacaaaagtgttaccaaacgatccttttcttctctcttcctctataatcaaactctttttctttttgattacacacgagagaaactctcttggtctaggtctggagttttcatctctttctttctagatttctgaggagtaattttgaagctgtaagtgttctctgattttagttcttctatttatatgtgttgtagctgagaaataggttagttagaaataactaacaactgtcttgattttggattgcatacggttaggttagttaggattttaactagctgtgtttgacttatttaacttgttacaggttgacttatatgggaaattaatccaacacggcgaaaccttaatatttttacctcgctagcaattaaccttaaaatttattttatggcagaataattctcaaaactcgtgttctattagcaattgagttttttcatccattttcatatgttaagtgacatgttggattatggttcaaaaaaaagtgacatgatagattttctatgtgtacacagtttacacgtgcacaattttattggtccatgtaattaattattaaaaataaaaaattaaaaaacaatttttccctccatctccatctccatctccatttccttcttctttcttcttttagcttctttttttcaagatttttttttcattcttcgtaccaacaccatcaccaccaccgaaaccaccactacccatcaccacgcaaacatcactacccactgccactgctgttagaaactttatatgaattactatgtaaacataagcatatatgaacgatttattaaatgcggaataaatcaaatatatacatgatataactaaataatcgaaatatctccagccattgattttttgaggccattgattatttgaggcttcaattccacacgatctttgaatctagaaaagaaaacaaaacttagttagtgtggatattcgacttccaagctctctctaactctcttagacgtatttattgtgttttacaaaatgagtagtgagtttggaaatcggtaccctatatttattagttagatactccatcaaaatttgtaccacattaattgtttgcatattttgataattaatttaagaaatggaatcgaataatgaaatatttggtaaatcaaaatcttatatagaatatttaattaattatcaaataattaataaattatatattttataaatcagaatcaaatcaaagatttgaaaaaacaattcaaatattgtacttatcaattataaaatagtctaatatcctaatatccttccacttggtcaatatttaaatgtactacttaaatccaacgattcttgttacataataaactcatgaatcatagcgataaattctcattatatagcgagtattatcttccatgtattacgatatatttattacacaataatgtacttaatgtgacaatgtacttaagcaaataaatcataaaccttatatttattctggttctctgaagataattttctcaaataaaattaaggtgcacataaatatgagaaaaatatcgaaagaagagtttcatagaataattttagttgtacaacagaaactgcaaaagggaaactgaatcccatgtttactatatgatctttgaatttatgctgtgatatgcctttagtcaagaatattacgatcattcaatttagtgttgcgtacttaatgaacagttacgcttctttgtaatacatcatacgagatgtatccttaaaacaatacatgaatcggacttctatatgaaaataacaattaaagctctccacgatacaacttactaaatcttaaggacgtaatcaaatgttaatttatgtgaaccgatataaccagtaaagtcataacttaagtaataaactaaatttctaaaatatcagttcatctcaataaaatatgtatgaatataatctttagtatcttaaagatacctcatcactttgtatgaaaatatgaagtagtcttaattttagttattctgatactacttaacattcttgaaataaatgcaatgtaaagtcttattcacactcataggtatacattaggcttctaaaaatagaatcaaacgaatattcttaatttattctcattttgaatcattttacagatactggtttgagttgaaattatcacacttaaagataaaagtaacatatgaataatatatatattaatcaaagatgttgtggatactctctaattaattacaattatatatcatttatattctctatctcaaaataataatctgagatatgaattattttaccttatataggaaacttttatcatcagttacaagtaacatattgtctatatataagataaatattattcacactggctttctggtatataaatacagtagaacctctatccaataatacacttaggaccaagcaaattatattctaattgagnnnnnnnnnnnnnnnnnnnttacactagaaaaaaaattaaaatgccaaaaatatcagtgtaataataataacaataaacaatcattaatactatatcataatataattttttagagtaaatataatatttataaatgtattataatttcgaataaaattattaattttacataaataaatttacaaaatatatgtatatat

SEQ ID NO: 115479 - DNA, 1560 bp, Cannabis sativa
ttaggcttaagatgtgtcttttaattactaaaatgcagctacgcagaatgatcaatgcatagtagatggtggttcattagtgtcaaggttgagactacacccaaagaaggatggtgattttgctccattgccaattcaacttctccgcaaatatattgcctacgcaagaaattttgttttccctaggtaattggatgcgatctgattacctcctctcaactattccaaattaatatttggtaatggatatttgatatttgttggaattaggatgtcaaagccagcagctgaaatcctacagaagttctacttaaaactaagagatcatgctacatcagctgacagtacaccaataacagctagacaacttgagagtctagtgaggctggcagaggctagagctcgcctagatttaagagaagaaataacagcccaagatgcaatggtcagttgccttgcaggctaaggctaatcattttttaggagatgtgatgtgagattcgaaatgagattttgttcaaaagatttgtgaatgactcttgtttattttgcaggatgtagttgaaatcatgagagagtccctctacgataagtatgtggatgagaatggttttgtggacttcggtcggagtggtggtatgagtcaacaaaaagaggccaaaaggttcttaagtgctctcaacaaacagtcggagttgcagcagaaagattgtttttctatctcagtgcgtaaaccaattatttttgttattactttcagatccttcatcattcttctataagtgaatattgttttttcaggaaatatacagtttagctgaccggattgaactaagagttcctgatatggatgcctttattgataatttaaacagtgttggttatctactcaagaagggaccaaagacatatcaggtatgaagtcatccacatagaaagaatccataattttctatttgcttgccatgaatctctgatgataactgtatatttccatgtaggtgctgtcttcatcttattcgcggagccaatcatcaaggtcaaggatctaaaattacaactacaggattagaataaagagagctgtgttttgaaaacaaaaaagagcttcaagagattgagaaagcaatctcctcatgtacataatcaattaaaagaagccaagtttgttgttctcagaatatgtagaaacgttaagtcttcttttcttatagtagtgtagtgtaattagttttggtcatacttggatcagaaattcctgatttccatctatagcttctaatctatactttgagagaagaatattgtaatggtggagcgtgaagatgatgatggttttggtagtaaatggtggtaaatagattatacagtaaattgtgttgtaaattttcattgctaatgttcttgcagggccaaactggaagggaaaacaaagggcttagtattgagaaatgagagaaaagagaattttcattaagaagcaagaacatgtgaggcaagctttatataaggcttgaacctttgaacagactaacggtattaacagacaaaccgttacaa

SEQ ID NO: 115480 - DNA, 1837 bp, Cannabis sativa
tctattatttttcttgctcttatatttaaattaaaaatgatataatattattttgactctgatatatggacaacctagatctacttctactccgtaaatatagtactagtcttagtctattctttaagcttctgcaacatttgaacaaagtacaagctttaatgttacccctttatccatcaaatcttaactttttctaactctaataattatatctctaaagtaataatatatctctgcatatcacataaaatatttctcaggaaaataatgtccacatataattcacatacaaattatattatatacacttatatcccagtcacttttaatacgtgggacttatcttaactacaaaaaattaattaaaattactctactaaaatatttccttatactgtattttacttgtaccaaactaaaaaaatacatgacctaagaaatgaaaaatccatctcattcttatttttgccttaaaaaattcaattttccagctcaaatatcttaaaatgaaacaaaaataattcagcaaaaaaataagtaaataatatagtaaaaaagttaattggtctaacttactcaaagaaagattgacaatttttttttttaatttatgatttgagttattttaaatgaatttgagtgagatataaatttttgttttacttgctaagtaaatttttatgaaaatagaaaaaaaaattattttaaaatacaaaaataaaaaaaactccaatttattattaactcgtgattttgaatgatatttttcattttattattatttttttaaaggtagatatgtatgcttatttttcatgactaaataagaagcctattttatcaaataatacataaatatatgtatatatatatatatatgaaggagttaatattagttacctcgattggattgagtttccgattgtaaaacatatcagcagtttcaggaacaccattaacaaaccttccaaacttagaaccacaagcctttgaatccctaacacaagaagcaatcttaaaccagtagctattatccgctacacgctgttccagccaacccgagtagtcctccaaataataatccaagtaagcccgatttataacgggtcgacccgaacccttatccgtaaccgcataagcgaatattatgaaacacagcaaagctgctacaacgaagaacatcacgaataggtaaagccacatcaggaaagtgttccggtaacacgcgccggcgaatccggcgagtgagaccaccattacggcggcgccgatgactatgatcggccactgtaggaatttgagacagtctgtgttgttggctctgctgctcagccagattcctcctcctaagattgggatcgagagaaggaaggtcaagaagttgaccagtccgatcaggtgattgcttgctctcatttttgtacagagaaagaaagagagagagagaaagggtttgtttgttcttgtaatgtaagcaaaataaggagtagtgtggagactataaatggtattggtgagaagaagatgacaaagatggttttgtccaaattttgtttttatattttttaattttttatttttaatcaaaaggggtagttaagacactcataatcatatataacattaatgcaccccgaaccccttaaaatggatgtattgatgcactcttaacttgtttcggcatctataagaattttttagtctaattttttttcatatttacgtacgttatatctatttaagaaattttacaaaattttgaaaaattaagaataatttaccttatagaaaataatgttcaaacagtctattttatacgcatataaaataaaat

SEQ ID NO: 115481 - DNA, 1112 bp, Cannabis sativa
  modified_base (764)..(766): a, c, t, g, unknown or other
cccggttcgccatcgaacggaaaatcaaaactcggccgagccgccgcagtcatgactcggcagcactcggatattttgccccttccgattagggaaagaccacaagttgcgccgacaaaacgaaccgccggcggcaggagatcggctcagccagccgacgccaagcggttcgaaccgttagtgggtatgtcgattttgttggtgactttagtgataatggtattgtggggtcgggtctgcgccattctttgtacgtctgcgtggttttattttgttccttggcttagcgccgccgtgggaaccggcggtggaagaggaaacgggtcgggttcggaaggtttggatctggattctgaagagtcaaagaaaaaagtggtttttgaaggttttcttgaaaggaattatcacaggtttaactcgtagtagtttgtttttttatttatttattatattttatttttatttttattttaagttttggttttggggttgcagaaacataaataaataaataaaaaagaaaaataggagtgagcgcatgttagtggttgagtgaggtgtttttgttaatttgagccgggggtacagtacatgatggcttgatatgtaaattcgtgtataaaatggaaaaagaaaaatgaaaagtccaaagatcttctagaactgtttcattttttcttttgagagtttagaaaatggaaagaggactgtgtaattggaagaaaaaaagaaaaaaaaaaacaaaataaataataataataatnnnaataataataataattcaaatttagacattttattgctcctcgtagaattcagagagattgggatttgtcacgtgattttcacgtgagctacatgatgacttagtcaaactttctcttgtttttgtattaattattgatgatgtctaagttgagcattaatttaaattcatgattttcaacatattttactttttttttttgaaaaggttcaacatattttacttaaacggttaaattatttcttttttttatttattttttttttttttttggctaatttggatttttggcctctgaactttgacatgtaccaaataatgttccctgaatttttaaggtcattga

SEQ ID NO: 115482 - DNA, 777 bp, Cannabis sativa
  modified_base (724)..(743): a, c, t, g, unknown or other
ccatcacaggacaaaatcatatctctataaaatttatagaattatctaaaaacgtgtatgcggctgcaattataatatacattatcatataagaaaatgagatacaattttttaagagtcaaaataaataaacaaataacaaacactcttagagtcaaagtaaattaaaaatttctcctgttttttcaatgtttttttcaaaaaaaaaactgttatatataacaattaaagtcatgatacgataataaatagaagagaggaatattctccaaccaaatataatttgtgtctaccaaaaaagcaaatttaactaacttatcagcatcactatttgtagatctaaaaatatgttagatctgcacttccaaaaaattagccactagatttgcaatccttttactactttaagagaatcaattttaatataatagactggaaattgcaattccaacaaccattaaagattatacaagataggcataacttcaagtagtatttattgtagcatgaatggtaaatttcaatatatttgaaggagagagtaaccatcacggagagtcaataccagttttgaatgcagttagtaagttttttccaattcaaaacgaaatataatattaaggctaattaataattttctctcctgaattttgatatttagtaaattgtgcgtcctaaatttttttggccgttaaaaattctttccgaactattgagattgttnnnnnnnnnnnnnnnnnnnnaattttattcaattttactgttttattgattgtt

SEQ ID NO: 115483 - DNA, 3434 bp, Cannabis sativa
  modified_base (3391)..(3391): a, c, t, g, unknown or other
gtcttgtttttcgtcagatcgaatctatttggagtctaatgctccctcttctttgcgtaatattgtaattgcggatgctatttgattatcaatgatataactttttactcaaaaaaaaaaaaaaaaatatagtcagatgctacataatttttttttatataaaatctaataataaaagtgataggttgtcttgtcacttatgacaatttttttataaaaattaattgtgaaagtaatgggtggtcttgtcacttgtgataatttttttaaattaaaactaatgataaaattcttacaaaatcttctcctatacactctttctaaataaatgctctcttccctctcattactcatctccttttgtagtaggtataaaaaaaaagtatgtgaatgatgaagaagaagaagaattgagaaagataagagttttgttctctctccaacttactctctaaaatttaataattccagctctttctactattctctcacaatacccttttctctattatctttctctcaatctttccttttttttttcctcttctctctccctctctctctcttctccctctcatcattctgggaaataagtagttttcctatattcatgttttttagttcttcatgttaaacatgtttctagtggattatttagaattgaatacatatttctgttactggtttattttgttattgttttaaggttgttttattattattttatttcatgtaattatcacattttataaatgttattctacagctctatttttaatagcaatagaaaaataatgaaatttgtatgtaaggtatttacttcaatatcctattctcaaatatatgttcaattttcctctgttgttccattgttattttttagttgttctgattcttttcatttttgatgccttctcctgcatgctctcttgttgtgccctagctcctcacatttgctgtatttgttatgttgtttcttttttcagccaacttccatcctctcttttttgtcttccaaattttaccctttcaatgggaggtaagactattacatctttcatattttgtgctacatcccactcattttggtgtcctattggatacactgttccttaattagttgttagctaaattttcttagtgtagtaatttgaacaaatataataacatgttgcacgtgtgtgttctctctctgaggtctactgtccattattctttgattccggttacctcaaacaaatattcagtggttggtttaacttgtgtaatttaaaactaacatttgttaaacatacaagacaacagtgaaataacccaaaaacaacattgaaaaactatgataattccaatattaatagttttaatgtttctgctttatcttgccgaaattaatgactattttctagctattgtagtgttgctgtggtggttctgtctgtgagtgtataagatagtggcctcattttttaatttcggcgtttacagtataaaagaaaataaaatatggccaaggcagtaaaatgtaaattttactgtgtggcggtataaatgtaaatatttattcaaaatctaataattttgtaaaattctcataaataatcgccattcttttctctctcaattttagcccaaaaccctatttactattactattggcctatattcaaattctaggaataaaatggcttccgatcattgtcattcctcaaccttaaatccaaacccatattgttattggcctgcattctcttggtcttcttgttatttcatggcttccccaatgagggttgtgtcctctctgtcgatttgagtatgtgtaattccccattttttattttttgttattttggtatgattctactttagtattgcattttaaattatttattgtgtttctagtgtaaattgggtatgaagttgtgaaatatagttttattactttattgagtttattcaattcgatttgtttgatttgaattcaaactaatcaatttgacttttgtgtttagtgttattgagtttttaagatatgcttttttgcttggaattctcattcataagcatacaaatgactatagtgttccatactatgatttgtttcaaaagggtcacaactctcatgtcaccattaaactctttagtcttgattccaactgatgtcacgaacttctttgacctcatgtagcctagcctcaaggtagagatttatttttatttttttaaattttatttttcttatttagagtttattatgatttttctttcgattggattttttgactcttccctatttagcaagataggagttctagaagtttgttaattaaatttaattctattactttattggcatctctatttttgtaatatttttctttgaataatgaattgtttgtaagaatgtgatctttgagcctcttttgttactgtcatatatgtatttttacaatatattaggtttatattattttaagtgtatgaagcttgttgattgtaatgcccaatttgaaaaccacttggaataaaactttaatcatttaaatcaagtataaacatatatatatatacatatataaatttggaaatcgggatcccatattcaaaattatttttggaaacacaatatatttttataatacgtcacatagagtttagagaagttaatcccaaaatactttaataccgaaactctcgaggctgtactatcacgatatgcacaatcattaccaagctccaaactcactgttcctctgccgtagcttttcctttatctacacatggtagcacactgatgagtcaacaaactcagtaagatatgcataaaatatacaatgtagtatcgacttgtacttaggccctcttgtgactacttacaaggctcaccaaatggtcaagaacgttcttaacggaagtatgacctctataccacatgcactaaagtattgttcctgtactagtgttggtagggctgaaccatacacccgtgtacccctaggtgttataccacatgcaccacgtactcaccaagtatagtattggtaacactgtgacatacccttaaattatatactctgtaccagtacactctattttacagttatactagtgttggtagtgtatgataacataaccccaatacattcacatacatacacccatacatgtttatatatactttatgctaatcttacctcgtttctagattcaagcgtgttggtcgacttgaatggtaattcactagctaaacggagttcctttagttgaatcactttagattcaagataaagcttcaaaaagttgaatgattgaagttggtttcctactagtgtccctagaaccaaaagaagaggaggaaagaaagagaagactctgttggattttgtgccctaantaaaactcatttcaatataatgagatttacttattaataaaga

SEQ ID NO: 115484 - DNA, 2458 bp, Cannabis sativa
  modified_base (1764)..(1770): a, c, t, g, unknown or other
  modified_base (1906)..(1906): a, c, t, g, unknown or other
  modified_base (2239)..(2242): a, c, t, g, unknown or other
  modified_base (2408)..(2410): a, c, t, g, unknown or other
ataaaaattgtcatattttacaaatattagttattatttgcttagaaaaaaaattttaaccaaatgtaagcataaaaaatcaaatttccctaagctaattacggtttttgttctttgtaagtacaaaattatgtttccaatctgaactattgaagttgtttagatttaatgacatatccaattcaattcaattttactaacatgaagattgtcctagtaccaaatcgtgcacaccaaactttgatatgcatcaaattgtgccactaaaactttgatatgtactaaatcgtattccctaaacttctactgatatcagactttctttaataaaattcgacagaaatcctttagaaagtatatggtgtctcacattcttgtgaggtgtcatcatatcgttatcaatgtaatttaatattaatttttttttttattttactttaataatgatgataaagaatcgatgtactatttataaaacgccacctcatacaaaatgctcttattccaaactcatttaattttccaccatgggatttctcaaaaattattatgatctttacctaaaaggtatccttattaaaatgggatttctctattaaacttagttgtgcggtgtgtattaacaacttctttccatgattttgggctcattaagggaaatcaagagagagtttggaaatacatgttgagttctttatacatttatctttgccgaccctctagaactattgctttgcctaactcgagctaattcgacctcaatggcatccccccatgttggacatgttaagttgaactgatgttgctgatcggggtcagcgtcgaaaattaaaaattaggatggtgcttcaaaatcaatctatagtagtgcgtacactatcagagggaggaatcgaaaattggggccaaagtgtgaataaatttattttgtagagacaaaataacaaataattatatttaattttgggataattgcgacatatataagtactaaaaattttgagtttataaccgtcataattctaatgatttttttagcagcataagtatttaattttagtaaaattgtaattttaatatagaccctagtttgaatttattaaaaaaaataaaattaattaataatacatgtttctatagacatctaatgatttaaaatttgagttatacacattatgtactgtttaaaatattaacagtcttactgaatgatgacataattaattataattatttatctttttatatatattttttttaatattgtcctaaacttgctaataatagtgttacatatttattagcaacatcatctttagtgacctaaaccctagctaattcatcttatatttgttgatgcatgcactcattaagtgaatatgaatagtttacaagtcaaaggaattacctaacaaaaagctgcatgagcactcgagattcatttctttcttgtcttaaaaattcaatgcaaccacatctaataaagctgcctcttcttataattattatcttgtgatcaaaataaataagaaaaacatcgtcacacagacattacaaatttttatgtgctcacatttattcgaattatacatacataataaaaggattatatatataattgggtgtttctataatgtatctttttaaaaagatatgctgattcatttaattatctgttttagcatctagaaaaattttttagccattttttttttcttaattatgtacgttatagttatttaagatattctacaaaattttgannnnnnnagaataatttacaatataaaaagaagtgttcaaacagtttatttcacacgtatataaaataaaatagtcacgtgtgcaacacactgtttggaccatgttatcagcgtgttaaattttttttgaattttttaaaatnttacaggatgtcttaaataattataacgtacatgaccatgaaaaaaaattaaccaaaaattattttaaatactaaaatagatttaagtacatcggtacatttcttttaaaaagtatgctttgtagaatttttgtatattaattttataattttaaagtatatttactgtcacgtggaatatcatgagctttaactcccttttttagctttggcataggtgatctagcttcacgagtctttctctcccggtaaagcatttgagcaaccctattatatatcaacacaaaattaaattaaacaaaaatacaaatatcttatataaatatatatatnnnnatatatatatatatattatagctagggtgcttctatttatttaaatgagatatcctcgtatactttctacctgttttggtatttagaagaattttttaatctatttttttttatatttgtgtgtattatagttatttaagacatcctataaaattttgagaaattnnnaataatttacaatatagaaagtaatgttcaaattgtctatttcacacg

SEQ ID NO: 115485 - DNA, 2730 bp, Cannabis sativa
aataacaactaactttaaaacacaataaatttatacaataacaaaataaatatatatagtaaataaaaaagtatataaataaataaatgtatttataccgagctaggagagagagggagacgaatggtaggtggtggtggtccgacgtatgagacggagatgagagggacatcgataggaggtggtggtggtccaacgtatgcgatagagaggagagggagaccgacgggaggaggggtgggtggagatcgatggacgagagcgacgagaagaaagagagatcgagagggggaggaagacggcgagagaggagagcgatggtgctgaggcgtgggtggggttttggagagttaagatttttattttagggtgcgggaaatggagaagaaataggtgataagaaataggtgggcatgtgggaaatagaaaaaaagtaggtgggcacgtggaaaatgtggcgagaagtaggtgacgattttttaatgggcccttattctcctaaaaattcgcattttattaaaaaacgtcgcctattttgttcactacgattttaaaccgttgcgaatactaaatttttcctgaccgtttaaaatagttactttattcttttggcgacggtcccggaaaaaattcatttttaggactgtttcgaatttcgatatttgtagtagtgaaagttatgtctggcttggaaaatgtgagataaggaagcttgccaacaagctgccgataatgagatgggttgtccaatacttctccatgtttattgtcgagcttgagcttagggtcctaggaattttactgggtttactgcctacgtaaccagaatcctcaagtagttgtaaggtgtattttctttgagaaagaaataaaccatctttggcatgagctatctcaaaactgaggaaatctttgaggttttcaagggggttgagtttgaacttgtgatgcagtgagtcttgtaactagtgtagaatagagatgttgggaccgatgatgatgatgtcgtcgacatagacaagtagggaaatgaaggtgtctgcggatcctctggtgaacagagtgtagtcagcctgtgattgcttgaatccttcttaaagtagagcatctgaaagttttctgtaccattgcctgaaagattgcttcaacccataaatagacttgtgtagtttgcacacttggttagtttctgcatcaagagaagaaggcagagtaagtccttggggaagtgacatataaacttcttcattaaagtctcgattaagaaaagcattattaatatcaagttgtaaagtgagccagtttttgatagttgaaataacaagtaacaatttaagtgtaaccatcttggcaacaagggagaatgtatcaaagaaatctagcccttcttgttgcgtgtagcttgtgcaacaaggcaagccttgaattgttctatgttgccatcactattatactagattttgtaaacccattgacaccctatggttcttttgtttgatggcaggggaacaatcgtccaagttttattatctgtgagggatttcagttgaaattgtatggcattcaaccatgctatggtctgtatagcttcaaagtatgttcgtggttctttggctaatgaaacttcaagaataaaagccttatgagaaccagataacttgtaggaagaaataaatttatcaatattatgaggtgttgaagaattatcctagatgagtgaatagcactcaaaatctcttaagaagcttggtggtttagattgtctatttgatcttcttggtgcatcttgcattgttgtggaggtgctgcagatgccatcgatgtttctgcaggtgtaggtaattcctgttcttgagtgtctcttgcatctgtttcatgaacctaaattgaaggatttattgtggcaacatgatctgtgggatactcacaaataggagtgttagttataatggaatgagggagaacagtttgagtaaagaggtctatgtcattatcatcaatatttaatttttaaaaaggaaaaatatttcatgaaacacaacatttcgtgagataaaaaactgtttgttattgatgtcatagagtttataccctataatcccttgggatatcccatgaaaacacaagtacgagctcttggagagaatttacttctatgagtagttatggttgaagcaaacacgaggcatccaaaggaacgaagatggtaatactcaggctgtttgccaaagagtaattcgtaaggagttttgttttttaacaagggagttggaattctatttatcaaatatgcagcagccaagatgcattcaatccagaattttatgggaatctttgcttgaaagaataatgatcgacaaacattgagcaagtgctgatgttttctttcagtaatagcattttcctcaggtgtttcaacacaagtgaactcatgcataatatcatgcttggaaaacaattccttgaacacaagttctgaagcattatccgttctaaagattttaaaagtttgattgaactgagtttgtatgtaagtcaagaattgagggataatgaaactaacatcagatttttgctgcattaagaaaatccatgtgaatctagaatggtcatcaaccaaagtgagaaagtatttgtgatatgtgtgtgaaacaatgtgatatgtgttggaatatcttttagcaagatctagatttactaacaagtatatttttaacatcctaaatatga

SEQ ID NO: 115486 - DNA, 1463 bp, Cannabis sativa
agagggggaataccggtaatggcgataacaacaacaacgacaacaaggaaccaaagaataccctcgagccagccaggtgggatccaaccccaaggttcactacctacaacatcctccttgacacgagagaaaacatcttcaacgtagctcactcagtggtgccatatcataagccttatcctatgagaaaggatattagcaaacaagacattaacaagttttgtcgatccacaatgattatggtcatgacatggaggaaatagagttcctcatcagacaaaacaacccccatttgaagagatatgtacgtcgtgacaacaaccaacccccacggcaacaacaataggcggctggagatgaccaacaactgttacctccccttgttgcgggtcgtttagatgtgatatctggaggaattcatttaactgttaactctggaaactctcaagaaaaatatgctcagtcccttaggcatgagtcgagtgacgatgtgttggcaatccaagagcgagttcccaaacaacctcggtatgaatatgaatcaatcacattctccgaggatgacaccagccacgttcgatacccacacaatgaccctttggtggtagaagtactattcaccaagaacgatgattgatactggatcgtcaattaatatcatcttcaagtgctcattagtgaggatgagtttggggacaaaggatttggaaccctgtgaacatctcctatatggactcacaggaaatggtatggcatcgactgagcttattaagctacctttgactgtgggaagaacccccaggagtgtcactattatgcaattgcttgtggtattggatatcgtataaccatacaacgccttgattggtcattgattaatgatgaaaaatatacatttagtaagcttaaagtataagataaattaaaaaataaattaatattttattggaattaattaaatatatttttatgtgaaaatatttaatttattgtcttttttattataggaattgaaattattgtggtattttaaagttggaaaaaagaaaatatatataaaaaaaaaaatcagatttttttgttgttgtagaagcccactcgtgcgcacaacccgaagcccatctccagccgtccgtgtgctgatctgaaggcccaggagggcgcgtgtggtccaccccagacaaggacgcgtcaggcgccttcttcctcctgccaagccgcctgctgacatcatgcgtgggacccgcgtgcaccagcctttctctccaccagccaccagcacgccgacacgtttcccagctgctgcaagttgtccccacgccagtttctctctccagcagccttcaagaaaagaccaaattcaaaatatactacagtagaacctataccttatacaagaataacttctaatttattataaaaaaatcaagtcccaatttgagcctattataaataagaataac

SEQ ID NO: 115487 - DNA, 1255 bp, Cannabis sativa
aattaagtctgctgccattaatgtaaggttgtctacaactcttgtgtgtttgattcattgttctaggaaattcatatttaagatgttagattataaaattataatgcaacatacttgttagtaaatctagatcttggtaaaataagtttccaagatgtccaccctcaaagtgacctctgcgagtaagaattattctgggggattcttttatctcgggacatactatgtcgagtataagattattgtttatcttcccaaaagaaaagagttcaaggatcaatttttctggaccactggactttatcaatgttattacacatctgttaaaaaaccacgtgaattgcataactctcatctttttttggtatttatgttactttttgtactttttctaactcgacattgtcaattataatcattagcaattttttcgaatcctgagtcaactcaagatgtggcaagacatcattaacaattagataatttttcatatgggatgaggtctactggctttcttcttcatgagttacacttgaggaattgtggccttcttggtttagaccaatcaccaatggacgtgaaggttccaaagtattcaacttgaaattcaatatcagctatgagagaagaagaaaaacaagagcgtgttgtctgagtcacatatatttaggctaatgttacttgagaagctacccaaactcttgaaggggctcctcaaggtaaaattgaacacttatatgggtggtcgcctactgtccttaaagctgatcaaccatgtctcatcaaattcaacgatagtcaatataatttttatatttagaactacgtagatctgatcacccatgggtttgaccgttgttactcctagttccacatttaggttactagtaacaactcgtactatggtatcccaaacccatacaactcgaataactattgggaaccaatttgagatttaacccgaattaatatcgtagtcatctaaaatggatatcattctagcaaccttttattcgatcaagacgagaatccgacgttgtcccgtttacgcgagagtcaatgtcattctatcttatgagcttccaccattatttcataccttgtaagtcttactcttagcaaccactttagggttgacgttactaggaataaaacaattacaataatacttatctttcgagattgtacggcgttaaattgctaatgagcgttcatccattagggatgattactcactaaaacaagaattgtgtag

SEQ ID NO: 115488 - DNA, 2074 bp, Cannabis sativa
atatttttatataatactatgttaaattttaatttatattaaaatattatatatgtgcgcataaaagttaatcatatagttttatataaaaatattgtatgaaatataatttaatataatactatacaatataatacaatgtaatacgacgtaccaaggaacctattcctattaatacaaatatttaaatatttagtcaaacctggctgttttcaatattatattaataaatataattaccacatggattatatgatgtgtaataaattatttgagagatattattagtggaaattaactgtctttttattcaaacactaatggtgtaatgtcaagttgttttattaatttatccgataagaataattactagtttcaacaccaagatcgttattattaattaaccaatgtttccattaattatgtacatgctcctccaatatttaaacagtttaaagtatggccaaattaatttatatatgtatgatagaatttactatatatatcaaataataatcataggagggacacatctcacttttgtccaaataatctgactgttcatccaatcattttaattagtgaaacacaaccaatgcacctatacgtagatagttcgtacgattattcaattattttcagtaagagataatgggtagtagctttatggtccataaatatatgataagaaaagaaaaatatttaaaaaaagagtgggtatatagattgattaaacaaactaccaattaactatatatatatagctccttgttgtttaataattaatgaaaagccatttaaggggttttctcttcaacctcttcttcccttttcttttctttttttttctcattatttgtttggggaacataataataaattaaacattcgtccaatccaaaaagtatatatgggtgcctgaggaagtgggaggccaaccaaaacaatggacttattggattatatatgattttccacataagaccatcatctatatatatatataatatatatatacacatatataaatatatatgtcttgtattgaagctaagtactactagtagtgctcaaaggagaccaactcaaaagccattataggtcaaaaaaagtaaaagcattgctattgctatggtgatcacgtctagcaccattatatatgatatataaggttatcatgttttataattggttaataattttctataatttttattaaagtaatataagtgaaattcgatattaaattacactaatagtgatattatacatcataagtgtgctaggcaccatgaatgcagtttagtatatttctatctttcttagcatatatttatatgcgtgtgtttgtgcgccgatatatatataaatataaataaagacccaccataagaatctccatactatgcagcagtgctccaatatgtatattataggaagaatatgaatatggaaaacatgtaccaacaagttaatgatcagattgacaaattaataaaagttgtagcatatattaatttctggagaatatgccgcttcaagattcttactcatatatacttattattctagaatttgaatataattaattaaagcatgaaatatatattatatggtagaagtttcttcgattgtctcgtgtgcattatatagaatattggtggtatgacaagagataacgcactgggataaacctttattagtttggtaagaaacatatggtagacaaattttaatatttctcgagcaatgctttggatcaagtttaagtaattaatttccagttgtctcattaagctttcaaggtattaagagttagtttcactttattaaatcaacgttggtattagaaattttaccagtacaaaatgaaaagtgcgcgtaaatgtattgataaaagttagattttagtcacttcaaatgtgcgctggtaaaattttgaccattttgccagtgcagtttgcgaatgctttggtaaaagttacttttaccagcgcagtagtaaaagtgatattttttgtagtaactcctcccattgctaattagttttgagatggaacctcattcatcttgt

SEQ ID NO: 115489 - DNA, 1253 bp, Cannabis sativa
tctttattttttgggggccctgtagtgtagctcaacttgcacactataagaaccggccctagtatgacataattattttatttaaatattataaatttataatatattaatttgtagaaacatacagaataatcaaacaaaaaaaatttaaaaatacctttttagtatatatatgccattcacacaatatataaatatgttgatttggaaacaaagtagagttttggtttagaggttttgcatccattatttagaatctatttttgtagtgggtggctgtcaaattagtgttatagattcgactatatttatatattatatataggctcacttttgcaaattgcaattaactttatgattaaaatgaaatttacgtgcatgaaatgaaatattaaaatgcggctgcgagtgggtactaattaatactcgaccactaggtaattaattattaatttatctaagtttttattatataatgaatgaagtactgaagacaaactctttttatattttttttttatcattgaaattttaataatcattgatttaaaaaaaacaaaaaattaatgatcattcatgtgtggatagtgggtatataagtaaggaaataaattattcaaaaaaaaaaagtaaggaaataaattaatataaatagatgtttatctagaatatttaactaacttaagagaataaataaattcctccaaaaaaaaaaagagaataaataaataatatataatcttcttgtagtctgagttatttggcatggatatgatagatagataatgagtattaatgcaagatattgtggataaatattaactatttatattattaagtgaggacaacattacttttaattgtatttttactactacaaagttttaagaggtacattttagttgattaataaataattgatgccatataatgtagctaactaaaattttaattacaaccacatacggtactggttattttgtaataattgacatcataaggtgataaatttttaatacaattactacatgtaatgtcgattatttggaaataattgatgacatagagcacgcattagctgacgtgtgttccttatggcgttagttattactaggcgttagttattaccaaataactaacgccataggcagtgacgaaaccagaaatttaattgagtgagggcttgaataaatattaagtcaaaactaataaaaataatgataaatgtatctttcaaattttcatcttcaaca

SEQ ID NO: 115490 - DNA, 2107 bp, Cannabis sativa
ttttagaaagttcatgtttagggtgttaatcaagatacttgtgagtagatctaagatcctggtaaaataatttccagcacaaacatctagggatttaaactttaacctagggttttaggccccctatataaaggccttaacttgtagcctagaaacctaagttgaatctaagcctgaaacctgcctccaagctctaagtttttgataaactatctcttccttactccctctctcacacttctaccctagcatcatctcaacacttgagctttgccattattgattcataccttgttttcctaagggtgctatagcaaattttacctatagtgatttggatagtaataaccctcggtattaatacaactaaaaagggagtaggtaattacctgctatcaaaagggggcccaacctctataacaaatttgttatttattgtttttcattcttatttgtgcaagcacgtggcaatcatcagatctattcaaccctgctgccggttgatcactttttgggatcaacagaaactagcacttaaagcacagttgtagatatctaatcaggttttggaatgcctacaaaacctaatctagtttataaaaccacataaataaaaattatgagtgccaatactcatccaatccaacacctgattcaaaaaaaaaaattattagaaaagtacacaaggaataaatattctgtaacaaactgtactaaaaatatagtaagttgacatagttgacataggttattagttttcttttttttaaattgactaaaaatatatacatatacatatacataaatatttaaattaaatagagatctaacaattaaaacttatataactaaattaacataatgaaagaaagcgtgtgcttgaagctgggtgctgggaccacgataaacatttgggaggatcttggggtcccttctggaaataacctcctacctatgttgtctggttcacagcgagagggcttcctctttatgatggatctcatccttcctaatggggggtaggacctatacaagctaaacttgttgtatgatagtgagattgttcaaaatattgttaatcgggttaaacgtagtggcggggatactgataagtcattttagactaaggagaatcatgaaaagtttacaacaaagtcggcctattttgttcaagctctaaaaatagtaccgaaggtcaatctccccttccctttggtataagctctaaaattttaaaattcacaaaatacataatttttggtggtgaattttataaattttactccttattaaaatagttatttgattaacatttaatattggagatctctttcgcccgttgtatggagtagaaaatatattgatggagcacctgaatctgaactgtcctattgtgtacaacctatggaggtcctacctatgagttatttttctttattccagttagggataagttagttatttttctggtttttctgttattttggttacttagttgctactcacttttgcctatatatatgtacattttctctctgtacaattcgtaagatacatttcaataaaactcttcttctcaaaatgctctgttcctaatataatatcagataaaataatttgaagcttccagtagtcaacttccagcttcataattcaagatcttccctccacaatcatggtgcgcacacgggccaccagttctgctaccacttctgattatccttccagagtcgaagctcccattgctcctccaccatcaaaccattctgctgacaacccttctcgaacaaatcttcctcctctttctgttcttcatcatccaaatccagtcaacagaccagcctatgaagatgtttgatctctatactacatcaccacggctgatcatcccagtttatctcttattactctggtcctttctgacaaaaatttccaaccatggaaaagagacttcaagctctccatgggaccaagaaataggggtaatcataaaatccagaaaaccgaaaaaaccgtttaaaccgacctaccgaacaccgttagaaccgaaaccgacaaaaccaaaaaccgaaaaaaccgctatcggttaaaaccgccattaaacggt

SEQ ID NO: 115491 - DNA, 1395 bp, Cannabis sativa
attttcggtatgataacttttattaaatttttaatttattttaatcaagtgtacgctcaaaatcaacaaaatcaaggatttgggaaaagagtaaaaggaagaaattaaaaaataatatacatatatatatatatatataggagaagaaacaactagtttaattattaaaacagaaaagtactagttgagctctttaccattatggggcttggaatagaaatgtgacccggcagtggaatacctcgcgtaacacttggccaagaacatatcaccataaactgcttgaccacaatcgtttttgagccgtccgatggcgtcagacacacaatcttggcactctccaaagctcaagtctcccacacattgggccacgccttggacctcacccgacccaccaacccggtacggcccaccagaaccagcgagggagcccaggacagcatctcttcggcccagcccgtcggcgtcataaccttcggagggcccacatttctttaacaccaccgtcttatcctccaccccaaggaaagttgcgttgtcgtacttgacgtaacaaccctggagctgaatcgcagcaccacatgtctgcgtgcacagcccgcctagttggcttactgcacgtgcgacgcaggtggcgcagtccggcatggcgaggtcgcctcggcattggaagaggccgtacacgacgtcgtgggagctggagccagtgacggtgaagttgttgtacgaggcgtatgtagccgagttgacgagggaggtcaggagcgagttgatgttggactcgtacgccgagtccggctcatacttttgctgtgtgcaaccaccgaagacgaagccgtcagtggaggaagaagaggagaaagaaggcctagtgagacagaggtggactaaggtgactagtagtggaagaacaagagaacttctactgcctcttgacaacatgttttgagtgggttagcttcttttctttgtagagagagagagagagagagcgagagagaaggagagatagagagagttatggccttatgttggagctgggagaaatgtgcaccactattattggtagcttaatagggactacaaaacattttattatattttgttttctgcgattattcttttttatatttaactgctttctacgaacttttcttttctttctattttaatttatttattgcctttacaattgtaaagaaaaaaaaaattatatatctaatgttggtgtatatctaggtcaatcaaaatgttaataaaagcactttgtgttaaagtaaaaggtaaacggatcgttctgtacaaagctgccaatgcttctagtatgtatgcattatctttttaaattaattacttggaactagcttaagtggccataggtgggtgtgtgtcttg

SEQ ID NO: 115492 - DNA, 1458 bp, Cannabis sativa
actaaattactacttatgctacatgttatatgttagcaaattgtgtaaaaataattagtaaaaatgatgggcatattgattgttcagagtgaatttttgtgaacgaattcgagaaatgaatcatttttatcatgaaaaattgggcaacaaaattttataaaccttccaataagttataaagagaggatatttttattttatttttttggaaaagaaatatatacatgcgtatatatatttattaacatagattatatttgggtccaaaagcttagatgaacccaaaagaaagacaaaagaaaaagaatgtttggaacatcatgattaccttgacaatatttgacaaaatcaacaaattataataaattttgagtggacaaataaaatttacataaaattccacatctgactaccaaagataatattcaaaagtaatcctgatcagctgagtcatgactaagtagtaattaataatagtgactaattatgactatcacagccagcctagcccagactcatatttctacatatttgtcttcgaataaataatctatagataaaaacaatacaatatccaaagttgataaaaaagaaaaaaatcaaagcttaaataaataaaaatatcacaaagtttgtgatggtaagcaagtttagagcaatttcaaccactatcaatgtgagtggtggtgaattgaaatctgaaacaagcttaaacttttggtaaagacacatccctttcatcaaaattgggacttataaatttcaaattacagactcaatatttacataaaataatttattattattattataaaaaagaaaagagagagagagagagaagagcagcagacaaggggtccccaaaggtgtcgagaaagaattggacatgaagtgaggtgtttttgtgacaaaaggcagaaaaggagagtgagttgaagcctattggtcccctctaatgtcttctttaaaagacaataactcattgcaagagaatccaaactctcattaatgctcttttaatccattgatgaagaatgttcttacttcttacccaaccaaaacaaaacacatttcctagctcatatatattattcttgaggtaactaattaattaattagtgtcagtacttagtactagtacttcaaatttaattatttattattattttattttagtgtactatgcaatcactgatggctaattaagatgatggagaaaaaaaaaataagtacatgtttggtattataattaaaaattattttttatttttaaaaataaaatttattttttgaaaacaatttagtttgtttaaccttatttttttaaaacacttttcagaaaataaagttatataaaacaagaattttgaaaatgttgttttttgttttaaaaaccaattcacttttggttaatattatttttaaaaacactaaccaaatatgatttgtgttttaaaa

SEQ ID NO: 115493 - DNA, 1215 bp, Cannabis sativa
  modified_base (1180)..(1186): a, c, t, g, unknown or other
gccaacgaattacaaggtgccacttcatagtggtgctagcaatgctctttttcatatcccatcaaggggtccatactccatactctatactcataataattaatggaagacaaaagagattgagctatgtaccttcatcaatttcaactattcgcctaactgaggaatcttcctttcttctactgaagaaagaacaacaactcatgaccagcttcttctattgattgtgattgtgaatcctgtcaaaagtaaaacaaaatctataatcccaagtgattaaaaaacaattccatgttaaaacttagaatatgaaaagtgagataacaatgcattacaaatcacacagatcatcaaataatttcagttctgggtctgattgtcttgtttgttttcatatcaaaaaagtatagccaaaactcatacctagaaaaccattaaaaatcaaaactttcaacaaacccaacaaacaaaacacccagattttcaaagcccaaccccaaattttgaaattaccaaaaatcaaacaaaccccaagttcaaacaactttattttttagatataagagattagagaactgggtcaaaattcaagaagtataactcaccaaatgaaaatttgtatgtgagattgaagaagaagaagaagatgatgatgatgatcaaaacttgaaaaaggtttaatctttggatgaattctgtgctgctgctgctgcttctttctacctagttcattctaaatccaaagtcaagactttgaatttatggtcctcctccccctcctactacttctctccaaatctataaatatatatatgtaaaagcatagctgtcttttgttttctttgttaaaaaaaaaaagaactcttgaaaattcaaaattagtgttatgagttaatgtgtggtttaatgatagggattataaaccgttaataactactattctatattacttaaataacagacaattaataaaacattattaaaagctgaacaagttgggagttattatagtctctctctctctctctagacttaaaatgaacatgaatgattaggttggttggtatgattttcatttcatgatgaattgaaaaatctcaactagttgggcaagccttaaatagatttattttttgggaaaagggaaactgaagttaaaatgagaaatgctaaagggcannnnnnntgcctagcaccttcctatgtgtcaatatc

SEQ ID NO: 115494 - DNA, 2958 bp, Cannabis sativa
taccttatacagtttactccagggtgcatggtaaggaagtcaccaatctcagatcctttcccagtgacacagctaataaggcctttgggaaaaccagctaagtgaaaacagtgcaccatgtggagacatgacacagcacccttcaaaaagaaaaaatgagttaatatatatctgtcacaagtgagttgggaagttggtcaaagtaatcacaaaatccattaacatggtatgttgttattacctgagttgggggcttgagcacaagggagtttccagctataagagcaggagcaatttttgagacagcaaggttgacagggtagttaaatggtggaatagctaataccacaccaagaggaatctgcaaatcaaattgaaatattaaatcttataaaattgttttttttttttttttaatttggttgcaacataaaatctagtagcataaaaaaattaaccacaaaaacatggttttcagtgacttgagatattgacacttgacaagggataaaaagaggaggacaataagccaaagcaaatatattaataaaaattcagttacaataaacatgacgtaaaagtagttttctttttttttttcattagtgctcatctttggccaacagaaattattattatctatatgacccacttcagaaaagttctacagaacaatttgcttaagcttgcgtcaataaatctacttctgcatggctcaaatcagtagaggggtggcatatctccacttgaacttttaatattaccatttaattcctttttaaaaattaaaagtttaattttgtgaatatttttatattatttttcttctttattatgtttttttttttaataattaatttttattatttcttcatttttaagtttactttcatctctaattttttttggctccctctgaacaaaatttttgagtctgcaccgagctcagataaatatataaatacacacatcatatgggtccatcttctcttgtcttccaagaagtgctataacagaataacattacttgcactaaaaaaagaaaaatattaaagaatgtgtaacaatataaatataatttaatattaaattttacttattttattttaataaatattataaaaaaatcactaaataattatagtacaacaagtgtctcatactcatagcaatatttcccaaacacattatctttagtcaaattaaagtaaatagataagtagatataccttggaagtgagacaatacttggtcctctcatttcctggaaaactgtcagaaaccaaaaacttcccttctcccaaaatcctaaccccttcttctgcacaatatgacaccagatctccagacctcacaaccttcagaaaaaaaatcccaaaacattgcatcaatcaccttgagaaaaccctcaattatgcattaaaacataaatagtaatagtttaaaaacacacacacacacatagtacacacctcagtaacagcatctttggctggtttagcaatttccttaacaagacactctgcaattggagctttgtgttccttgagaatagcagccgctttatgaagaagctcagctcgtttccaaagaggagtctttgcccatgatttttgagctgattttgctatctccataaccttgttcacttcctcttgtgtacaagctattataaacaaccatatacacacagattatatatgcattaaaaaaaccaaagaaatctaaacaatcaaacttagtgattatgataatatcttatcaccttgaaccttgtattgggtctttctagtagtggggttaataatagcaacacttttagtagaagaagattttttccactctccatcacagtagtacttgtacacatctccctcaattacatctgcaaaaactccagtcccagccataatttctcaaccaaaaaaacaagaaaagacagaatttttcttccttcacaaactaaaatgaaaacaacccagttttgtttttggtgtaaaagttctggtgatgagactttgaagagtgaagaatgaaagaagagaggagatgagagtaagagtgactggtgtgagtttggtttggtttttgggagaagagatttaatgggactgtttttggggtgttatataagattaagatgagccacactttgagtagcttgaggctaatatgggaccaaaacaagacaaggttggttagatataggtggtctaaagcttgccaagtatgcttttcattactcttctttttctcttgttttgtttgtgaactccattaacatctacaaattcatagtgaatataggttgttggccttggttataacggagggaatgaatgagattagttgatgagaaaataaaatgatgactagtaaaatatgcagttgcaaaaaaatgtttagtcttgggattttattttttcttttactagaactcttagcaaaaaaagaaaacacttgtaactaattatatatagaaagggtattgttacgaggcgatattgagttacataaatagtgatattacacctcacaagaatgatagacaccatgaatattctttaacatttctcatataaaaaatgttcatttttggttaagttattttgttatttattttaatgttatttttgggaaatttatttttggttaaggttatttataatgtttatatatttttcttctaatgaagttaataatgggatgatttaaattatttgcaccatatttaatattttttataaatccaaattatatataaaaatataggattttttttttaattttttcatacagttgcaattttttttagttgattggtttgaaacggattttaattaaaatgtgttttattataagagtactgttttagagtactaaagtatttagcatatctataacataacggcttataattggttagcagttctctatatttttattaaattaaaataa

SEQ ID NO: 115495 - DNA, 3799 bp, Cannabis sativa
  modified_base (27)..(30): a, c, t, g, unknown or other
actaatcagattgtaaagagttttatnnnnggcataaaacctaacagaaagatccaaggctaaagtcaaaattggtaaaggtgacttcatggaagcagtcggcaaaggcaccattactattgacactaaaaaagcaagagatacatcattgatgtactctcggtacctaatatcaatcaaaacctacatagtgtacgccaaatgattgaaaaaggatactctttgtattttgaaggagattcttactcaatctatgtaagcaagataaatcttttcaaattgcaaagctaaaaaatgaaagaaaacagatattttcatatacaatggagatttacaagtagtgtggagatgcaagcacaaacagatgaatcatggctttggcatagaaggttcagtcacttcaactttcatgggctaaaatcctcaagcaaaagaatatgatgcgagacctcccaaaaattaaggagatcaacacagtttgtgaaggatgcatgcttgggaaataacatcgataacctttcccatccggcaaaacttggagagccaaaaagccactggagttggtccatacaaacgtctatggggcaatgcgctccatcaaatgaccaaaataggtacttcattctcttcattgatgactttactagaatgacatgagtttattttatgctatgaaagtcgcaagtctttgatatttttaaaaaattcaaatcctgtgtcgaaaaacaaagcggtcactacatcaagacaactagaagtgatagaggcaaagaatacacttttaatgaattcaacaagttctgtgaagatgaagggatggagcaccaactcacgactggatatgcactagaactaaatgacatatctgaaaggaaaaacaaaattgttatggaggcagtagagccatgctactaaagaaaggtctcctaaaacgattttaggaagagggagtaagcactgtagtatacttgctcaacagatgtccaaccaaaaacatgtagaataatacgtcgatcgaagcttggagcggacgtaagccattactaaagcatctcaaagtcttcagctgcatatgctactctcacattccaaaagaaaaaaagaggaagcttgacgagaagtccgagaaaggaattttcttaggctatagtactcaatcaaaaggttatcgagtctatagcttagaaataaacaagcttataatcaactaagatgtagaatttgacgaggatgccatatacaattgggagatacaagaagttaaaagaaagataatcaatatttctttgctgccaagataagaacatgaacaaaatgatgtcccattcaatctaccatggagaatcaacctgcacaagtcataggatccccaccaaggcgaataagaccggttattgagatctatgagacatgcaacgtacttatggagccagaaagttttgaagcagctcaacaacaagaagtatggagacaagccatgaatgaaaagataaaaattattgaaaagaatgagacttgggagcttagagatcggccacaagacaaagaaactataggaatcaagtgggtctataagacaaagctaaatgcagatggttctatccaaaagcataaagcaagattagttgcgaaaggatactcacaacaatacagagtcgaatacaatgaaaaatttgctctggttgcccgcttcgacacaataagggcattgataactctagccgcataaaagaaatggaagattttttaactcgatgttaaatcggcatttcttaatagctttctcgaagaagaaatatacgtagaacaacctcaatgattcatggtacaatacaggaagataaagttctcaagttgaaaaaggccttgtatggcttaaaattaacaagctttgcgagcctggtacaatagaatcgaccattacttcactaaacaagaattcaggaggagcagaagtgagccaacactatacataaaaacacaaggtatgaatgatacactaattatctctttttatgttgatgatctcatctacgcaagcaataatgagaagatgataaagaagtttaaagaagacatgataaaaaattttgagatgactgacttgggcttaatgcactaattccttgggattgaagtaactcaaaaagaagatgtgatcttcatctcacaaaaaaagtatacagagacactattgaagaaattcaaaatagaaggatgcaagattgtatatatcaactctattagacaacaacaaagctctcaagaaagaagatggctcaccaaaagctaatgaatcaaaattttaaagtctaattggcagcttactctatcttactgctacaagaccagacataatgtacacagttagtcttttatcaagattcatgcatgatccaagtcaagttcactatggaataaccaagtgaattcttaaatacttagaagaaacaaactctacgaaatatggtacggagttacaagtgacttaaaacttgttggctacatagatagtgactgggtaggatccatagacaacatgaaaagtacgtcaggatatgtcttcacacttggatcgggaatattttcttgggcatcaaagaagcaagcaactattgcgcaatatcatcaacaaaagcagagtacattgcagcagcaatgactacaagccaaggtatatggcttaaaagaattctcgaagacatgggagaattacaagaagaagctataatgatttactgcgatagcaaatcaactatagcaatggcaaagaatctcgtattcacagcaagacaaagtatatagcatcaagtaccactttattagagaaacagaagctaacaaagaaataaaactcaagcactacaagattgaagaacagttagcagatattatcacaaagacgataccaaaaggaatattcgagctgctacgagacatgatcaaagctaccgaaatgtgtaccaaagaggagtattagaaattgttacatatttctacacaatttagtctagaaatttctatgcatttgtagaaaaaattatctaagaacttaagtaatttctagattagattaagtctagaatgtactaattatgttgaactctaaaaacatatagatgtgttgggatataattcctcctagtaaaagaaggatcgatatagaagaaataattcacaactattatttatagttataattctttctaactataaagtgtaatgtaaggagtgagtaactataaatactcccattaaagttctaaattgtaatcaagcttaaaaactaaatcaagtcacctactaaacatactacctgttcttctatttgcctatatacaactattttctctcatacaattctctcaaccattctctactatatacacaaccaacatcaccactttactatattatcttcacaaccattaaacacgtatttacttatttaaatttaaactaatataaatttattctcagaccatcaattaatacaaatacatattaaagtgagaaaaaaatgtgttatgaatgagacactccatgatattaataaacatttcgacagtttgatatgcatattatataaaagtttgaggttgacatcaacttaaaaacgggagaaattgaaatatttttgtttgagaaatggtttcaattaacttcctcaatttcgaatgaaacaaggcagtcctagcctgtcatatatataaatatatttatatatatatatatgggtaaataccattttggatcccgtgttttgcaaaagttacagattggaccttgtgttttgtta

SEQ ID NO: 115496 - DNA, 1981 bp, Cannabis sativa
gttaaaccaagaaatgtcgttagataggcacttttaatatataaagatattgatatgatagggccacttgtatattgcactatattataacacacttacacatgacatattccatctcaactatatttaaattttattttattaatattaatcaatttaagtaaatccaacaaaagaaaaaacaattaagaacataataaacaaatatagtaaaccctcaaaagagaaagttggatgaataccttagagtaattaatgtgttattatggttaataatataagaaatttattgataaaaaaattatacttataattttgttaaacaaaattaactaaaagtattcaatctgttattattttcttaaaaaaaaaataaaaaactaaattggggaaacttgaagtgcatttaagctttataaaaaactaatagtagtaatgtatagttgcacaatcgaataaaattatttggcattattgcaaagagggaagggcataaggaggactgccggcccagcccaaaagcccacctttttccaaaagcccacaatcaaatattcttatttatttatttgtttttgggattatttcaaaaaaaaaaaaatacaaaaacaacaaaaaaaaattaagaaaatatagttgtacagattttttttaaccgttttaaagattttatttatataaaatacgttattttaatgtatttttatgttttacttttattattttgttactattttttataatttttttatgttatttttattaattttttatgtctttatagaaaatcctaaaaatagataaaaaataacttgtaaattaataataataataagattatattttcaattggcctattctactcattttatccccccccccaaaaaaaaaatccgtcactactaaaattttatttgataacatatgtttgctatcataaaattaatctacacttttgcttctttttttttctttacaacaagcaaaaaaagatgcaaatggccaatgatatctagctatatcaaaaacttgtgttttttttactacttttctagattgataaatcatcattacttattgtctttggaacaaatagaagatccaaataatgtgttaatttgagcaagtttagtcaaaaacacttccaaattaactccaatagaactaggcttcacaatgtcaatgcttccccaactttgacaactcaactcatcatctaacaatgatgacgataacttcttcttactctctttttcgttttcatgatcactaacagaactgcaccattctccagtgacaaaaccctttcgagttcggttgagaatggtgacatcgatcttgtctagcactggatcatttgcttcaaacggtcttgcaaaagctgatgttccggtgctagacatgagttggtcaaaatgtgagatggtgaggagttgggagatctcaaatgttgaatcccaaagtgtgtaacttaggtcatcgttgagtattgtggtatttttgaataaatttgagttgcatagaagtgtgtggaagtaggactcaagagggtatatcacattgcttatgtacattagtaatcttcttggtaaattgtcccatccttggatacaatactccataaattctcttgttaaaatcacccaaggagaacctatttgatttgatggaccaccaaaaaataaaaataataataagattatatgctaaacaaagagaaaatgaatgaatatattagtgacctcattaagctaacataaataatatttatatgataatggggatgttttaaattatctactacatatatttctacaaaaagcataaaaagctattaaattttcaaaaatcatactaagtgtaaatttttctatatatgactctcttgtaaatgttaccaaacaaatagggtctaataaattaaaagtcaaaaataaagaaacatatggaacatcaaatgcaatatgatttgtttttttgg

SEQ ID NO: 115497 - DNA, 2690 bp, Cannabis sativa
ggatagcatgtgtactgcagtggtagctaggaaccagggtggtttgggatcatacttccctgttagacttctctgatgctttgtgtggggaagcggcgatctgctgctcgactctaacgtctgcgaatgaagtcgggtctaagtttattattgtggagagtgactcgagggtagttatcaatgcgttcaatgggaaggagtctcattgggcaattgagaactacatctcattttgtaataaatcctctttcttgtttgttagttgcattttctctagtattagtagattttataattttgctacacacaatgtggttaagtgagcgtttacccacaggagatttggttttattctgttatcttctatcccagacaacttatattacaatgaccgtgaggtctaactttttctatttatataaggataaattttcgttaaaaaaaaaaattaaatcagaatagtacacaataataaaatcataatgtcttctaacaatttatttttgctccctaccaaacatagtataacgaaaagggcaaacatttgttatgtttgtggcgaaacatgacagcttacttttctttggatttgaaaataaaatttgaagaagggagaagaggtcctaaagtctaataatcaaatactaataatgaagcagttaattattgtattatatatttatatatgtccaccaccactgctactgacactgtgtacttactgtatgtaatcagaaaaacaaaggaaaaagcatggtatgagacgtcatcactctctcttcttattcattattaataataattatagtactaaggtggaataattaaggtctttcttattttattttgctttcttaataattggattttgggatctagtttgattgcatcaatcatattctttgagttgacgtaaataaaaagatgggcatattgctttcccactttatatgcaacttcaattataacttcgagcctcccattattttctcatcttaaatgcaaatgctataatttctacatattataatatgcagcagtagcttattattatagtatatgatacgataacccttttccattacttatattatacacatgataatgtatcattgtattccaatattggacttacaaaaatgggttgggcttcataatctgaaatgctagtatcataaataatttgattggatggtttgggttggtccaaaataaacatcatcaaactttgatctattctaatgggggcccttcctaggctactaatagccttttttttttttttccttaaagaaggaaattaatatattatagatgaagcaagtcaggccataaggccattgcaatttgcaaataagaaaaattacaccccataaaagagtgcacaaggctcttacaatgagcaatataattttcaattttccatcttcttgacaactttaataattatgtcgaaattactctccacatgattgcaagtttttcttcgcagcaagttctaactccaatagacaagatgcaacctccccactaggagcaatagaaaacacaattaccgacccagagcaccttccctagatcatatttatcaagccaccactgttaacatcattgccccttctctaacggccacatcgcaattaagtttaatccagtccacgagcggaggagtctacttaaagacagtaggagaaggttgtgaaacagacaagagagtgaccttactctatataataaaagcaatagaatcaatataataatatatattatatagatagttattatgtaccttgtcatttctcgatctcaagatagtgtcaattacgataaatgtatataaaaacacatcgttaacattcacgtttctcaacttcaaactccaaataaatttgactcaatcctataatctagtccctgattcctaaacaggaatgagaccccaaggagaaactttccacacatgagaagccatgttacaatgaaaaaaaaggtgtaccatagtttcttcctctctcccacaaattgggcaagaagagtcttcaatgtgcatctgttctctaaggatggatcgaattggaagcgtattggaaagaatgctccaccatagcactttatgttgctcataagaatagttctaagttttgagttaattagatcacatttaatgaatttggacccaacccaatccaatcgatccaatctaattatttatatattaaattttgtcaactgattcaatccaattatttattagatgttagattttttaactaatccaatctaatcaaattgactcaactgattcgaatatcagttcaaaccattagatgcattgactagttatctattgaattggatcgaatttattcaatttttttaatctactatttaggttaaattcattgaaaagaaaatgataaaataagctcaatttaaaacttatttttcatagtgataaaacacaaaaatcacaaatatatataataatattagtccaacttaacttttatgatcacataatcaaaatataccaatataatacaagtttaatttaatttatatgataatgctatcataatccatatacgtcttagcatatatctataacctctataaaaatgagaataattttgggctttccactaagtaaattactcaattagcctttactagatattaaattacaagaa

SEQ ID NO: 115498 - DNA, 2617 bp, Cannabis sativa
tgtagttgtgtgatgccagatgtaacagtcattggagggaaaaaaactcaggggaatggagataattctatccacatcaatcggttgaaaatgttcatttaggagaggtaaattccatttccgctcttctgtgatgaagtatgaaactgaaacatttggaggacctatgtagctcactggtttgaagttgttgtggcctggtaaccacttatcgacaccagccagtacattatgaccatttcctattttgtatcgcaaaccctcaactagtagatcacgtccccaatgtattccttgccaggtaagtgaaggtgagtgtccaagtcgtgcttccaaaaaagtgttgttagagaagtatctatgcttgagtagtaggctgagaagagagtttggcatttcaaagattctccaagcttgctttgcaaggagagcttgattgaagtgtacaaaggagcgaaaacccattccaccttcaaatttcgacttacaaagcaatttccaacttctccaatgaatcttagtaccgtccttgttagaaccccaccaaaagttagccatcatagattctaattgactacaaaaagtaggcggtaaacagaaacaactcattgcataagttggaatagattggaccacgactttcaatagcacttcctttccaccaactgaaaaaagcctttcattccaagcatgtagcttttgccatatccgttctttaacatcactaaacatttccttcttgtcacgttctgaaaaagcaggtaacccaaggtaacgctcatgacattcgcttattggcattcccagagtatgattgaaaaagtccattgctgcttgtgaagtattaggtgagaaggacataactgacttggttgtgttcaattactgacccgacgcttggtggtaaatgtctaaaacttttttgatgacaattgcagaactgtttgtagcttcacaaaaaggagactatcatccgcaaagagcagatgtgagattgaaggagcatggcacgtcaactgtaagcctcgaaggttctgagctgattcttcactttgtagtagtctaaataagccttctattcagattaagaacaagtatggggataatggatctccttgacgaagccccctagtaggcttgacatgaccaacttcttcaccattgagcatgaatgagaaactagtagagtttaagcaattcatgatcaatgagacccaattttggtgaaaacccatcttccgcatgacctcttgaatatagaaccactcaaccctatcaaatgctttgctcgtgtctaatttaagtgctgaatagccctttcgtccccttgttctatgtttcaagtgatgtatcagttcaaatgccacaaggatattgtcagtgattagtcgattggagagaaaagcgctttgagtttcagaaatcacagtgggaaggatatccttaaatcggagagcaagatcttggagatgattttgtagatgacattgcagagacttataggccgaaaatcacccatgccacgaggagtctttgtctttggaattagagtaatgagggattgagtaatggtgtccatactacaaccatcatttaaaattcctaagacaactttggtaactacatctccaacaatggaccagtaattgtggtaaaacattaccgacatcccatcacaacctggacttttatctggattaattattttaagagcattgtagacctcatcacatgtaaaaggcttaatgagagactcattcatatctggtgtaatcgttgttggattggttgcaagaatgtgactcaaagcttcagaatcgactgctgatgtagaaaacaaatcaccaaaataggatgtgatgatatcagtcataccttgttttgagcagacaacattaccattactatcaactaaagatttgatggtgttatgttgtttttatgaagaagcataggcatgaaagaatttagtattttgatcaccgttttgcatccaatccacacgtgaacgctgctgccagtacttctcttcttgagccaacaagtcatctagaacattttcatgatgctttagttcttccatagcagccggagttctagtagtagtgttatttagatttgatatttgtttctgcaccttcgagatctgtttaaaattaccaaatttttgtcgatgccactgttgtagcgaatcagtacagcatttgatatattcactgaaagttgcagccgcattttctgtagtagcctgcttccaatgctgctgaatcaagtttgctgcttcttcttcttgtaaccataatttttcgaacctgaatcttgttttttgatgatgttgctggtgtgttgaagagggttgcaaaacttgtactgagatcaccctatggtcagagccatagtagtcaaggtgctgagttgttagtggttggaaagtgtcacagcagatggtgttaacgaaacaccaatcaagccaaatttttattgtgtctgccgtgagccttcctttgatccaggtgaatggatcaccatcatagggttgctcaataaggttacaatgatcaagaacacttctaaatttgtccatttgtgcctcattacgcaaagccccccccccccc

SEQ ID NO: 115499 - DNA, 1827 bp, Cannabis sativa
tgtcgtacatcacagattacaatccgtgaaagtacaataacgggataaaatcatatccctacaattataaataaactataaaacaactaaacaatagttttttaataaagagtattctgtaaataaaaaaattcaaagcgtaaatatatatattttttattttgacgtagttttgtaattttttcatagatttagtttattatgctgtaaaattttcttaataaaataataacatcttattaggaaaaaaaaattaattcataattctcctatttttaagatgcaattttcgtcaaaaatacaaatgataacttgaaatataaacgacaatgaacatcttttttaggtgatttaatcgttaataaagcttactatacaagtcatagttagcttgcaaacttcaaattctcttggagtttgtagtttgcacatattgatttactttttacagtaattactcaactaggcagccagaagggagggatcattgatgaagtttaagatatattagagttgaataaccaactaatgtggtgagttactagataaatattagacaatattatttcacatgaattaaatttaaaaatattgagtggtgtataaaaatatgaactactcatcataattgattttaaaatagaacctcataatctcttattctgtttagagaagtatttgctcgagagcctctatatataagtaatgttcgaccatgagaaatggcaaaaacgccaagcagtgaaccaccacttgacattttgttagttgtagggaaggaattccaaggtaactatcgaaatcattagaggcaggtggacatgcgtatccgttctcaccgagcataacatgtttggatttccattgtatggattcgggacattctttgcaaagaatcccttactcgggtgctaagagcagttctagtggaaggaatttaggagttgttcactaataaagtggatcttaatttaactttttagctaaaataaaaaatcttataaatagtcaaaagtaacaacggtactttattttatttgttatttgttatttatttaaattgtgatcgaatacttttaattaaatatagtatttaaaaaatttaaacaatcattaaatgtggtcttgcattgaagatgccctaaatttggacttgtaaagttcaagtgttatgtacatggagtatggatgcccaattgatttgtggttggacaccaatcctctttttcacgtgtcaaaaaatacgagcaagtagaagattttttaaccgcaaaacaatgctggaatggaaggtaaaatatgaagtaatagtttaataatcatttttaggatacgtagatgggttggacttggagagacttgagtaggtggtttagacttcaaatcactattcgtagtcatatagtgagtctgtacatatcttatttcttttttttatctaaatataacttgctacatttctcattttctattagccattttggaagttttgtgccatcatcttatacaattgattatatacatgcaggcctagccactaaccaaaattgtttatttccatcattagtctgactttttcttttttggacattgggggattttaaattcagacagatagcgcctatatatgaccacacttttactgacttgcctcaagtgctatctctcaatgttattctttttatatttaatttttcattgattttccattgataatttgatcgtctttgcctatcgattgaaaacaaccctactagataacgacaactttgaatatgtggtaatacaatatgttaatttcatttttggtatatttaattgacaaaa

SEQ ID NO: 115500 - DNA, 2958 bp, Cannabis sativa
cataaggacttagcaaatagtttggatgataagttgcttgatccacgtgtccttgtctggttggtccacatatattgggcaaaatcaggggcaacaggttgaaaaattatcttctctaacaatcattcattcctttgcgcaactctaattaatagttgctgaaaacctcagtcaatagaaatgattggagattagagcctaacgaggttgttttatcttttttttttagggtggtggtgggatctttaatcatcttattgttgtttatgttttttattgtgttttatttttaatcttgttatgcagtttaggattttttgttgttttataatcacttcagggtttttatttatgcatgttcagtgtcagaatcaagttggaattttgttcattgctctctaactttgtgaaattttatatgttttgttattctgtatctgctattcgatatttagtattatatatttggtttttatattttttaatgattatttttctgaattgatttctaatgtatttagggtaaggggaaattttccaagctgaagatttcctctcacgatgttatagaagtccccactagcaaaataattattgaggtaaagtatttttttgtgtgtgattttatttggctattttattttagtagttttactattgttttataattattttagatgatttttatgttattgttccaggattagagtcttaaatacttacatttcggttggaataatggttgttttccaattattctatggatgattggttgttttttacggtagctgctgagaatgatgagctttcccttattttggcgtagatgcaatataaaagttgaaaattagcttgggacagtaaaaatgtaacattcttcgtatttcagtatttttgtaaactttctcccattttacaatatatatgtaagttccaaaaaacaaaaaaaagatcgacagaaaagaatctggagtttataagttcgcaaaccaccacttgagctttgcttgggctgttgtcggcgggaaggagctctgccaggcttgccatcattggcggaaagtgagagcaaagagggagattggtggagtgcgagagagactagatggagagagagattggtggagtgcgagagagactagatggagagagagagagagagattggtgcagtgagagaaatgagaagatggtgatgggtgcaacaaaagaaaatggagaagatgacgatggttttaggaatttcgggaagaagatgaaaaataaaaggagaaaaataggtttttttaattatttaaataattataataatgtggactaatgaaaatctgtcatgtgtacacttgtatacatagtgtcatgaaaaagaaaaggattaaaaaaagggtttaacctaaaatttagttatactaaacttaaagtaaattgcagcataacccctaatattgtcaccttactagcaattatccccaaaaaatctaaattttggtggtaaaacttcctaaactcaagttctgttagtatttagtattttctatctatttttgacagttaattgccaagttggatgtccatgtgtacataggatattgttcacgtggacacaatgtacacatgacataatattattggcccacgtaaataaatatttaaaaataaaacaaaaaaaacaaattttaaatacaaaaattaaactgaaaaaataaataaataaataaataaataaactgtaatttccttcagaaactcccaaaccgaagctttcccctttcctctcacttgatctcacctctttctctttgttcagtgtcacacacgcacggttaggccacgatggtcatcctccggtcgacgatgatcgaaacggaccacagcagtgtgctcacaacctttgaaaacctcttaccccgactccctctcgtcactctcatctctctcggctgtgcacgaatggagctaactccaaccaccgtgggtccaaataaatgccatagatggctttgcagagttccgaaaaccctagatccataactcttgaaggtccctcactgttctgttgccgtcaaaaaggatcgtcagagctacgagttttgggtctaatctgggcacttccgagtctcaacgagccaaacggatggcaggtatatgttttcatcataaaaggtttccaaatctcgaagctttttttctcttgattttccttttcttttctaccgttcatctccgtagttggagccctccattgaaatcgacgtgctccattgccggccttggcttaatcaaataaagcttaagacattgtgagtctccattctcttttatttattttttatgtttttttaataagaatttttggttttcaaggttagattttgatttcagagatgagaatttttggtgggtttgcccatgctattggattcgaggtggagtttcaatagaggaccaaggtgtagtttcgatggaggaccaatgtggagtttaggaggattgaggtaggtggagcttcgaaggtggaatggtaaaaccagaaaagaaaaagaaacaagagaaagaggaaaaaaaaaagagagaaatttgttttttaaatgattttttttaattaatttatttttatttatgtttaaatatttatttacgtgggccaataatataatgctatgtgtatattgtgtccacgtagataatatcttatgcacacatagacatctaacttgacagttaacagtcaaaaaatagtttaaaactgccatgtcttcttctttttctaaatgatactgcagtaccctaaaagatcttcttgtctcttttgtttgtttggtcaaagttacacacaatagtattaaagacgcaatgggttgagctagtttcttatgctgttttgagtactttgcaggtgaagataaactttgtttatccaagacaagattgcctaactcgaagtcgggttgggtaatta

SEQ ID NO: 115501 - DNA, 1055 bp, Cannabis sativa
tgggtttcttggcttttgcagcggccgccatcgtggaatggcctgttggggctctcgtctactgctttaagcacgtcaagggtcgccgcatcatggctcatcctgctactgttgtttaccccaaggtcaatagggccattcctatttgatcatcatcacatatctatttatatatatttaaataactgtactgtctttattcctttcttttatattcaaaaccttatctaaaggtacgttttcttttagatatcaaacaaaacgtaaaagatgtttcgatttatatttagttggcaatgtgaacttggtctatatctattgtattttgcatgttcggtgtatttcttttcctcagcatatatatatcctttttcattttcttttactttctgagatactaaagtatatatccaccataaattacaaatttactcaggcatgttcgagattttatatatgaatggagtggaaagataaattaaaaataaattataattgtgaaaataatacaactattaaaataaaagattgattattacaatacatacactatatattatatataaaaagaaataaatatacactcactcagatcgctatgatttaaataaagtgttatatttttacattttaaataaagtattatatttttacatttttcatgaaaataactgtgagaatttctgaataagatatttagtataaagtttagatttaatgagaataaaaaatataaattgaaattaaatttaaatactaagtaatttgtattaattaaattttatattttaagatgaaaataatgaaaaaatatctagtaaaaacaaaagagttttaccataatatggagcattgtctgcctttaatgattgctttgtggcagttgagttagttattttctcttttaacttctttcatcagttttcttcttacttttcatccatctccacttccatgcttctttgcactttcttgatcttctattgtttccataaccgtatcttccatactccttattttcctctgctcccaaatctcaatggattctttcctaa

SEQ ID NO: 115502 - DNA, 1006 bp, Cannabis sativa
cgcaccgcgaagaatttcaaaccgtattttttttgcagtgtgggcggtttgagcagtttgagcagtttgatgtacacccctaatatatatgcgattgagtagcacaatgatgtttttagaaaactaccacaatactaagggaattgtgacaaaagggaccctaagaagttctacaagtaccacaaagacattagccacactatccttaaatgttggttcctccaagatgagatcaatgaattagtcaaatgaggaaagttttaaaaaatggagaagccaatccccaagccgatgaggcgaacaatttaggagatgtgagtggtaccagagcccctcacaacattttaactattataggggggtccacacgttggtggagactccaagaaagcacaagagcgctacataaaggaggctaagaaaaaactcctgacaaatgtgaataatataagtgaacgactagagaaattgtttaaggagtgtgatgacatcacattcatggaaagtgatgtgagatgggtacaccatccacatgccgatgctttggtggtggttgacaatattggtggcgacaatgtacatcaaatacttgttgacaatggaacttctatcaaccttttgaatccgcaagccttcaagcatatggggttacataaaaaagacctaagaccagttacatcaagtatctacagttttaccgaagatataattgagttaaaaggaataataaagttaccaataatgttagggacgacacctgttaccaccaagtcgatggccgactttatagtaattgataggggtattcgcagtgggggtggtatattttttaactattttttcaaaccaacccgcacatgcggtttttcaaattttccaaactgcacccgcaccgcaaaaataaaaaaactgtagaaatcgcatcgcaaaaaatggtgtggtgcggtcgcggtttgaaattcttcgcggtgcggtcgcggtttgaatttttcctaaatcgcgcagt

SEQ ID NO: 115503 - DNA, 1187 bp, Cannabis sativa
  modified_base (658)..(659): a, c, t, g, unknown or other
ttttttttttttttgaagtaaatctttctaacctggcatttccactgaaatgagaattggtaaaagacagtaccatattgttaccaaaccagtactggtgccactatttttgtggaaaattagtagaaccccttagcccaagctagctaacctgacctccacatacatatataacaataacgcagaaatagtattttggatgctgaaatgaatggaaccatagaatttcatcaacagaatgcattgcgttaattatatatgtagtcagttagtagtttctgatgatgatcgcaatatcatggatcttacaattagtacacgtattgccatttcaaaatgctatagctatagtttattattatatacttgcagtgcaagaatatatataaatatatatatagagacataattatattgaggtagaatagtaataataataatcttacaggttatatatatgtggaaaaaacttaaagcagtattctcagcaagcttatcttaattttaagctattgatcatttctttggaagtagacgctttaatcttgtttctggtagcccaatgaatagttcagtctccacatctgaactgggattactttctgtgttgttcaagtcctctatctgcttatggttattattattattattgttattnntattattattattattatttgatgcttgaaccattggtttaataccatactgcaaaaaaaatcaaacaaacaaaaatgattagatgtgccaaattaaactgtacaagtaaatatgtacatattattaaatggtaatggtaattagtaatagaaaggctcatgtatatagaaaggtccttttaattggaatttataatgaccacaaattctattcaactggagcataataatgcaaataattataattataaacaaccagttacctaccttctcagaaagccttgcattttcagatgttagggctttttcctgaattttattagaatataaaatggacacaagaaaacataatgtttagattcttctttcggtgaaaaaataaataaataaaagaaaaaggcaagcactaataaaatatacaacaactcatattaatttcatattttctccattaattctttattattccacaagcaaattactaaatcattatctcgagatagagtgaaaagaataaacatatatata

SEQ ID NO: 115504 - DNA, 1362 bp, Cannabis sativa
attattcttattattattactacttctaagtaactaccctttataatatttttatctatatattgtacttatatttttcttttttgaaaaatgaagttatcattcaaataataattaaacaaaaatgattgaaaaaaaaaacatcaaaacaagttttttatccactctaaatgtatacacaactaattcataatatgtcatgaaataaggatattcaggaaaattagtgagtaaacttgtgaaatcaaataatgatcgtacatcagtgtaacatagagaaagcaaagcttaatacaaattacaatcaatcttaaagtgtaaatgtagacaaaacaacaagtaactacttcagactcgcatctataaattctgcttgaatgattgtaagagcccctacaaaaatattatagcaaaaataagagtccaataaactaaaatatatactacaaattaataaatctaaattgatttgataaagaggaatataaaaacttatctcatcaacaggatatctgaatcttcattaaaaaaattaggatgggcaataaatctttaacattatcacaacatcaaacttttttttataactaataaaatttaacattaacaaaacacaaccgaacaataacaatatatgatttataatataacattttgatgtgtgtgtgttatgtatgcattttttcttttgggtgttggttcgataattgtattgaagataagaaggttgtttttttggttagcttgattttcctttgataatcgggcctctaatcatacctttgctggggaggaatttttcaaaatgtgcgatcctctcctttcaacatttttttgtgcacgagtagactatttaggttcttcttttgtgggtaatttgcctttcttcatttttgctttctttgtacatcatgcaatttcccatcccggttacggtgagtttggtgcctaatactcagcccaaataatgattgggcttctgtatctagaaggagcctattctcagtaattaaagggatccatattttaaatctttatttttgggatttaatttggaggtgctaactgccgaatttcgttcctgtcttcaaatgaacgacgcattgcgggagcttcattcacagagtttttacgcctgtgatcaagaaattaattctttgtaattagaagaaaatagaatagtgtgttcgggaacccaaaagagttcttctaagaaagaggaaattgtcgcagcctcagtggtcccgctagtatacatttttcatggtatggtccttatgtgggatcatgtgcaccgagctattagatgggaagctgacaactgtagtcgtccatgaggtgcgtgttgggttttgtgcccta

SEQ ID NO: 115505 - DNA, 1440 bp, Cannabis sativa
ttttttatccaaatcaatttgtatgatccaattcaatatgcttaatttaatcctatttgcataatcaatataatcaaatttgcaaaaagccaatacttacattgaaaaatttaaaattcacacaaattgaatattgattcacatgttaactatctaatccacaattattaatatatttatataatgaatattaaaaaaaacagtaatttaacatggtagtataatataaaatttgcactacaactttttttttcagatatcttggattcttggtctttatatattagtttagcttttttgctcaacataaaatgtcttattagagactttcatattggaatgaatctgtgcttttttttttagaacaaaaaaagaaagaaagaaatgagatcatctcctatacaaaatatagataatacaattatacactctttgttttttttttacaacttttttttttggtacagaacaaaaaaaaaatgaatacactataatataatcatcacaaaattaagcatgattgttttcaaattaatgacaattaaatgtgaaattttcttatgaataaatttgagagaagggcttctagtggttatttaaaattcatatatattaaataatattaattgtaatgaatgctaaaataggcataatttcatgttgtattttaataataatattattatttaagtttgtgtatttaattaataaatatagtactctttatgcctggtaataaatagtgtcttataataatattttttgaatgacaaaaaaaaaaaatattaatgtatttatttaatattaatgtatttatttaataaatattgttcttttatgtgtagatcttcattacaaaaatagggagatttcttagaagttggatcttgtggggatttattttgtcatcctttttaaatacttgaagaaaataattaccattctattttttttttttatttttgaaatgaaaccgatacaggttaaaataacaaaggtaacaaagttacgcaaccagaggagaattttcttccatctataacaattcattgtctatcctaagggcatgcagagataccccaggaaaactagacaataaaaccataatatcaggaaaagaaaacctcaaaactgagagttgtcacttccgatccactaatagaacacctgcaaaataaagagaaaaaaaattaatacataataaatatttaataaaaaaatgaaatttcccttacaaataaaataaaaaataaaatatgaaaatttataaaaatagtcacatagaattctctgatatagatacttatctatttttcatctccattgctaacggttactacactatatttgatgtgttattattagaccaaactgaccttacaaaattaaaactatccatataataactttacaaaccaaaactagtcatgttagccttac

SEQ ID NO: 115506 - DNA, 811 bp, Cannabis sativa
aactactgctcaacgatttataggtccctaagtcacaacatacgtaaaactgataagtgatacactaaatcactttttgaggacttaaagttaaagctagaagtttccctatcgataaatagtgtgacaatactctaaatatcgagaaaacaccaaaaataaggctcctaaaactgctaaaccggcaaactgtatttctaaaatggtaaactatcttttgggtcctgcctgggaaactggttaaccatttctccgaaatggttaaccgtttctctgcaaaaaaacccaaaaaattttgaaactcttcaaaacttccccacatcgaaccaaactctccacaatattaattatgcaataaactagcttaggatttactgaaaatcccactaaactaaaggataattatcacctttatccttactcaacaataagaaaatctagtacttaggggtcaaatgattcaaagtcataatcccgaataattctgaaatttaaaacgtctaactatactaccctgctatttctaaggtatcaaatcatatctaagtgactttataggccaaacgtcatcttctatatattgttaccgaacatataaaatatgaaaatcataaaatttcatacatatcataatcaatacacctaaaatttaaatatatgtccataattacaaaaataataattaaattgaatatactcccatatcaaaaataacaataaaaaataataataatgttacaaataatatattaatacttatatatatttataaaactaaccttaccaacaccgttaaatttaacggaatatt

SEQ ID NO: 115507 - DNA, 1447 bp, Cannabis sativa
aagcatcaaaattttagcaaggtgctttcgatgaggtgataaggtggagtctctttctcatgcacttttttcttgttcttttgctacgaattgttgaaatattacaaattggaccatatagttgcactttgaagatgctttattaagaatgttaagtgagccgtctaatatcgatgttgttgttgtgtacgtatcgatctgtaatttgaacaaaataaatacaagcaacgggaagctacacatgatcctactagtgttcgtgactcacctggagctttgctatgagtatcaggagagctctttttggtctcttgataaatgccttttcaaggacccaaatagatcagtggttcatcctctcaaagtggctgcttcggctaataatcaagatatgggtcccagtcaaagtgatcaacgtggggttcaaatatggaagctacatgatgttggatcctttaaactaaatgttgaagcgattgcttgtgttggacgtgggctcattgtgataggtgctacaatacgtaatcatcagcatggcaggatgattcgatctctgtaatttagttagtgcacttcccaaactccttatacagcagagttgattgcttgcgtggaggctctaaaatggtgttatcggaagagcataatagtggcatttctgtggaatgtggattatcttattgttggtgatatccaacattttctgtctagatgcaatgttggctcttgcctctttgttcctcgtgaggagaatcaagtggcccatatataagaaaaacttgatattcatgatgataaattgttgttatccattgatgataattctcattgtattattgtccattgggtagatgttgatatggtttcttaatttataaagaacaccctttcagataaaaaaagatgcatgttgatctataaaagcttaaaaagaaactgaggtaatagcaacataccttgatcattggatagtcatctggacatacaacgtagccaccaaccaccattacatacattccaattttccaaggttgaacacgagagtctgcaaggggagagagttggataaggccagtgccatcatcgaggagcaagtgatcgccattgttagagacagagacgagaacaccctgtaaccaagcacgttggaagagaatgccacctatactcattgttttctgtgaaggtgatgagatctcatgtgccttctttagatgctcgcaaaaaacctttagtgctgctaattcataattcatctctctccctatcaaaaaacatataacaaaacataaatgagattcttagaccatacattaaaaaatttaagttcgggctttttgcacatttagagctcgtttagaacgttgtattgagtcttattgtattgtattatatatcatattttatataatactatgttaaactttaatttatactaaaatattat

SEQ ID NO: 115508 - DNA, 2962 bp, Cannabis sativa
atgtcaaagttcggagaataaaaatcttaattacttatataatatattacgtaaattaataaaagtgtattgttattcatactcttttaatcgcatatgttgatttttctagtacaacagaaaaaaaaattaatctaatgaataataacataaaaataattattttattataataatattaaagctatatcaattttttttttaatcatatatatttttttaaaaaaaaataataagtaacatttaaataaaattaaatatgttgatatttatattttagaaatggaaaaaaaatgagaaaaagatatttagggatgcatttgttttttttttccctaagatcgtggcccctgaatttgaatacacatttaaataagatattatttctgaatttgaatattaaaatatttaaactgttttttttttttttaatatctgaatgtacttccttatgtttttaattacataatattaattatattttatttaaaaaacttatgatcaaattatataaatagaaaaacataatttttttctaaaaaaacatagataaatgaaaaaaatataattaatatattagttttgagaaattttatgtttcaaatattccaaatacgtttaagtttcatataaataagcaaagatataattatttattaaaaagtaaacaaataatatttaaattatatacaaatacaaataagtacttataattaatatttgattttgattgtatgatgacaaaatactaatataaactatgcaatattgtataagatatcaaatcatgacaattttttttaaaatgtatagtattatttaaaaagtgggtaatgacttgatttgatgttgcatcaaagaaaaaaaatcatgtacatgtgttttagagaataattcgaattattgattctgaatctactgatcatgtgacttaattacagtatcttgaatcgtgagaagacattgaaatggcaagataaagctaagagttggagatggagagtttgtttcaatcaaagcaataggaaaatcccataaataataaacttttacttttagaaaatgtattttacattccaaaatttagtaaaaatttaatttccatacctatgctacaagtaaataatttgtattgactttcacgagttgtaatatatatctattttatttaatgaattacaattgtgtgtagcacgtatatgagcttaatttatgttttgtaatcaaatgaactctttaaattgaataataaatttatcaaagtagaaaaacctagatcagaaaaacgtctaaaaattgatcatgacaacataacatatttatggcacttaagacttggccacattagattcgagaggtttccaagacctacaaatgatggacccttaaagggaacttactcttggtgagttatgtatctttgaatcttgcttgaaagacaagatgaccaagcgacctttcttcgctaaaggagaaaaagccaaagaaacacttggtattgtacatttaaatgcctgtgggcttctaaatgtcaaagttaagggtagttttgagtacttcgttacttttattgatgataactttagatataaaatacatttagttacaaaaaattgtaatttttgtgactattacatttagtgtgactaataccttttagccacaacaacaatgataatttataattatttttaattttgtaatttcaatagaaattttattgtggataaaaataaaaaaaaaaattatagtgcatgctcatcttttatcgaaaataaagatttaaaaatcttaaaagaatcaatattgaaattgaagcatatggtgttttattatatttataattaaggtagcttaattaatcatcatcatcatcatcatcaaaacaaagttaacggttaagcaacatcaaaagatcagttggtgtgttttatgaagtggccgaccatttttaatattacatatatattaaattaaaatatgtaaatttaatattgaattgtgcatgcatgtgacatctagctacttgtagtattgcaaataaaaacaacaaaaaaaacattaattaaatataaaatctatattgaattgtgatagtcttttctagtggtgatttggagtacgtcctatacaaatatattacgtagtgtacatggccatataatataattaataatatattatattcctttctacaatatatatgatcaaagttatacttttgttgttgctagtcatgatgagtagtctagtatggagtattagtacaagtagtaatttgttgatcataacaatcttctatccagccgagattgctgtgcatggagaggtatcactcttgatcttcattctgatgatgagtataagggttctctgggtggtgaacttggtccttctttgcttgaattacaatatttgaggtacctccatttcggtaacaataattttactcaaattcctgagtttatcaattctttaagtagacttacatatctcagctttgacttcaatcctattatgtcgatttctatttcctaactttggaaccttaccagtttgcaagttctcaaactatataacacttataagggaaatttgaggcaaaagtcctcaaaaaattcaatttgatacggataagttcccaaagtcgaaaaatagcggcaaaaaggtgacatttttcgtgaatccattagtcttttttttaactgagtcgttactcatttaaaaatgccatgtgttgaaattttattgatccaaattatattttaattaaaataattttaaaaaacaaaatatattatttaaaaatcataaaataaataatttttttatctttttttatctttttcttttttttcttattcaccttcttcatcgtcttcatccagacacaccctcaacccccaccaacccaccctacctccacccccacccccaaccagatccctaccccctacgacga

SEQ ID NO: 115509 - DNA, 1461 bp, Cannabis sativa
ctcaaacagtaaaattgaatgaaagacaaaagtccttacatttaacaatctcaatagttcgggggaatttctaacggcccaaaaagttcaggggtcacaatttagtacatgtcaaaattcaagggaaaaaattactaattagccttaattttatttacatgtaagcagttttgcttaagactatacataaaatgttattttttattcacttaatttaagagaaatgctaaacacactttattaatgtaattaagtattgagtctcatataatttgaaaaaataatttttaaagaatatcactaatctcataagacgttacctatacaaaatattggacacttttagcaccgaatagttaatttaatatgcaagataatgtggagcattcaatgatttgaaactcctgattggtttggttcaagttgttgattgtgttgggaagtggtggtttgattattctctcgagtgagttgttgctcattatatgtggtaagggatttggacatgaattgggagatgttaagaggtttcaaattatataagtcaagaacattaatgtaatctacggtatttaacactttttgacatattattttacataattttttttgacataaaattgcaaatttattaaattagcattctgaatacaaaatagtttgaagattaagaggaataaaaaaccccctaaatgctacgatcccagttgaggatcgtgcgtgcctagcaacaaagtaggtcgtacgatttgttgatcgtctgacaaaacgtaactgaacatcaggtagagaggataataaatttctacattcattaacaactgtaagtgttattattttgtgtggcaaattatgtaaatactttgtgcttagtattactgtcttaatatttgtcatttttcatctaagttgtgtttagttgcatctgatctctttagatctgtaattgttaccatgtcagttttctgggtgtttgtcagcttgtgccagctgtccttttctggtttgttagttagtcgatttatttctcttcaggatatatatatatatatattctgttgttttagttttctaactaactctcttctgttagaatcattttcttgattcttgctctgctagggcaaaatattcttttgtttcttgtttggtttatatgcagatggaaattccacgagtcttcaagaggttgaagaaggagattgaatctgcttgatctgaggggagttcaaagtaaactgctggaggttcttcagctgtgtggatgcaaggtgttcttgtgttcttagatctaaatgagtttaggtctcaaaacttgagtgtgttcaagtgttaggtaacattgtgcaaaagttatttcagattacattgtttgatttgtaaaatcagaactggtgtttgtaattgatttgattttatagtggatgttactttacccggttcaagggaacccaagcacta

SEQ ID NO: 115510 - DNA, 2217 bp, Cannabis sativa
ttacaatctggcttgccgcacctcttttgtaaagagtgatgtcccatttgtaaatgggctttctctgctgcctgattagtctcaatgcttgcaagaggctttcttgaacaactgctcctggaaatatgggattggtctaatttattataagtatagtggctaccgcagctatatttgtggggatgaccacctctctggtcgcagctggtgcgattggtaggtttattgggttagtcgagttatttaaatttttagtgccttgatcgcccatatggggatcatgaggctcctcattatcattgtgatttattggcgtttgggatcgcaccctaaatattttgttgaggtgatcatgtagatcacctctgtgcacatgatatctccctccacgccttgtttgtatacatcctgacttggtacaaactctaagaggctactataactggaggatgaatgagaatcaccttcatttacctctgttcgtggttgagccttactctacgagttttatcgctcaaggtcctcctcctacgctctttcctctctccacccaggctgacgacccgtgtcctgagtgataggctacttagtcatcacatatatttcaatatatgcgcgacttgtataaaattctctcagtcctgcttgtctttggctatgcaacgcataacatgcgactagaacctgtgaaggtcgcatcatctttcaagttcagatcaagcgaggctaatcccttgagagttattatttaatagttcatcctttcctcggagattggatccacatgtcattttttttaagaaaatgctctcaagtttctaggcaaaacatttacatctatagcaattacaaaattatactcatctagttaaatctaatagccccctctattcttgagtgttgaggatgacttggaagattatggtgtgaactcttcaacaagctcttggattggatgttcgataaattaatacgaaaagatagcgaggagacgttgatagttacaacagatattgtttcttttcatgtagcttagattaatctatatatattattttgagatccttgggattatagttcatactggattaaataattttaataaaatctgcttcaacttttctaaccatggtatggaccataaaaaccaacaaggtagacgtcgggaaggtcttggcatcttcaaatgttattgaaataacaaggaatcaacgcaactttaaacattgttatttccacaaacaccaccaaactggtgacaaggaaacctcgtcaaccaagctatggttgaataatcaaaagttttaggcgagatataaaataacttgcagagaagtaatggagaagatgaaatagaaattttgtattactctttatgtgtcttgcttacaatgattttctgatcccctctcaagtcataaaaaggggtatttataggttgtaatggcctgaaatacactagtggtcccccaaagggacaagctgacattctgatcctgctggttgcaagtgtaggaggtagtctttcactttgtattgttgtttggtgtcaagtagtcccaatgggtaggattcatggttgtagtgtactccttgtcaagacgttagaggttgcaaatgtggcgcctccactacttttcgtctcgccgttttgagactttacagacagcattgtagtacccacgtgcactatccttttggctctttgtccaacaacttaccaagtgttggtcatctcattgagggacattacgatttgttacaatgattaattgtagtgaatgtacatcgagtggactcgtagcttgcctaccaagtggctttcgtggcatgcatgtcgaatggctcttgtagctctcatgttaggtggccccttgtagctcgcatgtcgagtggcccttgtagcacgcatgtcgagtggcttgtgagtcatgcatgtcgagtgaccctcgtgagccatgcatgccgagtggccctcgtgagaatgcatgttgactggctcgtgcagcattcatgtcgagtggccctcgtgaacatgcatgttgagttgctagtgagccatgcatgtcgagtagcttgtgggccatgcctgccgagtggtcctcgtgagcatccttgctaagtgacttgcgttgttgggttttgtgccctaaataaaaccatttacaatctgattagttatcaatataagaaatttaaagtgatttatgtttgcat

SEQ ID NO: 115511 - DNA, 1537 bp, Cannabis sativa
cagcttgtcaaaatggctcttattaagcctaacaagagtactattacatttacaatgtaacattttacattgagacacaatatattatgaatgtgaatcaagtttgatttcatataaactttaacaaagtttgctataatttaatttcatataaagagtgcgataataactataataataatgataaagaattataaaatataaagtaacctctatatattaactatcaataagaatacaaagagtgctacaataataatatataatagagaagtttttaagagaaacatgatatattttctaaaaaaaagttcactcaacagactttcaatgacttttatacaattgaagtgttttctttttcatacaatttatccaaaggtcgtctattgcaatgaaatttacatctccctcattattcaatttggtattcatgaaacgcaataatgttatataaatatatatattaaaatttttaaaattcttaataatgatacttgtcactcatatattactcataaaagaaatggaaaatctgcaaagaaaaaaataatgttaacatcaaatcataagcgcattattaaaaatccttttataaggaatatcaaatattctttttattacaaaagtatgatcatgtaatattatatataaatttggttgggcatgtaattagttatagaatatctcaataaaaattgatggaattatcaccactttattgtaatttgtgagccattaaaagttcacttaaaatacaactccatttcttaagataaatcttgagtcacctatgttagccacatgaaaaaaaaaagattcaattttcaatgcatatgcttagaaaaatattatcacaggtttggaaacaaaaaacaaaacaactaaagttaaaaacgtaaaaaacaacatataaaatattagtgagtgaagaaattcttaaccaaaaaaaaataaaggaccaaacttgagatatcacattatataaccatttttctttattagaaactgtgttggattggatatcataatctgatgttgctcgaaaaaaataggatgcgagttagaaaaaaaaaaaaacgcttatgttatatataagggggcatgagagtttatttgtaattaagtattagcattattaatattaattataataattgataaaagaaaggaaaacgacgattaacaaaatgtgagttagtcatttcacattcttgatgctttttattaacggttacaaaattgttttgatttctcatttaataataatataaagaaactatttgtattctttgacagttataaattaatataataaattttaaaactattttataggtaattaaaataaaagaatagactaaatataaaattaaatctttaaaaataggagtaaatttaaaaaattaagagaagagaaattagaaaaaaatgacatataaatgccacatcaactctcctaaaactctactttatatctattttctatataaagtgtgcctatataaccgaattcttggtttatgagaaattcgtg

SEQ ID NO: 115512 - DNA, 1742 bp, Cannabis sativa
tttttactaaagatatataggattagtcatgctctttctatgtgtttctatttagtaaaaataatatttatgtttaatcttttattgcattattgcatgatgtataatgtcatttttgagttctacataagactaaatcatttcttttatttgcaagaacttgtatactcaaaaatataatgaactttaatgttaaatcatttatcaactttgtgaatcaagggtataaatagctaaacaggcatatggataattcttgaagccttcgtttcttttactattgactacacctttatttactttgttttaatatttattatcaaatcaaaaatcacaaaatcatttgttactattatcactatttattaaccttttgtgtttatttttctactaacgcttttgtccataatcacctccctgtggaatcgaccacccgatctatactacaaccaccgctagtggaagtcacattttgggcgttaaaacatcagctaccaaggtcagccatcctctcaatgacattacaatggctggccagcttcatacaacagtcttatggctggccagccctcaataacacaaatgtgtgagcaaagttaaatgtgcaacttattgaggccaactcctaaaggttgataaagatagcctcttctgctcgttgtcactaaactcttagagctcattatccatagtaggtaaggctctctccagacacatgcgaactgcccccatggctctctgccccatgaccgactctgctcctcggttgggcctctatgcacccttgcccgaaggccaattcctcgttaatagagggtcaacgttcatgggctgcccaactggcccaggcccaagaggaggaggaagagaagacttcgcagtgtcaccagagcgggtgttctaggccaccttggcttacgggtgacccaaaggctcatttgaaggtcctccaactagacctttgagtctaaaagacatatctgcaaaaagaaagtaacaaagtcataatacaagttacaattattcaatgtaaggaaaaaaatataaaagatggtgcaatcaactatcaaataccatcatcctcagaagaggagtcatctgaatcaacagcggtcgacttgccctttcctttagatgtaggcaaggggcgagtagcatccccaacagtgcccccgtgagccaaacgccggcaaaaggccctctctcttttctccaaatcctgggatatttaggataaaggtacatcatcatccattttgggaccgtgcccaccacctgagctggcctccttagcaaatctaaaccacctgatgggccctcgaccctcaaaactctacatgtaggggaatacaggccgtatgtctaaaagttggctacagtggtcaaacacagtatattcttcctccctacgaggagggccatgatgtggttcgctctatccctcatctctagggtagggatggagtgcttttaggtaggcactagctgaaaatagtggtgtcaaacttccttgatatccaaggcaatgaagtaattctaggcatatctccttacttttgacaaaagtgtactgttggtgtcacccaaccactagtagccgatctggctgacgtagaagtaccccattcagttctacttcgaagaacactttaagtcaaaataatatccaatctcatacggagtaggctggtaaagaacaaacatcactaaaaggtacttgataccttttggggtgatttgtg

SEQ ID NO: 115513 - DNA, 2412 bp, Cannabis sativa
  modified_base (27)..(46): a, c, t, g, unknown or other
agctcccaaaatagaagttgtaagaannnnnnnnnnnnnnnnnnnntaacgagtgaatcaaagaactcaatgaacacaaatagcagttcgtgtatgcacgggattcaggctgatctactaatgattatcattgtgatatgaataactcttttatggtaaacgacacgttaataaaagatgtttattacatatcggtccaatcatgcataatctaatgatacacagtacctttactacatgtccatctacatacgtgatccgaatcaaaatcacacacactagaagtataatgtacagtaaaccgtacttagttgttccatattaaagattcccaatactttaatacactaccgacttgttttattcatatcacataattttaattttcttgtacattcttacaagattataccttcttcatatgaataagaattttttaaatatttaataattatactcttataattaatatatcatttatcttataattttatttcatatattctctaatgtaatattaattacttgcttttaggacaaccaaaaatacagggtcgactggctcagtctgctcggcgttacaaccagcagcaccttcagtagtcttcccagccagcttcaccttctcgaactccttagcatcttcctcaactttcagttgttagcaccttttgagcaataaaacacgatcctcttccttcatgtagccatagttgttgcgcagattagacttctaaaattcgtaaaagatctctgtgccgaatgatttataatattccatgtcttcagcatgggcctccgcctcccttgttaaggctttctccttttcgattaaggctttgtctttggtagctaaggctttatcctctgaggctaagggttgatccttggtagctatttcttaggttaggtctttaattttttgctcaaggttttggagaagcatcaaaagagtgtccctctcttcaaccagtttattagcccgtttggtttttgcctccaagtcagcctctaacttgtcaaccttgggcatatcagacaactgttattgcaagttgtcaaccttcttgtttgcctcgtacaaggcattttcctgctcctgggcctagccttgaactttctttagttcagtaccatctgaagtggcctgggcgaccattaccttagcacaggagtagacatacccgacttggagatttagctgagaaaaataagtaagacaaaatgctttgtaagccatatcccaagcaaagtattcaacggaaataaaaataccttagtgatctcttttagaaggttggctgttaggaactcccctggcagcatgttcgacccctttaaatgctcgttcatctcgaactgaactctatcgtggtagcatccgaccacatcctttgctttcctcatattgattctaataaaatttaaattagagatagggttacgaattctaggttgatcattcagtggcacatccactaaatctccaatgtgaaaatcatcttcttgtggattcaatctctcctgttcttgaggatcgatttcctcctattcttcattgttagtttcttccagtcttgcttgtaaactgtattaatttgtatcttgattcttgtggaaaaaccagctctgatacactgttagaatctgtagctcctaacactaaaaacaaaaatcaatacacaattgacatattattgtatttttgcaaatatttcaagcgtccacgaaacattggtaaaaatcaaaacaagaaaagtctaatagactcagtccaacccaattgctaaactaacaaaaaacctaaagtctaagtaaaactactcgaactccttgagattcaatctagaagcttcttcttcttttccaagagaaaaccctagggtttcaagcacaaaaaaaaaaaaaaaaaaaaaaatactaacacatcgcacacaatcacaatccaaaaatcaaatcacacataaattcaaggacaccatcatacactcacaacaacacaaatatatttagggttagagagaaacaaacagagaaaaaatgaagacacagagttgatctcagaggtcactctagaaatgagctacatctccgtcaagctctccttagagtagcttgatgtttcactattcaacatgtaaatacaagtgttttctttttagatttcaaatcacaatttcttttggttgataatttttttgattttctctttgtttttctttctcaatttcttactaatctctcttttcttttatgtctttgtatggggttacaactgagcttcgagtagcttctttctaacctagctcgcatgagataaaatggcttcaagtagttcttctcaacatggatctgtatatttataaattgtagaagtaggggtgttcacaaagtatccgatccaatccaatc

SEQ ID NO: 115514 - DNA, 2130 bp, Cannabis sativa
atctagatcttggtaaaatattcccaacaagtcttctcccataaactgcttggagaggttccaattaaacctaccatcaagaaacaaaaacttttaggggtcatttgtgccagatggaaagtcaggaacagagaaaagaaggaatggaataaaaatcaacaaaataccaaaaaccagaaggatttcgggcattataaatttttactagcacttctactgcaaaatgactaatttcaagagttcctaacatggaaaactaaatgaaaatcaacttacaatgcctaaatctaccaataatatcatattacacaataaaaaagatcccaatttcatttagagcaacacatgcaaataagacgtgtagcagtaaacccagaaaacacaatcaaaatacaagaaaatgaattgatacatacctgatagtggaagtgaaggcgccaagctgatcgtcgctgggtttggttgaggtagttaagcacacattttgcgaagatgacgagcaagggtgatcaacaaatcaatctctgcgttgaaatctagagtcacgacttcttctagtgtgaaacttttaatctctgggagttgacgatttggaaattctcgagccctaatccttaatagaataaagttcaacatcatgatctagattgatttgggctattttggctctgactttggttctaactcttaaagttgtagcgaaactcaaaatctataggctaaaagtttgaaattgggtaaaaagtggtgaatggagtcttctaagggtatgtatacccaaggtggcaatccttgtgaagaggatggaacggtccacgatcgtatctccaaaagcatgactacatccaatggttggggactccaatagtgaaagcatgccaatacaattaatgctctctagaatcaaggcgcaaatcaatgatgaatatgctatttttttaattttttgggccaaaaagtgaacaaccgttaaaatagaagttttcctagaaagcaactcctcagtatacgtgctcttccaccactagacaactgtcgcgtagacttatcacgtccaaagatggaagtcaccttccatgatcgaccaacacctagagaattatataatattacttctaatccttcacatgtccacactaatggaatggggcaagcttccaccatacaaaatattctagaggctttagggtaaaagttattcgtgcttccagcaagggacacgtggaattcaggtcagcatcaaaggtccacaaataggccccaaggatgacaatttgggccaaagccaagttacataggacctttcaagaatgtaccttagctttgtgatcaaatgatcttccgctagtgatagctcatattcaaaagcaactccagtatcatgatgccgaaagagtcagacaacgtgtccgtagaagactagtccagttttcctttttattcatgcaaataaataaggaaatagatgcttctcagatctcgataaaaagatcgtatcacgctaaaaggagaaactacctgaataaagatcaagcaattaattcacgattaatttcccacaattataggacacaattttgactaattcaaccgtatctaatctgcctaatcaacaaatcatctctttcgtgggctagacttcacaagacaacacaagttatgtaattcaatgtaaactcctcaatagaaggaaaaggaaaactaagtgtaattctcataacactataaatatccagtgaatccttcaaattaagggctgaaatctcctacaatattttctcaggaaaacttgagaacctacttttgttcccaaaggcttttttagcttaagttacataataacattaactcgtgaactaaagttcattaacgctccaaccacgcaaaattttttttgtgttgttcttactctttctcttttcattattttttttagttctaactatttataatttgttttctaaaaatctcggtaaacacacatgaactagatcaaatgagtttcttgttatctctcaaagttactagtaatttgacaacgtaatagcactcttgagaatgcaaaatttggtctcccaaatattgaatatgatctactatttgtagggaaaaggtgttggaaatatttta

SEQ ID NO: 115515 - DNA, 2334 bp, Cannabis sativa
  modified_base (2262)..(2272): a, c, t, g, unknown or other
tgagatactacttgattgcgtatacttgcgtagtaatcataaaattcgtaacatcatgcttcggaataacttcttttcatcttaaactatatacctccagtgtggagttgaaaatgtagagtggtcactcatggcttcccttgctatatgagttttgagttacatgtctcatcccatcatatatttgagttaagttgcttctcttactcgaatttgacacctgaatagagttaaagtctcttactcaagtttgatacttgaatagagttaaaggctcttgctctatattgacgtatgagcatagttatatcccaagagaagtcaaatcatcactgcctccttgaaagaaagatgtccaaaaccgctagacaatgggggcatacttgcccgaccgccatgatactatgatcatggtgtgaatagcttttcaaaattgtcaatataatggaagtgtatggctcaatgcaaaggatctttcttcatgattatacagaatttttgattatttctattcatgatgcttcgacttaatcgacgaataatgaaaaacaaaatctggataaataccaatagcttttatgggttataaaatactgatcgaaataaataattcttgcggtgcaaaatcaacaaattttttttagtgatagttatatgatttttcatttgagtatagttatatctatacccttcctccccctaagtaacaaggtttacttagtatcctttattacttatttttagagtttggcgaagtgactataattattttttaataactaattgtcttcattgactaaaaaatataaactaatagaaaaaaaatgcaaaaataaatatttgactaaacattgttattaatctagttgcttcttttcccatgcgtgtgacgcacacttatttgttgatgaagccactattcactagtgtgctactaacctcctctagggtagtggtcgtagcacaactactccctccacgggtggggtaagcccaggttatgacccgattggcctccttgtggatgcattggaaggttgagaattttgtactctggtaccattggttgttgtatattggcacctcgaggattgtatttccttttccttgcataatgagctaggggtctgttatggatgagtgtctctatttcgtcttttagattttgacactcattggtaatttgtcctaggtccttgtgatattgatagtattttgatgaatgtcttcgtgctcaatcacctttcaaggactctagtacagggaatggtacatggtgctcattttctacataaatagttttaagggactctgctagcttcatgtagatggtgtacatgggctagtagtggtcttgacctttgtttcttttacctttttgattctccccatcgcaaccttttctcttgttattttgtataaagttattggtgactagaggtttagttgttggcggttgtgacgaagcaacattagtggtggtagtacctggggtagtttgttctgaaggaatagagaggatgttggctgtccttgcctcctcaatgttgatgtactactagggtcttttaataaattcaactatggtaggggcactcatttcttgcgggctatcctatagtaaaaacccatgagttaaacctaccctgagttccataagtcttccactatcatccacatctctaaccttggcagctttcatgttaaaccttttgatgtagacttttaaactttcactaggttgttgattcacattggccaaggaggagaacttaggttttcgagactaggcggcacgaaaaatcttttttaaattcaatcgacaacttatcgcaagaaataatggaatgcttcttaaatttgttagtttaggtcttagtcgccccaattaaggtcaccgggaataacatgcactttaagtctccaactacctgactcactctcattattatattgaaataactaatatgaactctgggatctgtactcactcatattttgttgtgggtggcatctggaaacctagacgatatggtagtgtagagatatgtggtgaaaatggctcaagtttttcgtcttactcgtgcccccaaaatttttgttagtgtttaacaattgttgaatttgttgttctaatgtggtgagtctagggtcatttgtccatgaagccaagacgttgtgatcttctggtagaggagtaaccatattaaactgaggtgcatattccccctactgagaaggtattgttggaaattattttannnnnnnnnnngatctactcacaagtatgttgactaacaccctaaatatgaacttctaaagatcggaagagcg

SEQ ID NO: 115516 - DNA, 4705 bp, Cannabis sativa
gcaaaagttctaataccaacattgatttgtcaacccccttttgccaacacatcatgggtaaattctattttaccagcgcaataccaacttttggtagcacaaaaatatgttggcaaaagtgacatttcttgtagtgtcatatggcatcttcttaattatattttcctccatagaagacatggataatgtacttaatgggggctacacattcttcagcaagaggccagtgattatgaaggcatgagatcctgataccaatttcaggaagaaagacatacagaaggttcctatatggattcaaattgaaaacctgaaattgaaatactggggccaaaatactctgttcaagatagtagggcagattggagaccctatactggtggatgaaattaccaaacaaaggcagaaactcacttttccaagagtacttattgaggtttctatgaagcaagatctaccagagaagatagaatttgatcgatgaacatggatgcattgcttcagtggggattaagtacgaatggaagcccaccatatgcaaaaattttaatggcctgagacacaacactgatgattacaggaaaaaacaaggggttcaaaaacaacagcagtgggttgtgaaagacaaaaaagaagaagaaaagaaagggcctacagtgggttctgatgggtttcaactagttagcaaaggttggaaaccaaaggggaaagtgcagcacgaaagtaccagcacagagaatgcattcgacattctgcatgagcactcagaacaagatgatgctaatggtgtacagtcaggtttacaaagctcagaacaagatacgataggaagagggggagaacctcctctacaaaatggataaattactagcatggaatgtccgaggagccaacaaccaaaaaaaacaaagtttgatcaagcaattgattcattctcaaaatgttggtcttgttggtattcttgagacaagagtcaaggtttccaagcttggagccttgtactctaatgtttttcctggacggtgttttacgagtaacatagcttggcacaaaggagggagaatggtagtagcatggaaccccaatactttctgcatcaacataatcaaatgtacgagtcaactgatccatcttcaagtctccactatggatggtaagaattttcttgttacatttgtttacgctttcaatgatgaggatggtagaagggatctttggcgagatttaagctctcttactactcaagatgcttgggtagtttcgggagattttaatgatattttagaacaagaagaaagagttggtagtagggtgaaagaacacaatgtttagccttttcgagattgtgtttcctgctgtcaattggaagacattagaagctgtagaaaattctttacatggtgtaataagcaacatggaggtgatcgaatttattctaaactggatagagtaatggctaatatgaaatggatagatatcttcccaggagctgaagctattttcatgaatgaaggggtgttcgatcattcactagcccttattacttttcatcaactgtcacatattgggaagaagccatttagatacttcaaaatgtggagttcacttccacattatgcaaaccaagtgctgaatgtatggaagcagaattaccagggcacaaaaatgtaccaagttgttgctaaacttaaagccttaaaacctgtcttcaagggaatcaaccaagaagggtatactgagttacaggcaacagcaataaaagcacaggaagttatggaaacctgctaaaacaagctattcctggagcccttcaatcaggcattgcagattgaggaacttgaagccaggagcattttcactcaagctcacaagaactatcaaccttttcttcatcaaaaagctaaaactaattgggctagagatggagatgataatacgacaatctttcatgctagtattaaagcttgaagtaaccaaaatagaatctttttcatattggattctcaaggaaacaaaattgatgacccagtcaggataacagaggtattcttagactactataagcaacttcttggcacaagcaggataaatagaaggaaggtaatctctagtgtactaagcaatggtcccactgttacgagtcaacaaacagatatccacttgaagcctattacagatgaagaaataaaaaaggccatatttgccattccaagagctaaagcaccagggccagatggttactctagctatttcttccaagataattggaatttagttggagttgacatctgtgatatagtaagatcctttcttcattatgggaagattttaaaggaaatcaattgcattgctctcactatcattctaaaagtcagatgccccaacactccaggtgattttagacaaattgcatgttgcaatgtcgtctacaaagctgcaaccaaggtcatttattttagactaaagaatattcttcctgatattgtggctcaaaactaaggtggatttgtcaaaggaagattcactgcacacaacataatgatctgttaagacttagtcagacattatgggaggaaatcatctaaggctaattgcatgatcaaacttgatttgtaaaaagcctatgacactattgagtgggacttcctggaagaggttctaaggggtttgctctttccagatcaatttattattcttgtaatgaattgtgtcaaaactctaaaattctctctttttttcaatgaaaccttccatgggttctttgattcaaagagaggattaagacaaggtgatcccgtatcccttcttctctttgtcattagcatggagtatttgataagaattatgaacaaagtggactgcaaagaggattttgtatttcatgagagatatgatactttaaaactcaaccacctttgcagatgatgttttgcttttttgtagaggtgactataaaagcatcattcttttgctccaaagtttgaagctcttctcagccacctcatgtttacaacctaataaaaccaaatctgcaatattctgcggcaacatggcagaacaagaagttgttaaagtgttggatgcatcgggtttctcaaggcagcatgctccttttagatatcttggtgttcccatatgcactaagaaaatctcgaagcaggaatgcaatgttttgaagaaaaaaaatgacagcaagaatacgatcttggagcaccagaaacattttttttactggtagagtcgtgctcatcaattcagttctctcagcaatccactcttattggtgccagattctaaagctaccaaagaaggtaattcatgagattgaagctatatgtagggcctttctttggaaagggcaatacatgatgcaaggagcaggtttataattagcttgggataatgtctgccagtcaagatcagaaggtggttcaagcattaaaaaaattgcttaatggaattcaacagctcttttcaaatatgtgtgggctctagcaaacaaagaggacacctttgggttaaatggatacacaatgtgtatctcaaagaggaagattggtgggagtaccaagcacctagccatggaagctggtattggaagcaaatagtggcagcaaagaatcaagttagaacacaaactgatgcacattaatcctctcaaaccaggtatcgaatttcagatggttatgatatgatttgtcccattcaaaatagggtgtcttggtgcaatgaggtttggagaagattcaacatacccaaacacagttttatactgtggctagctatgcaaaatcggcttaagaccaaggacaaactacagaaatttcagattaatgatgctgcctacaatctgtgtttgcagtaggataagtcaattaagcatcttttttttcagatgcccttactcatagttttgtgtggagaaaataaaagaatggctctcatggaatgctcggaccactgacttgtctcagctgctcaagtggatccacaaagccaaaataagcaagtttaaaaagaaagtgttggcagcagctacaactcatctggtgtatacgatctggtttgtaagaaacgaccaattgtggaacaaacacataaaaaatagagatgtaattgtacaaagaattaaaaatagtgtcaagcatagagtagaattgttatggccaaaatagattggtcaacaaaatagaggttggttttaaaagctgtaaaaagttgtatttgagatattttgataaaaagatgctcttttattgtaatagattgtaaatgtttgttgaataataataaacttgctgatttatcaaaaaaaaatatacataattaaaataaaaactaaaaatataattaagtgattatctagttaataagtaggaaaatagtaaataaaaaataatatttattgtggtgtaaaatttattttatattatatttcgtgttaaatttaacataatttttatgtaataaatttagaccattttaaacactattcttagtattaacttaaactaaaatatgtatatacactaccattttttacacttttagcacccaaatttattttgtgcctcatatgtaggtatattaattatagaataattagcaaatttactccctgaacttatgtcactaccgacttgtggcccctaaaatatacgggttgttaaaaaatctccctaatatattaccactatattaatgt

SEQ ID NO: 115517 - DNA, 1177 bp, Cannabis sativa
gttttatctattttaggaatatagagaataacaaaataggaaatattaattttttaatatttaattgatgatttcaataataaaatactcattgtatgggtaaatacccattaaaagcataccctattatataaatacctatttaactttttgttgttgtggtttaacagatttgttatgttttttttttacataatatacacaattaacataaatttatagtactaaatatattttaaagagtaattttcttagtaaaggacattcaatcataatggatgagcattcctttacacatgccatttgtcatcaatatgtaccagtttagatacatacaatgcataagattaggggtggtatatgcctaccctaaaattttaatatttaacttttttatttatcatttagtccttttttaaaaaaaaattaaaaattataatttaattctacaaatatttttatattcatactctctctctctctcttgtatttttcttctatattatacattttttgtaaattaattttaattatgtcgtaatttttaaatttactccgcatctaattattttactctcgctgaacaaaatttttgagtccgcccctaaatgagcacaacagtgaaaattttcttaggtagcctatatttatcaaaaaaaattacgactcattttactttacttgttttaatttttacctctattttttatattttttaagatatacccatttttatggatgatgtccccattagattccttaagttaatgtaaattatatgatagatttgtgtagagagtgagggtatattagacaacccactcaaaaaagtagatttattttaataaaaagtagtataatggtatttttgattaatagatacaaaaaagatatatttttcaacttatccttatttattaagtctaacatattttaacttaaaatttataatgaaaaaatattagcaatagtattggacatcattagtactgatattaataataatactccagtctaactaggacgaagcctggactaaggtcatgagttatgcctgcgcttagagttcatccattcagatgctagaaaaaatatttttattttaaaattatatattttttaagttaatattattttagaccatgtgttttataaaaattactgattagaccttcta

SEQ ID NO: 115518 - DNA, 1348 bp, Cannabis sativa
tataaataagattactttgactccagtgaaatgaaagagaatttttctcattccaacaatcatggataagttggtagcaaatgggttccctcaaccaagcattctcaaaccgaaaatgcttaactccagtgaaaaaattacaaacagttggatccaaaaaaattggacagtgatcggacgacgaagcatgaagattaaaaagcttggcagataaaaaagtattaacccaagagatagaagctaaagctctatcaagtctaacctcagtccagtgtgatgttcctcttcctctttcccatgtgtacgggtgaccatggagatccaagtcaacaagattgcaatcggctagaacttggttgaacccttgaatcaacctttcaggatacggacgaccaccccatttatcgctttggtaggtaatgttgtttaaatctccaattaacacacaggaccaacttctttcttcagtaagaatacgaatatgattccaagtgtttgcacgatatcctctatatgcctctccatatatccccaccggtctccatcttggcataccagatattttagttaacatattgatatgcttttcagaaaaatcaattacttcaccctcttcattattttgccacaacatagcaagcccaccactatgaccacgggcctcaaccacaaataatccctcatagcccaaagacaaatgaaccctctctaatatatttttaccacaaagagtttcacaaagaaaaataaatttgggcttcttttcgaaaactaactccttcaagaactgtatagcccgagggttcccaagcccccggcagttccaactcaaggtactcatggctctcggcaagcctgagaatccagacccgccccaaacaagttttttgtgccaacttctccctctttttcaaaaataccatctaaattggagcccattgcattcagcccaattgaatttaatctttttctcttcaattcagaaatagttaactccccttcttctctctccagcgtgtccccaccaagttgattacccatattcatcacattattaacatcaatactctcctcaaaatcagggccaaacttttgcacaatcattggctcctgaatcccatgaatcactcccttcccacgattttggccattaacagaggttctgttgggttttgtgccataaataaaacccattttaatgtaatccgatttacttattaataaagatcaaaaataacattttatgttgcacggttcacataattaatatcatgattatatacatataatgtatgagttctatttaagtccagaacatatgaatttgttaatgattatagtgctgtca

SEQ ID NO: 115519 - DNA, 2674 bp, Cannabis sativa
cctacacgacgctcttccgatcttattccgcatttaattaatcacttaattaaataattaaattgggaatattaaaatacagaatttcagtattagattcattgagatgacttgttttgcattggattcgaactgtatcaaaccttagttgagaatgggcaccatttctggtgaatgattttttattttttataattttttctatgaaagtttgaacaaaatgtcgatttagcgcaaagaaatgaccaattcaataatggttcatcgcaaatgtactagttttcttcgcccaatagtttttggtcgaagaatcaatgttagttgcaacgaggcctctctaccaacggtgtccgatcacaacgagtcaccacccaccatcaactttgaaaaagggtaccaataactccaatcccatttcagtggaggagtacaacaggcaaacatcaaattctaaacactgagagtgaaaagggagagatcgagagggtcaatggcgagtttttggtggctggttgacaagatcaggactaggagtgggttaggttggggtgaatcgaggctggggggttgaagatgaaaaagatgaagaagaacaaagaagaaaagaaaaaaataataatttaagattttaaaattatttatttattttttaaaaaaaattaatattataattttgaccaataatacttcgacacctggaagtttttgaataattaaacggatcaattaaatttagaatcaacgactcgatgttggggactaatatgtatcaaagtaaattttttgataatttttaccgcaaattttcctaaaaataatacaataaaaaacataaataattagaaaaattatatatgtataaaaaaaaacgtattaaaaaaaaattagaatttaattctttttcacttactcgggtaaatttaaagtgtcaagtactataaaaagtgacatattattttttttgtgtatttcaatacgagggagctatgaagctaaaattcttaagtgctttttacatatgagaaaacaaaaattaaagttaaaaaaataagacacaaaaaataatatcaaaatatatgggacccaaaaaaatgttaaaattaaaaaaaaaaatgtataaagtataaaatagagatactataataaattataacaaatcacaaaaatctttcacacaattcttctgtcgtttgaactttttctccaattctccttctctctttcatagattgatcgttgttgaagctccttcaactatcgatcgataataaatgttgattgttcttcatcaactccgatgactgctccagacaacatagaccaccattgttgattgtcttatctaacttcggtgacctacaactttagtcctgcgagtcctcttttgatcataatctgcatcaaacaccaccaaaagaaaaaaaaagaagcaatcacatatattgttatgcccatatttcaaacaataaatatagtcgcgacacgtgtacaagaacccgaaagtaagtaatcttgcaagctaaaagaattaatgtgttgtttaatgcgtctctgtaataccctaagattaagagaaatggattagcaaaccctaactagttaaatgtatattattgtgggattatattattaaataatctattatatgtgaattaatatgatatatgacatgttaagatcctgttggtgagctaggggcattttaataattttgaccttctcgagtaagactgtgaatttaatttgattacgtgcttatggactatattattatatagtatgcatgttttgttattttttctggtgtgttctaacaagttggtgtggtatagtcacaaccgaatatttcgggccgaaccgggtttggggccaaaatataattttggagttatgtattggtattttattgatgtgttaataatctaaatttatttgaatacgtgaaagtgtattgggaatgacctatttgcccttaattgaatgtgtgtgttatatggccctaggggcattttagtcatttttggacatttgatttatttgcaaaaaggattttttggcattttaggaaaaaccaattttcgctttgttctagccctagccgaacctccccctctctctctctttctctcaaatttgctttgctttgaatgttccttgtaattgaattggtggtattgaggcttggcatttagagcttggttttgtgaaggtttgaggtaattttcatctttgattctgaacttaattgctggagtttgaagttgtttaaatatgcttaattattgttttgctcttgaatgcatgtttaaagaaatagatgaaattatgatgcttatgccattccttgtagttagatgggattcaaattaatgttgtgattattggggaacttagactgacttttaatgagtgaatttaagttttgaatcttatttttataagctgaaagtatggcctgatgttcaagtttaaaggtgtgtatttgagatgaatttttctcatgtggtgagcttgttattatagtgattaaacatgtgatatgaagcttgtattaggggtattcatccgtaccaatccgcacttttttggtcaaacaacatccaatctgcactaagtgcggattttatattttagatccaatccgatccgcataagagtttaaatccaatccaat

SEQ ID NO: 115520 - DNA, 1995 bp, Cannabis sativa
atttggcaaatcaaaagtatttatgatttaaaaaagaatgaaagtaattcagaaaacttaaataacacaattgaaagttgagcaagtactaattatatgtagatcaaacaatggaagctccaagtcatcattatggcttttgtttctctcagaaaaattcttggtggctaagaaagtttaaagcctcaaagcaaaggaaaaacagaacaaaacaatatgtggaaaggcaatcaatcaaatacagcaggacacttcaattgtagaccaaaaaaaggagcaatgttgtaaccagcgttcaagagctgaacataaatatctagattcataaaagaaagagcaaacaaggaagaaatggttgcaggaaaatccattgagatgcagctccattaactaacattactgcccctaatgcccttgtaacaaccaaaacttataattacatttctctctgttttacttatgcaattcaaacacatataataatttctttcaccaacatgtaaatctatttaaaatagatgtcaaacttaagttatgttaaaaatctctttctatttaagagtaagatattttcaccatagtagtggtttttttttttctttcttaaccaaattcaagaactaaacgaaagactccttgagaggtccaacaagatttgttgattaaaattataaaaaggaaaaaggaaaatacataaatatttccttttacacgttgatgatcctggttaacattgacttgatgtagattcttgtggacataacatagtagttgtagcgatgaaatcgaaaaacgaaagaaatgacactgataatgaatgggatgagaaaagaggagcatgcagcccataatgctggtaaagactcagaataagatgcttgttcgtctaggacagatacaatgactgtaaggaatgcaaaaaatgttgagacaatggagaagtatgttaatgccattatgatcctaaaaggatagaatacaattctcccaaaaagctttgaagctgatactagtagaaagtggataatcattgaggcagctgcagaaccaaaagccgcagaatccaacaccaaaaaccatttgaattttgttttttctctcaagtttggcatcccattatatggcttgttgtcgtcatagccaccgggcattgaaacagctgcggcgaatgtgatgcttgctatgattgtggccactaataagttcacttccagcatgttcttatcccatgatttggaaatgatcatgccaatgttgttattattaatagtactttctttcttcttattattatcatcttcataaccactaatctcatcatgattagtcctcaatgattgtagttttggatcttgacatttacgttgtaatacgcttgttcttgttatttgaacgtctaataatttttccaacctctgtctttctcctaatgttcccaaataatgtaacaaggaacgctgaatacatacatacagtacacagaatcacattaatttgatatgtataattaatagatatatcacaaactatatataaggtcattttatttaaatgctttaaacataaataattattaatcatttgataataatgttaagttgtgttgttaattctcatatatactccaatcatgtctggtaatttagaagttcatgtctatgttttatactatattaattaattaaattgatcatatgggataagttcttcatggagtcagtgataattatttgagaatagagaacaaaagaacaaaaacaagggaagaaaaatagaggggctagagttttattcaattacaaagtcaaaactaaaagtaatacaaggtaatagcaagaaaaaattacatgataaaccaagaatttgaaaaaaaaattataaaaatcggttaacatggaaaaagttttatttttactctttgaattttttatttacaaaaatacatttttagttaaaataataaactatttctttgattgttttataatttattta

SEQ ID NO: 115521 - DNA, 2004 bp, Cannabis sativa
ccctctatccctctccctccacacccttctccctccatccttctctttttcctctaccaaacatagtgtaagtaaaaaaattatcttcccttctatgtggggatcaaattcaccaattgtctcagaatcgtagaagtattttgctcatccaggtcatccgtcctcaccatatcctccataccacactacataagccagaggacatcgccaaaagtgatgatcaacgctttcttctgattcagtgcacaacaagcaatccttataagagagaaaataagtttatcacgagtaggtaaagcaccactagacgctttttagagcatcaagttgttctttggatgcaaatttagagaccctatatacttctacaacaactgatataacgcattaattacttaggaataagagatgtcatgagtgtgattttgtaaactagcttataataagttcaattttagactatgatataacgcattaactatttagaaatgtcatgtgtgtaattttgtaaactagcttataataataaactcgattttagactataatataatgcattaactacctaagaatgtcatgtatatgatttggtaaattaggttatcttaataagttcaattttagactatgatataaaacagttactacttaagaatgtcatgtgtgtgattttgtaaactagcttattatcaattttagctataaaattgtgaataattaaacatactaattaaaataatggaggaggtaatctaggacgaagaggaattagatccacgagtgagccaaggtgaaaagaattatcgaaccaatggaagaggtagaaaaagtgtgcatcaacgatgaagatcctacaaaattatcaaaatagggaagaatttgcctcttgttgtaagagagaaaatcttatcaattgtgaagaagaacagtgatgtgttggcatagagccattctgatgtgaatcaaatcagtcaacatgtaatttgccatgctttaaacaaaaacccaaaggcagatccaatccgccagaattcactattgttcagcttttgtcttacctttacctacacatgtaaataatatatgtgagtcgacagtttcagtaaaaaaagcataacataaacatataatcggatcgtaaccaggcgctcatacacctaatcacgatcctatcccgcatccaacgcatactaagtctggaactttcttacgacaatatgattgaccataatatttgcctataccagtactttaattataccaatgtgatagagtcaatccatacttaactatgttgccaaacttatattcgtcggtattcaatgtagctccatgtccattgatacctctcttattgatatgttaatgttaggtttttattagtattatttttaggttaattttagggtgtttttaagtaagtttactcttgttttgtgtaattttatgcttttggtaaatgttatttttcaggtttaatgtagaagaaaaattgagaaatattgaaaagaatatgagaaaatgtcaaataaatcaactatcggggcaagagcaccagaaaattcattcaagaaaaaaattcaaaaatttcagtgcgattggaggtcttgaggtgaagaaattaaaaattgtagaggagcgcctcaccgctaaaatttcatgtcaaggtattaaaatgccaaaatttaatagagaaggtcaattttgatcaaggcatgggcacgtctcaacactggaccttagtgttgaggcagaaattcataaagagctcactggccaaaataagggggttgatgcctcgacattagaagttagggtcgaggctcgtgtttacacaaaaatcataaaaatatctactcgcaaacacgggtcgcgacactaaggccttagtgttactggaagataatgagtggttattactaggggtgttcgcggtgcgagtggtgtagtttttaacaattttttcaaaccaacccgcacatgcggtttttttaatttctcaaa

SEQ ID NO: 115522 - DNA, 3360 bp, Cannabis sativa
  modified_base (3310)..(3313): a, c, t, g, unknown or other
atatatatatatatattatctattcgaaccctaaattatccattcgaatcctaaattatccattcaaactctaaattatccaatgaaatgatctatagtttttttgtattttttgtttattatttggtaaaaaattgaattttggtgaaatttgctttttcaatgattttttttttttgtatatggtacgatgatgaatataatactaatgtaatctagtggttaaagatgaaggtctgatagtggtccgatgtaggtatgatgcctttttgtagtggaaattagtaaaacttaaaaatgtagattcaatagtagctcgatggtgatctgatagaagattaatagtaacacttctcatcattttaaaatattgcatgcgatggtgatctgatagaagattaatagtaacacttctcatcattttaagatagtgcatgccaaacacataagaaataaagccctaagattcgagtcacactagtgaacacaacttgacccacaaagagcacaaaacaacctatcaaatcaatcaactatggtggtgttcatttagtggtaaaatgtccatatgggttgtgctagagattccattcatctctaatttatatatgcttccttgtatgttcataacataataattttccttttgaacattgatccaaaagcatagcatagattcccttctatttcatctgtggttccaataaattcttcatatatcgtcatgctcgagtgcaagaacaacatagattcccttttttacaaacaaaaacaaaacatattagactaaaaacaatgataaaatgaatagatttaatgtaacattaattctaagtttaagtaaatacaattttagaccatgtattttgaaaaaattaccaattaaatcttttgttttgttaaatgataactcagaccctgtatttttcaaaatagcataaaacaaaccctgaaattaatttttgtcaaattaaaacttaataataacctgacctgaaagtattaaattattatatttttgcatttgtttgagcaaggaactggttttaggttggttatattaaaacaaaaattgacgaaaattgaattcaaaatctattttgaaaaatataaggttcaaatattaaacaaaacaaaaaactaatctgtaacttttgcaacacagagtccaaaatagtgtccactcttaattctattacaattacaccattgggctacctgaccctgggtataggcagactaggcctatgcctagggtccacttagtccaaaggctctaaaaaaataccccttttaaaaatacacatttttttttactgatttttaaaaatataatatttttttctaaataggggcctaaaaaatatttttcttcccactaaatttcaaggttggccgtaacatagtacaattatgtgtccacacgatgtgagaaaaaaaaaattacatggaccaaaaatgctgcatacaaatcctagtttcaaagccactcattgatactgaagtattgcattaacattacatggaataataatcaacaacataaaaaaacaaaaatgtgtctatgtatgttgtagaaaagtgaaaagtaattcttcatacatggaagttccaagttcttacctgtatttcttcatcaactttctatactttctgaaatcatttgattgatttcacccttcttgttatacatatcaacaatcctctttgcataggaaggagtgtgcctatccgctctgcgaataaacaaaaaattaggggtattttcataaaatgacaaaaatattctgtgaaaaaagtgcgattataagtactttgtataaaaaactcgaaaaattacacaacaaacaatcacaacaacatgacaacatatatgtttacaattcatgagtaatgtacctttgtttgccccaaaagcgatttacgtgcaaatgatttctgatggtgtggtaatcgagtgaataccgggcgaattccagacctttcgggccaatctagaccaaacaaatccagttaaactgaagttccctttagttatttttgtttcaaaatacaaaagcaaaatatttaccaaatttagaaggaaagctatcagattgcctacaaacttaggagcaggctgagaaggtcctctacctaaaagcgaaaaccaacaaaaatgatcatctaaaagagcacataaatcaaaatatttcactttcaacatctcaagactcaaatgtggtagttgtagtgaattgcattatgcatttcttttataccactatgaattatcatcaataaattttcgataagaaagttgcaattcagtacaatgcgccaaattatcgcgatgaaatagaatagaataagtctaaggagagaacaactctctccaaaggttgtattttggagagacgagtctcttgaaaactcgatattgtaactttgtcactgtttttcagaataaagatcggaatattctatcataatatgtataaatatgttcattcaaggccttatgactagaaaatactacacttacccaacttagcattatcatctgccttgacagtttccacaacaaaaggttggcgctgaccctgaaacgaaatatacaatttttaaacaaagttgtaacattgaaaaaacatgagggataatgggatatagccagccaaggattttacactactaattgttggggtgatctccaaatacttctcaaccaggccgagcatttctttcccgcgttcatttctatcgatttgtatggaaacagacagaggttttagtttcaagccaagccacagaacaatgatactaaagagaaaaagtgtttatgtgttatagaatgaaagaatgtgttaccttacagtaacatattggggatgttgtgtcatgcttattccagaatatttcggtacacccatgtacccaacaacaagatcctgaagttgaatatacatgtaaacaagtttgatttaacacttgtatgtagctcttcttaagggattcaatagataataagaagaataagagagattgactcttaaaatgaagcttaccgctaaagcatttgtgtagtcaaaacagctgtagaacaataaaaagttgaaactaattaacatactattttctcagccaaaacaacaaacaacaaagaataacaataagaataaataggatttatccccctaaactactatcactttccatattctattgagttataccccgtttgcctgtttcaatcctacgtagctaacaaaatggttttttaatttttagtttataattttattgaagagtaaataccattttagacccnnnnttttgcaaaagttacagattggatcctgtgttttgttaaatgacaaa

SEQ ID NO: 115523 - DNA, 3173 bp, Cannabis sativa
  modified_base (3098)..(3102): a, c, t, g, unknown or other
ccggtggctgccactcctcccaaaggtgctccttcttctggttctgcttctttgcctcctccgcttccgggctctacaatcgtgccatttactacaatgcaagctgccgttgcaaagaacatgatagagagtctctctgtgccgactttccgagttggatatcctgtgacaactgatgcgctcgacgcgctgtatgaaaaggtattgatttaattagcgtcttgcattgacattgtgatggtttgtttgatgggcatttggaatttttgaactgagtttgcattgtgtcctttaggtgaaaccaaagggtgtgaccatgactgccttgttggctaaggctgctgctatggcccttgctcaacatccaattgtgaatgcgtcgtgcaaagatgggaaaagctttacatataatagtaacataaacattgcagttgctgtggcaatcaatggtggccttataacccctgttcttcaggatgctgataaggtttagtgttatctgctttttagtagtagtagtagtagttgtagttgctgttccctctttaaattatttagattcttaagtataattgttaattagttacatgtatatgttggcacagatggatctgtaccagctatctagaaaatggaaagagctagttgagaaagcccgttccaagcagttgcaacctaatgaatataattcaggtcttcaccaacttatctctttggttttcatgacccttttatatataagtaaataaggctaattcctattgttgtccttcaggaactttcactttatccaatttgggcatgtttggagtggacagatttgatgctatacttcctccaggccaggtgagtaataagaaataaaagctaaagttttgaactttaacacgttgattagtttcttttgttgtggataagccctttctttaatgtttgggttgatgctcagggggctatcatggctgttggagcttctaagccaacagttatcgccgatgcagaaggatacttcagtgtaaagagtaaaatgctggtaagaattaacttttcattgcatgttatgcttcattgtattttggaaaatattacaaggatttgactcagattcttgctttttttagaatcgtacattcctcccctgtttttgttatattttgttagtttttttagaatgttgttgtttcattgtttgagaaagagaggtagcctacccacattgattgtcttgtacagccataatactcttttagaggcccttcactaacagctagcattgaactataaggaagtggtgttgaaaagtagctgtgattttgcctgctcaatcatattgcaagcaaataaatcaataggataaacatgaatatgatcgtgaaaacttgcaaatctagttacttaactgactgccaaatttttctgttgttagaaatctagtttattgattaaagtatgtattgccaaataggatagagcttgaaataacttgtcactcaatgttctcagtagactgcagttttcttgataagttctatggtttctgatgtttcgcaactttccgatattacttatccctgtgagagaaaatcaatgcataaaagagtagcttgcctgtgaaataatccagattattgagcttggtggttttgttgactaattcaaatgcactgactctgaaatctggaaataatgatatctgttccgtactcttcataaactagtcctttccctcctctccaaccccaaggggtggtctcgtcataaggaggagtgttggaaagtacgggtaggcatatgttccaaggttcgacccacagactcaaaaaccttggggccactgggaggtctcctagtcaaactgccagggccaaaatttcaaaagaaaaaaaaaatcatcgagtccttccctctattttcatatctgaatttaacatgttatctttgcttttgagcatataacaaattttatataatagttgaaagcttctatatgtatatatacatacgtatattatatatatttatattaaaacaatactaacgggtgatctgaatatttgtacaggtgaatgtaacagccgatcatcggattatttacggtgctgatttggctgctttccttcagaccttttcaaagatcattcagaacccagacagtctcacattgtagacgatgcctcaggttcctacatattaacaccttttgactctgtatctctagattaatgatttagagaaatgtcaagggcaaagaatttaaaagagacgattcaaaagcagaactgaacaacctgattttgctatggtctcttgcattttatgctttgagtacgtctttttttttttctttgaacttattagtttgaggtcagttatcatattctgcggagctacttctaaagagagaaataacaagtttgaggattggattagtcagtgggattttcttagcaataagtaatttatttggtgtaataatttattttactatataaattgttcattaaaattattagatcttgcacttactatgtcttattatgtagtatatacgtaagataggcagattatttatatatgcatttgttttggttaggactaggtgaatttgacagtcatctcataaaaagaagagaaaaaaatgatactagagaaaaacgtatgcaaagttgtgccgtattgcctaagaccattttgtgcttcgtccaccatttcgtatagtatcagccattgctatgatttttaaaagtaagcttagaattttgttgcttctgcaatcttaggcatttcaaatacaggaaatcctcaccagtacagtgtagatgaaatgactcatagttagattaagtgcaactgaagaaagcttctcgttgaagattaagtgcattcatagctgctgaatgttggacaccattcctagtctaatctgtgctttctgagattctaattataattgattccagttcataaactttgtttcaatgccattttgagtgggaaatttgattttttatactaaaaaatgttaattttttttttaaaccaatacattttacactacaaaaaatatcaaaagtccaaaaatacccccctctatctannnnntctctctctcggaccgaacaaaaaaaaaaaaaattcggaccatatgctttttttttttttcagtttgagga

SEQ ID NO: 115524 - DNA, 2863 bp, Cannabis sativa
aaattgactaaaaaattattttgagtactaaaacagataagggtgcattaatgtatctattttaaggaggtgcattgtaaaatttcccaaaatcttttaatctactgaattgttaataaatttaatgtgtcatttgattaactgttactataaattatatacttttatacaaatataaacatatcatgtgtacaaaagtatatatataagtagtgcatgatggcagttaatcagatgataccttaaatttactaataatttagcaatttagaaaattttaccaaaaagttaaatgcaagtgaaacgataattagcaggatttagttgccaaaaactcatatgattataaatagggtaaatagcatcataagtactcagtgtttgtaaaattataacttttctctaattttatcagtatagtttttttttcttatttcgtcagtatagattttttattcttatttcgtcagtatacattttttattcttatttcgtcagtatggattttttattcttatttcgttagtatagattttttttcttatttcgtcggtatatattttgttattgtcttaaataagacacatataaggcccaagttttaaattatcgggtctaaacagaaacatgtagtatccgttattttcaagtgttcttttaataaattcaaaacggagtttgaactaatgaaactagagaaaatttaaaattttacaaatattgtgtatttatgccactagcaataaatattaattaggtttatgtcgtttttaaacattattgttgatgtatcagtgtctcatgattcgatgagggaaattggaaattatatgcatacattttgtgcatattaaatgttttgaacacaagtttatcaaaatttaaaaaatagacacactttatattaatactcataatacccttctcccttctcttctcttctaacttcaccattcatattccccattcttatccatattgatgggtgttcgatggtggctcgatgctacttatttttttttttttatgtttttaataataaaaaaaaatagtagcatcagcctaccatcagaccatattctaaatttataaatgttaagctctattcatcaaactcgccaagaagacatcaagccaccatcagaccactaacaaactaccatcaaaccatatcctacatttataggtaggatcgggtcaccactggactttcgtcttcaacctttactcattttaacaatagaaagacatcagactaccatcagacctggcaaagacactagttttttgctcaaaactcagtttcgaccattttttaccctaaatctaacatcaactcacagataatagacattaattatacaatttattattttgacaacattatcaatggagaagtcgtggttgatggagaagttgttgacaacattatcaatggagaagtcgtggttgtgggtcgagttcttggggtgatgtattcagagagcgagagagaagagagaaagagagaggattaggagtttgaaataggagaagtaaaattaagtttttatgaagtattaacctcttctactaatatggattaacttaaatttaaaaaaataattttttaatctaataaatgcattccctttgatgatataatccacggtccatgtgattttcgtacccaccaaatttatatcatatatattaaacaacacaatatatacaatatagaagcaacaattttcttcccaacacaaataataataattaataaaaattaattaaaaaataagagcacaaatgtgacatgtgtggagatatttgtgtactttgtcatttggtttttaattatgttcataatataaacaactaaatcatgagatgagagattggtatatatattggaatatgctcaattattttttaaagctatggtactatggattagcattgaggaaatatatatattattagtatgatcaatatatcgatgtattaattataatttctcaccttactttactacttttaattatcaattattgttaattctaacaaaaattaattattacaatataattatattcagtaaaaattaaatattttcgcttcaaatatatctgtatatattataaattaattaattattagtcaattcgaaagtgagttatgataaagaagtgtttgtatatatatttatttgtagcttaactcattttctaaatacgtccacgtctcaagtctacaaaacatagatattttttatgtttatttttttttttttgctcatgaggataaatatatatatatttgataagtaattaatgtaaaagtatatatgtgtatatatagatatataaatcatgtgatatatatgtggttggtggataatcatgaaagagaaaacttgagcatatatactacataatatataatataaaaatgtattatattctatgccatatatattatatatactatacacatacatatatattataaattaataaatatgtatgtatatgattatatgagacctctccaatccaatcaaattgattttcttaaacaattttgagccatccattttgagagatttttggctttaataataacatgtgttcagaaatatatacacattaatttattataataattttcaaatgtatctttgtatatatggcatacaacatttattggggacccatatatattatatatgtctaataattgtaggatttatatggttttgaggtggagttttggcaacgttacatagtattttatgtagtgatatatatattaggtgattgttaattacgtgtcaagccacgtagtgttagttttatttaatattttagttttttattttaat

SEQ ID NO: 115525 - DNA, 1488 bp, Cannabis sativa
attaaagacctaaattcttttgactacttgaattttgaattgtaattgccttattttcttgattctatattttaattttctgaattcttgaattggttgacttggattgaaaaaagtataatattttggtaattagcaacttaaaattaatctatgtgagatcgatattaaatactacttgttttttttcgaaaggaaaatactacttgttcaataggtgctcttgctcagtagttatagattgcataacgcccacctcaaagccatttgactcaagcctcccacaaaccgaagcacctcctaaacccatcaggctagtggttgggttgcaacacagaacattaaagaaaccctttaaaatgaggagaagagaaaaaccaagggagcgacatccatccatgagcaccaaggcccatccagatatcctctcggacagggcaccaaagactcacacagcaaggccagcggcaatgaccccaacaaagagaagagaaaatagaaaaagaaaggaaagtttacaccccatactaaaactatcaatttaattacttttatattgttacacggtataattaacttatatactttgtatgttttttgtttatattgtttttatttttaaatcttacttttttttttattgtgttgagtacccctaccaaacccatttcttttctcgatcatattcaatctcactttcttcttcttcttaaacttatttttcattttttttatttgtttaaaaaattcatctttgcattttcaaatgtaggtgctttcgtacggttgataaattggtgaaatgaataccatttcggttcagttttttttttttttcaaaaatcatattccctctcttttctcattttcattggtcattgtttccctattaaatagttgtttcatctatccatggttgttacttgttcgtgttcttcttctccaatcgtaaaaaaatctcagaaaacttctcgaaaaactgtgaagagttcgacaacaggtaaaagaggtgttgctaagaataaattttttaaacatgatcccttagccatacatctcccataatttctaaaagaaagttagtagttgattcggtaggaaagaagaaatcaaaacattctaaagttatcattgaagattcaaattctgattttgagtttgaagatgaagatttcgagatagagaaagtgacaaaagtatttatctattttttttgggtgggtggggcgtgggcatttttaatcattttgttgttgtttatattttatgttttgtgttattttcaatcttatttttgcagttttgggtttttttgttttagggtttttgttcgtgcatgttcattgacgggtttcaatgtggaattttgttcatcactctctgatttttaaaattttatatgttttgtgttagagattttattacaatggaagaaaatcaagacattacaactctattgtaatacaatacaaggaccaacaaagagat

SEQ ID NO: 115526 - DNA, 3136 bp, Cannabis sativa
  modified_base (2832)..(2833): a, c, t, g, unknown or other
ataaaatagtccagtccattcttaaaccaaacacaggattactttcagcataatccaatcttgtccagtccagtccaatccttttcagtccaatcttgcgtatcaaacgggctcagacagtataattattacttggacaatatgagattaggtagtttgttaaatgaatattataattataaattaaatttaattttagttttttataaattaattcattatttatatattaaatttaataattggttattttattaaattctaatatttaagattttttattttaaaaatatttaattttaatttatattaaaaaaaaaactattacaggcagattgatctattaataatagtgttgagtttcgaatctgacacagttattagtgagagggtgctagtctactgctattactcatcatttgcaataaattaatgtcgctagaataatagtggcggactccgccggtattgtctttaaccgtggattcgacaattatttggaaaggaccccccacccgtaatgatgataagtgttgtagtgcaagcttcgtttaagaaattgtagcaagcaccaactgattctcatgtactaggtgtctaggcgattactatgcatcatttggtgcgcatagagcattactcgagcgaaagacaggtgaacatcttcatcagatctctaaatttgacaccaaatttaacaattcaccatcatatgaggattaggaagcattaacatcgaatcaaaccctaaacaatggcttagcacaacacacctggcaaacagtgatgtaattggtccatctattgcgtcagttataactgacacaaataatgaatcaaagatacgtattgacggatataaaaatattattttgacgtagttgtctaaaaataaaatttgaaaaataatttaacaaatatactattattggaggatggcacttagataagtcaaacattacctaaacatatatagacaatgtatatgttcaatatcatatttgtgcctttgcttttggatttgaagaggaggtacaattttatagtgtagtttgggatgagttttaataactcagcaaatttggaggcaccatttgaaagttgcaataaattttgaaaacaaaaagtaattatataaatttataaaaattattttttaaatatttcaataattaatatatgtattttgatatttaaaatttaaatatattaattaacacaactaggtgtagtttggtcatattaaaaaagcattttgactaaaattggcttaggatcctaattatatattttgagaaaacagagttgaaaaatcaatttttaaaaatgtaagggccaataagataatgagacaaaacattagaaccaaaacaatataaaacccaaattagtttatttatcaattggagaaaaaataatgtatactaatactatacctagcttaaacaaaactagctagtatataattaaattttccattcaaaaaaatatttaatttcaaaaaatctatctccactaaaaatgagtcaaacgcacaaacatatgcgtgtgaagctcttaacattattttaaatttctaattttaataaaaacttttcaaattaatattataatgtcacaatattagaaatctggacaaacagtgtgtcgttctttacaataacacccaacaattttgtcatggagtagtcattttctaataatcattatttattcatttattttttaataacagccaaaactaatatatgtacactaatatagatttgatttgatttaaattaaaataataaccaataattataattttaaatcctacaacaacatgtttgctggatcccaaaaaagattcagaaaaaaatattggcattatatatataggtattattcatattattattattataaataataaatggtggtgacgtggaaaatattataagcataatatattcggtcttgaagcgtcataagcgccgtgaacatggacatgatggcaatgggcttccattccatgtgaaatgaaaattttttactttgaaaaaaaaattacattaaattatttatagtaagaaaaaaaaaagaaaaagaaaatactctcaagtctcaactcaaccctcctatttattacttctaaaacataaaaaaataaaaataaaatgtatatattaaaagaaaagttgaaaaacatccttgcatgtagccacatgccacgtgggagcctcaattagccatatatcgtggggagaacgtttcaaaatttcgattggttgatgatgttggcaaaatgacaaacttgcccttaaaatttagaggtttttgattgatatcgatccatatttttttttttggatttttaaaaatatgtgtcgggtagtgtagagtcataagaaatataagttgtatggtgttataaagaaatatgaatcgcgctctgccgtgtgtcacggattcattttttcagacagcggaatactcgtatagtatcttgacttctctaagttaatgtcagccttccaaccatccgagtaacaatgagctcatttttcgtgcgaccgtatgcctcgtgtacacttccgtctctcgaacaactcatgccgagtcatactcgcaaccagtggcagaactagatatgcgtatggagtagccatggcccctctaactttttagaaaaagagtaaaatatacataatatataaattaaattaagataattagattttacttattagaaaaatgtgataattttcttattactaagcctaataataaattgtgaagttgaaattgaaaaagaagcccaaacccaatagtccatttaaattagttatnnattttatggtaaaaagtgacaaaaaaataattaatataatttatttttgaagagtacttttgtatgatatatgtttatatgtgtctttatatatgtattcttatgatatccaataccatattaatatgatactttataagtggttagcggttttttatattatttattaaattaaaatattattaactcgatattattttacaccaataacgatatcccactttttatagtacttgacactataaggttccctttattatttctcattattttatatacgttgtataaagctaattaacttct

SEQ ID NO: 115527 - DNA, 2508 bp, Cannabis sativa
  modified_base (1950)..(1960): a, c, t, g, unknown or other
aaaaaaaaaaggaaataaaaaaaatgttaagagtaattttttaaaattaatttaagttttttttttatactaaagtacatttataattttgtggggtaaaaaataaaagtctcaaatatataaactagttaggctcatgctatacatacaattcaacttcacacaacgtcggccaaactatagggaacaaaaacaaactgaccaatttacaatcaatatatgtaagtggatatttaagtccatcttttacctatatatccacgtaaaaaaacattcacattcacaattacacctcatactaaggggtataatacaatattaataaacaagtaaatcgtaataattaataatatgttatgggcatatatgggtcagtttcactacaattaacaaagctatgttagtttttcttttttcttttgtgatatcaatcagtcatgctcatgagtgaccagtgaatatttaagcacccattaatttgggtcaataattgatgttgttgctctccatgctttttgtccgatcacaccaactaaggttatgatcataatttgttttaactttaagatataatatttattttattttaattgttttaattttctaaacattaataatgtgatgccaaatatgaggagatagatggatatatgagcaacaaaaatcaaactctttaattccgaacttggatgaaaagaccattttggaaaacatgtagctagctaggggcctgagctttggaaaaagacattatatagaaaaagataagaaattatttatgtaggagatcctcgttttgatagactttttattcatttggatatttaaaaaatatttttaatcttattattttataattatatattttataactatttaagatgacttgtaaatttttataaaattctgaatagtttatagtatggaaaataaaatttaagtaattacttactacacttaacaaaaaaacaattatgcatataataaaatatataaattttattttttacattataaattttttatttttttttttaaatttacaaataattctaaatagttataattataaaataaaaaataaaatataaaaaataaaagaactttcacttctaaggtgtaggatagacttagtcttatacacacaaacaaattggagaatatttaatttgttgtgttgtgtgttcacgagcggagttaatatggtggagagagagatgcaatggagatataatagtcgttttctgtcacttgttgaaaaatattctagaaagtattacgtgtcgtacatacatattatagagtacggtgctcacatcattagatttcatgatcataaaaaagaagaaatatgaaatgagcattattaactactagtcgtgcctactactttctccgtatgtcacattgcgattggtcagtaatactctttaaaaattattatattaaattatattatgtgggatccaatactcagttggaccaatagcgatattaacacaaaagagtgtactgggcaccactagtaccaacacttctggaatgaaatgtacatatacatatttattctaatcccactcaaaaataataacccatgccatgtgtcatttgattgatccttatctgaaacaactagttagtgtggtaccattggggtagagaggagtggatgtgagaatattgaatatctttaacccacaataatttacaagtttagtatctctcaaacaaaatgaaaaataataaatcacattttaggaataatgaagaagataattccttaaaaaaaaattaataataataacgaaaaaataagatacttttacaatgcacatcataaaaaaaataattgatgcactatttatttattttagtatttaaaaaaattatagtcatttttttttcatttttgtgtacgatataataatttaagatattttataaaatttnnnnnnnnnnngaataatttacaatatagaaaagattatttaaatagtctttttcacacgcgtataaaataaaaaagtcacaagtaaaacacactgcttaaatcctattttcgacatgttaaatttttctaaatttcttaaagttttgtaaaatattttaaataattataacatacatgaccataaaaaaattgagtacaaaattatttttaatattagaataaagaagtatacattagtgcatctattttaagaatattagtgtatgagtattgcagaagaatattagtttgagttgtgatgagtaagcgaggtaaggaattctgttattgagaaacacatttactatagcaatgtgtaaggaccgtcggacaccatctatttctctattggtatgatattgtccgctttgggcctaagccctcacggatttatttttaggcaccttccaaaaggcctcatttcaatgaagatagtgttcatccttatatacctaagatcctttccatttctagccaatgtgggactttggatgtacacccaacaatcctcccctcaa

SEQ ID NO: 115528 - DNA, 1663 bp, Cannabis sativa
  modified_base (1627)..(1632): a, c, t, g, unknown or other
atacttttaaataattatctaaattatattttaataaataaattaaatttaaatataaaacttttctttttcaaaaaaaaaaaaacataattgattcattgatttaacggtgttagttttaaccgttaattttaacaaaaaaaaaaaaaaaaaactcgttgaactaataatttttattaaatagccatatttaatatgaaagagatataaagagattaataaaaaaaataaatcattttagaaaataaataaataaacaaacaactatatatatatataaagttattaatttaaaaacaaattcttatataaaagaagacattaacaaagaaaaaatattcataaaaaacatgaatgagattttgacaattgaggaatctataataaatactttaagaatactaattataaaataaagataaagaattttttatgtgattttgtagttaaatctatatactccaagagttatttgtgatctaattcttacagtaatgaaacgtgaacattccccatgtttggtacattttatctaacatgtgagaaatagtatgtaactatcttcatttgaatacgataaatgtcatttttaatttggtttttgtattttgtgacacatggttgcagaggcatttgtttattttaatgatagctatactaatcatttgtctcttacaaatggtgaaccattttttgaccatagcttatacagaagcacacttggtgcctttcaatacttaactttaataagacctaatatagcttttatagtcaataagttaagtcaatttatacattctcccaccattgctcactggaaagcaaataaaggttatttcgatacctaaagtgctctatcagtaaaggaattctcattgaacttgctatcagattgtgtctgcaagcctattctgatgcatgcaagcctattctgatgcagattggactagtttccttgatgattattgatcaacaagtattgaaagtgaatttcgtgcttttccaactgtgctacagaaatcaagtggatcactgctgttctttctgaactccaaatttagctaccttctgctcctataatctgggtagataatcaagaagctgctagtcttagggatcaaattctggccaaacacattgaagttcgatatgtaccttctatagatcaattgtctgatattttaacaaaggcattaaccaaagacacatttctctatctccaaactccaagtgtactctacaccattttgtttgacaagggataatacagaataaatatttgttagcttattttatgttactgatgttctattttcaattactttagctttggtcaagaaagttagttacagttactgttagtttctgttgtaacaactctgtctttgtattcttttgtatataaataaaaatcatgagccctagtctagctcaagattttgcaagtcttggtaactcaaattctctcgttgtgttctttgataatcttgtattgataagtttatttatgaaaagtgagaattcttcaaaaatgagaatggaaattgagaaaaagaaagagatttagagcatgtttggtattgttttctgttttttattttcaaaaaattgtttttagaaatgagannnnnnaatagtttttgaagtttttaaaaacaagtca

SEQ ID NO: 115529 - DNA, 2002 bp, Cannabis sativa
aaagtgatgagaagaaaaaatttaggttatatgtcttaaaaaaaaaaaaaataagaattcagtctccctcatcattggctcaggaacttcccctcaaaatgtttgcttggtgttgacaacacaagattttgtatttttgtgaaactcctaatcacaaaggagagacaataggcaagtcaaatcaattgccaaattccaataaccacaccattaggaagagattgcaaatttctgcagtttctgatggaagcattttacatttgaggtgtttggcttttatctacagttttagaaactctccctgtatgttttcaagattcataaggtgtaggaaaaataggagaaggctcttgtttactcggatgtgccatgtaggtggatcttttgatgttgcaccatgtattaatattttgtagaaggttttaaattgatagaagaagatggttttttataggctgtttttttttttcttagatgatagaattcgtaggaaacttttgtggccactattgtctaaagattgggagaatcttgcaacattttgtaggctttgaatttttctctttaatattttcatgaagcgcgcttagtttcatggaagactaatttaatggtgttctgctaaatcttcaaggttaaaccaattcaaagagatgattccaaagccagtacaagtgctgggtaagggcgctgccataatacttgggggggttgtgactctcaatctggtttcctctgccactgttggtgctcttcgggcggccaacgaagccaaacgggtaaactattttgctaattcttaactattttttcatcttttagatagtaacattgatggttttattcagaaaagtgtagcggaaccttgtcgggtttgtagaggcaaaggcttctacatatgcaaactatgtaaaggaaattccaccattgaatggtcccctttgcatgacccagttgccatcaatccatgcttatgccctacatgtgatggaaataggttagttcatattctcaaacaatttttgcatcgttatttatttatatatctatttatgtatatgcgtttcttttattgataacactgagtagagtgatcataggctatcctagtagtttcacgcatccaagttggaatccctatctgtcaaaagaaacaaaaaaacacttgtggaatagaagaatccattttattgtgagggaatgtatgtcctttgtatcattcaaattttcagcaagaggcgtttcactgttttcattatttaactgcaaaggatcaaataaacatttgctctaatgattttggttatatatacatttatatatagataaaatataattttcagccacatggttgtttcttccttgattgagatgaaactttttgctttttatgttgtgttttgttttttttatatttgttaggaaatgtagctccgatcctagctatgcacaccaaagttcttggaaagttatctctatgccaaaagaagatagcttatgaaaatgtaatttattgcacactggtttagggtgaaaatgtaacttgtttgagacctttgagtgttgacatcccatccccttcatagccagaatcgacaaagccttgtatttcttgctgtgatgaatctcacttatacaagagtccatatttgatgtttctttgtggtatctcatgacccactctcctgcattccaatgctcttgttgttgatttttcataaacctgcttattacatttaggttgtgtcacaaatcaggcctagtgcataccataatgtacacgaggcttcccactaaattagtgtagggaattgactccatttgcttaagttctttatctgtggaaggtgactgagttttggacaatttgaaatgttgtgctaggtagggcaagacatctgattcgattcaacatttttctcctcatccaatccaatccaattagtaattggatttgaaaaatcaccatccgatccaatccaattagacctcaaaatccaat

SEQ ID NO: 115530 - DNA, 2119 bp, Cannabis sativa
aaaataaattccaacactaagatcttttggatttgctttctcaggggcattagtcattggagaagcttgtgcgttaggggctatcttagtcaaagcagtcatcacgacctccattatggtcatctttgtgagtagtaactcgttgaattcatcttatcgagttaacctactttctgccagttgaagttatatagccatgatgaccacggagtttgattcgtcaagttggttcattctccaatgtcatcattagcagctttgtcctgaggatcatcttcatgcatatcctcgggtgcgtcctaggtgttatcttcagtgtcctcagaattattttctccagattttgtatcttcgataataggattgtctcgattttgatcttcatcttggtgacctatataacggctagtcgcctcatatggatcattggagtcccctgctttggtgaaacgaagaccaaaatttgttcgggtgaggaccaagattacttagacgtaatctataagtggtctcactgcttccttcagctttcaatgaaaacaccaaaatgtttactgagatttttggaaacggaatacaaacgataatagctgaagaaacaaataattaaaattgaagagcaagagaaaagacaaacagttttttacgtggttggggtgttaattagccttagtccacgagtcaacgatattcaatagttcttagcttgaaaaatcctttaggaatacaaagaatatatgttctcaagttttcctgagcaaagtttgcaagagaattcaacccttaatccatagaattcgacgggtatttataggagtttgagaattacatttagttttctttttccctctattggggagtttacagtgactaactcacttgggctgcctcgtgaagtccagcccacgaaggagaagatttgttgactaggcagatcaaatttgccttgatttggtctacactgtgtgctttgattgtggaaaattaactgtgaattaattgcttgatattcattttaggaagtttccccattaaatctgttacgatgcttggtcaagatgtagcatctgttatttctgtatttgtgcgcaggaataaaaaaggaaatcagaagagtgttttgggaatatgctgtctcgtccctccagtctcatggtaccggacttgcttctgggaacagtttgccaagagcggaaggttttatggtcgcaaagctgggatacgttcctggaaggacttgtccaaatgggcttggcccactttatcttcgttgagggacccattgatgggatttggttgttgacttggatttcacgtgtctactgtcgaaaacacggataacactaacatttagaaaaggggacggattcttgaccatactagcctggtctaaatcctgttgaatcatctccaaaacacgctttagctcgaaagcatcgatccatgaaggagagagagccattgttaatcttggagtaattatgtaataacgcgaagttgtacttttcgattgagatagtcgtagtgtaaagaattcaaagtggaaatacaaatttgttgttgagccaattttaagcatcaacacttagtttttatactatatgtaatatttttttatgtttttttcctgttagcaactagtttctcaatatttatgactgcacgatagtaattgttattatttatttatttataatataggtgtatttttttattgtttctcagttgattttttgtttagttatttcctgtaactaatttttgtatgttagtttttaatttggttgctttacgtaactagtttgtctgtgttagatttttaattagctaacaaatataattattttttataattcaattttgtaaatcatttgttaaaaattaatctgtgtggtatgtcttatttttttaagtaaatgaattttgtgtttcagttattttttttttgctattttgttacgtctttatttcatttttttagttggttgttttatttgaaaattagtttttcgtattttattatgggctattttcaaaaatatgggaaaaattattaaggttatgataaatatggcataaaaagtaaataccactaaatatggcattatctaaccaatca

SEQ ID NO: 115531 - DNA, 1406 bp, Cannabis sativa
ataattttaaaagggaaatattttttttgggcccctgggctaggtgggccctaggcataggcctagcccgcttatgcccaaggccgggcctgatcacatgtgtatcctaatgtgagatttatgtaattggagtaatccaccttagatgtttgagttgtaatatcagattgtaatgtgttgattcaaagtaataaagatcattcattttgtcattgaatcgagttaagttttctcatcttttgttcacatttttctagttttatagttcaactgtcatttgtgtttgttttattggtgcttggttgctgttagtcatcataacagcagcatcatagtgaagtaatttcactacaatatcttactaacatctttggttcaataaagggtctagcaagtaaaattctactgcagaattcaacacattctcatcactctttaagaattgagggtagtatcacattaatattataaattaatgttttatgaatgatataaattcaattaaccatgaacaagaatctatttttgtagaccataattttctctgtcaattttttcaattgtgttataggtcatacaatataataataatgataataataataataattaaacatgaaaaatagagtcaatagaccaagaaccatcacatgtatgactttccaaaacacaagtaaatcaacgataaatgtatttaagtaagaaagccggtaaagaaatatataataaatcagtaacaaagtctattaccaatttcaattacttaaattaatatatggatagattctttaaaatctaaatgggtatcaaatggaacactacatgctcatctacatggtaagtttccaacttttttggactggaaaacaaggttcaaaatagcctttacaaacagctcaagctttggcttcttaaaaaagataatttctatttgattgtatttggtttttggttcaaatattgagtgtggttatatattttaagtgagcttgttgactaaatctaaatctaaagcaatttcacatctatatagatctgtcatatcactaaatatatcttatattatcatcaaagactttcaatgacttttacacgttcaatcctaataaaatggtgttagaccctaaccaaaaatatggatcttgtcttgtacaagccaaagtcaataaataaaaaagtattagatcatctctcatgaatatagtgtatattttaaattaaatttacttcaaaatataaaattatatttgacccattttttatatttgtacttcgatgtacaaggtgcaaactagtatgcacaatgtacaaattacagcagaacctctgtttaagaatactctattcaagaataacctttaatttgttaaaaaaaatgaagtcccaatttgggccagttataaata

SEQ ID NO: 115532 - DNA, 2768 bp, Cannabis sativa
taagaaaatgctaaaatactatgttatttctaatttagttttggcattttatgtaaaaaaatagttatgagaaaatattttgtacggtgccacgtgtaggtagttgatgctattgaatagcaatgctctttattattaagttaaatggtatgagcgcgtacgtaaattgacacgtaatgcaaaagacccagaaagatttgaagtcactggtttgaattcctagtaaatcgtagcttctgggaaggcaagaagaaaaagaagaaaacccacagcacgtatacaatttattacataagaaataccattaaatataggaagatatggtctaccatgctgttgagacacagtacaccacgctcttaataaaagcgcgtgaatcttaaacactattagaaaattgttgttacatagaagtttcagatattgattattcatcgtccgattttcattaagtcagtccacaattaataatcctatgctttcgttaacttgttggcaaggaattaaactgtatatattacttatttacaagtgcaccaaagctcaagaaaccaacaagcagtaccaaacacaatccttctttttctcatcattttaatatatttcatatatgattacttcatcacactaatcctatcccttttcgtcttttcatccgtatataagtgaaacatttatatatataatatatagatatataaataaagtcttgtatctcaatcatatatattttgaaacccccacacgctattatattcaatataatcttcaagcatcgtgtgaccaagttcaatagttctctttaatggagtatttcaacaaagtcaagggcatagtaaagcttcggagccacctagacaagtacttagtagccgacgacgacggtgaaaaggtccggcaaagccgaaacgggtcatcgagaaaagctaaatggatggtagaattcgttgagaataagaaccatgtcatacgcctcaagggctgccacggccactacttggccgcaagcgacgtgccttttttattaggtatgaccgggaaaaaggtgattcagtctcccatggagagggacgaaaacgacgtcgttagttctgactggatatatgagtgggagcccataagggacggtttccaggtcaaactgaagagctggtgtggcaagtatcttcgagccaacggtggaaccccgccgtggcgaaactcgatcacgcacgatgaaccccacacaggttcgacccagaattggattctttgggacattgaagaaggtgagttgaccgagtccgagtccgtcgcggattatttatcgtctttgtcaaccctttcttcggtgtcagatgatattttgagcgaactagggtcgccggtcgtttcggctagatcatcgttcaagtccccgaggttttctttcaagtctcaggtacctctaatttttcaatttctatttcaaattaatattctttgtttacggccataatgaagaaaaacaaaagccttcttttataattaattaatttctgattcatgatgatgcatgccatacatgtgtttattttgatccaaattaaatttcgcataattatgaagtacaagaagttatttggttttctagattagacacagttaaatgaaatcacatgtacatttagataacaaatttaaacttgtttgaattataaatttgatgataattaactctatgaacagtatatgtgtaacagtagttttagtaaccttttggtactatacatatcgcccccgttattaaaggcaccaaatcatagatttaatttgacaaagtaggaaaacatgtttcatgtggcttgttgcgtggagcatgcaaacttcagaacttgacaagtaacatatgaaatacgtatttgtttgtttatatatatattgacatatcattataatgccctttgttatggttgtaaagtagtagctattttaaaccatgtggcatgaacaatccctcaaatggtagctttttgattgtgtgcaccacacaagaaagaaaaaaaaatcaaatacaaactatattataatgtataacttggtgtaattagggtttgatgaggaggataacactcaatccctacaggcatagttggtggataaacccataccaactcctccccactaaaaggtgtagaaaagatgccattacaataaagcatagctttaaaccccattaatttaacatcccttggtccttcctacattctagtcataatttcaatcctttttgcaactagctgactctgtatatcaacgaattgatgatttcattagcacactcacaatggccttgtcttagttatacatcgttgtcacgaaattctgtaatttcatccatggacagtcggtcctacccacactttttttcttttacctttgcgtgtacgactcataacatttaagagttcttgacactagatgtttaacaagtgttacctagtactatagggaacaatagtggaatactaaataaatttattactcaataagaataaatttaacactcaattttttagggctggaaagaaaaagtgtacattctaacaaaattttggtacaattaattgatttattatgtgcccttggtatctccgatggagaaatttaaatttggtgttaaatcaataccaaaaaaatattattttaatactagttttttttttttcaattccaaccacaatattaaaaattacactaatttttttattctttattattttattattttattaatataataagaatat

SEQ ID NO: 115533 - DNA, 801 bp, Cannabis sativa
  modified_base (31)..(43): a, c, t, g, unknown or other
  modified_base (70)..(71): a, c, t, g, unknown or other
  modified_base (734)..(765): a, c, t, g, unknown or other
aattcacgcaaacatcaatcacttcaaattnnnnnnnnnnnnnactaatcagattgtaaagagttttatnnagggcataaaacccaacaaacatgccatcataattccctcagaaactattgagtaaatagagaacttactagctaatgaagcagaagggcttggtgtggcgtccttagtaggaaaaataatgtctgacgatagcagcgttccaatgtgactaggaaagaagaaaaatagaagggatatgggttaacaggtaagaagagtgaaaaaaaaaaagtggctatcgtaggtatttatgggatgatagggaatgggcgcattgcacatgaagcaaacgcttcagttcaccccgagagacacccagtgattgggtgtgagaagctaaaagagcgctttgcttcccaacatatagctcccatcattgcatgcatcgtgaagaacactcagtaagtgagaagatttcctaagtccaattgctgccattttgcgcttccaaggaacacgcgctccgcacgtgcacgaaaatccaaaaaatcagaatttgacactctgacaaaaaagtgggaaaaatcatgtctcctacataatggcactacaatttgacggccaatgatgccatacattaaagggctcatcataattaaggataattaatggcgctacaatttgacgcccaatgatggcatgtctcggaatcttgggggtaaatattgttgggttttatgccnnnnnnnnnnnnnnnnnnnnnnnnnnnnnnnntcaatttagaagtgaattatgattacatgtatgtta

SEQ ID NO: 115534 - DNA, 858 bp, Cannabis sativa
tgattggttagataatgccatatttagtagcatttactttttatgtcatatttatcataaccttaatatatttttccatatttttttgctttaggcaactctccttttattattaatgtaagttaatattagattgaatttcctataaactttcccacgtggtccaaatatgcactgttttttccctatcaacaaatgaacaaccaccttctctatcaataatcatattagaagtgagttagttgaggtcagttctaacatttgggaagtaagagtttaaattctaaagatattattagtacatgccttggtcgggtttagaatttagttctaaccaattttaaatactttataatttataactcaatcttactagttataaattatgggtttccatagattataatccatttcaaaattggttccaagtatgattttcaaaatcattcattcataccgtatcataatgtaaaaaatgacccaattaaagtcttaaatgaagaaattcaaatttttgtagttagtacttaatctatatcatccaaacataaactaaagtcttaaaattattaagggtgtcctagtaaatagaaatttaaatcgactaaaagatttatcatgaataaacttttaaggttattagcttttgaaatttttagttatttcactaggttggtttggattggattaatttaaggcccattttcaacttaataagatccacttatgaacattataagccattttcggacacgacttggttggattgggttgttcggtccataacttcatattgggccatatatgtgcggccaacttaatagggaaaattacatgaaatatgggatttcataacaa

SEQ ID NO: 115535 - DNA, 2117 bp, Cannabis sativa
tctctctcacaaggattttcgaaattctctcttcttttctctcttattttcgtgggttgttgtgcattcaagagaagagagcaagggctgctatatatagggaaaagggagagcacaagagctgtcaatgtattagtggctgacctgttgcctgaacaacaatttcgactcgagttttttaacaatagggcaatcgacatctaatctattagtgattccttaagcctaagttatctacattggaaaaagaggggagaaggttggggtaatcatgtttataaaggttgaggtcagtgcttggattggactctatcgtcatcgttcaaaatctttatttaggttaggtcgagtggacactcgaagagagagacgaagcaaagagtgtacttgagtttgaggtctatggaagcgatatgtctcatgagagattttatttggaacgccaatgaccaaggatgtcaattctagactaaataaaggcaagcagggggagagaggaaagtgaatgttgaagaactaaggagaaagaaaaagtagcacaaggaaaaaagacaaacaaatttatataaattttaaaaataaataaaacttaaactacgtaaaccaataaaaagttgtcgctacttacctgacacttaaataatcaagtacttatgaaagttaaaaaaattaacaaaatatacttttaccattaaaaacatttattaggtatttttctacaactaagagttgtatttaaatattacaaattacacaaaataaaaaatatactcttgcattgtgcttttttggggattattttattatatcaactttttgataggtctgtttatttagaggttagtattgcacgtgtaaaagtagcttgctattaatattctaagagctatatggcttgcgagaacttgttgaacacttaagaatttattaagttgcacacaaataaaaaataagaactcttttatttttacactttaaaacaatttttttttataattttatgaaattcaacatagaaacccctattgcaactaacataacaacctaaattgcgaccaaaatgcatataacaacccacatagaaactaccttaaaaacccaaaccgtaaattagaaagaaaaaaaattaaaaaaaaaaataatatattggataatttcccaaaaaaatataataaaatttttatctatcaaccattgattaagagagaaactttgtctattagaaccatataccttaacagaataaattaactagtatgctataacacttataatttaggataaatatgattgtatgatataggtgtataattacaagtgatactttttgactcattaaatcacaagtgtagctctttttggctcgtattttaaaaccaacaatacttttagctcacaacaactctttttgtctcaatatccctgaattacaaggatatactcgttagaatttatttcactcttaatacaaagttagaacttaggatgacgatgaatgtatggtaaggtgcatgaaattttatctcaaaactaattgatgagaaaaatagcgcttaaatcttatattggtatatctttccatttattaacaatgtaaaattctctaataataatcaataagagttgttatactgaaagtaaatatccaatatttactattaaagctccaagttgaaggaaagatatttaccatcaatccatttattttagttgagaacttggagaccatcgatgttatttggaagtaacgtagtgtgctgaagtacatattaacgtgctcccatagttggttctggctgcaaacatgttggatagtaatagccaaaagaaaacactagtgaccttttgagcaatctatgtcgtacaagtgatgaggattcagccatgatagagcaaacatgagaaatttatatcctcaccattaagaataaaggaacaaaatgattcaatgatcattattaggtagacatgattaagattaggggtgggcaacatgttagaattaatgttatatggactaatataatcataggtttaataccataaacacaattattaactatgtgcctaatatttgttcactaccataatgggatggttaataatcatatattatg

SEQ ID NO: 115536 - DNA, 1614 bp, Cannabis sativa
  modified_base (1584)..(1588): a, c, t, g, unknown or other
aaattagctagatatccttaaaaagtaaataccatgatgagcaagtctaataaaaatatctcttttatgtttttttcttcttattatttcaatgtccatgcattgtcccaatttcgttggcaaatatccacttcctactcacaaatacttccttcattgccttaccgatcataatcattcttcgaaacacttacacaatatgtcaaaaatcatgtaactcctaaaaccttgtttctcttcatctttgttcttatcacaccactgcatcacttccatatgtccaagccaccatatattgctgtagaaaatgtgaaatgcagattagagtcgaagtagtggacatgattacaagggtctatcttcggtctttgaagtcccatttgttatactcaaatcaaatcaatctccaatcgattaatgttgacaaggaaaacaaaacttagtgtacttttactataagattgctgagaaaagcaacaatcttggcttcccagcatgtacttaagcaactatagttgttgactatgttaagaagatatggacttgcagctgataacataagattaagatgctgaaatagttggcatggaagaaagaattcttgatagaaaatctatgggggaagatttgttttgggtcattcacggcggtcgaagagcaagcttttgagttccctcttggaaacttgaacttgttccaattctatcatttgtgactgtctttacagtcaactggaactaggcacaaagtgctaacaagcttctcaatagatggcaatacatcgcagacaaatttgaagaagatttattcaccagactaccagatggtaaagaaagcaatacaagtttcagttaactccttgtttcttggtggtgtggtgacacttattcccttggtgagaaagagctttcctgagttgggtttggtttgagaagattggtttcaaatgagtttgattgtgttgtgattcatccatcacacaaatgttaatctaaaattgatttcaagaacattaattaatcatggacacaagaaatgtaaaacctgaatacaacattgacaaattaatagaagagaaaactaagatgaaattgggatcaatgttacagtaaatattcagccaccatggcactcctcttctttgttgattacttgagaattagatgacaagaacaaaggtagcaacactcaacaatgaagatgataagaattttctatcatttcggtacaaacaatagtaaagtagagataatagagatgatatattgatattagaagataaaagcaaacatgtttgctgggtattcaagagacccaactctctcccaagagctaaaagctcacttaactaaatcattcaccacccccttaccctccctactcactcatatatatagcataaattcctcccattacaattacccagttaccctctttatttattaccctaaggcctaacaatatcggtcgtccgaaattcaccttgtcctcaaggtgaagaacacaagcctccacaacaattctggctcgtgctttgtcaaagaaccaagatagcaggtgcatgttgttgttgggttttatgcnnnnnataaaactctttacaatctgattagt

SEQ ID NO: 115537 - DNA, 4289 bp, Cannabis sativa
  modified_base (839)..(847): a, c, t, g, unknown or other
  modified_base (1662)..(1662): a, c, t, g, unknown or other
  modified_base (1858)..(1858): a, c, t, g, unknown or other
gatcaaaatatgattgtttacattgtgaataaaaaaacaagcaaatgcaattatattaagttcgaatgaaaaaatagtacaaggcatttaagataagaaaaaagcctaagtcgggttacaaacttgtcagtaaaaaagtgccactaggggcaaaccattaagtcatcttcctaaacatggatgagaggagaaagaccgactacacatagcttggagaaagaccggctacatgtagtttgagaaagactgtctgcacgtagagagccttgatctctgcacagacctcattctcctgatcatcagaagatcccatttcttgaagccaagacctattttttagctttaggaaactcctctataccacaaagaggctggcgcaaaggtcctctagtgcaggcctaggatttctctctgatagaaaccacaccccaacttatctcctgggggtccacatccgaaaccatgccaaccttcttccaggattcctcgtcaactagaagaggacctctaagatcgctcacaagatctatgtctattcctgtggagacgaagaaaaaagattaatggagaaaaaaaagaaaacatacaaaatggtatgtataaaccaacttaaaccaccattcacaagggatgatactcacctgcaaagatcagttgtgaagatctcccatagcgggctgtgggactcccctgatttggatttttcggaagctcctcagccttggaatccattgtttccggttccaattgaggattgaagtccttgggaacaaatggaaaatggttggtgcatcctggtattatgagtttgggagggtgaacttctgaactcagaaggnnnnnnnnngcaagaaagagatgatccattctcaagatggatctcaccagagaaccaggactttgtgaaaaatgacaagcttgagccgcccttttatacacaaagtccagtgacaagaaagctaaggattgagaaatccaacggttggaaggaaaaatatgaagggacaattcataatgacccttgaaactgtacaaccgccaaaatccaaggatgtatttttcccaagaagggattctgacaaaaatgccctctgtaattattaaaaagttctttttactaaaaagaactttttaaggggcaattgttatattcaaaattcgattgccatctcagtggaggacacgtgtcaagataaagggaatatggatcggttcaatcgctttttatggaatacctcattaattacgtaagtatcagagtatatttttaatctatagattgtaaggtcttaggcaaggaactaatatacaaactagtacttagcatataagcgagaaaccatatgtcgctgaatgcgaattgcgaggcatcaaggacagtacacattagaagacgaaaacaacatatattaattacgaaagtccttagtgtacaaactaagtgttacagatggatcagctcaagaccaagtaagcaaggtgcccgtctcgttagtggaagacctcatgtaacttcatctcgttagcattagtgaggctcacaaccttggcaagtcgagaagctaacattcaaatgagcttcgaagaactctttgtaaataagaactgtgatcgacacaaggcatgcatcgtcgacctcggaaggaaaaatggccccagctngctattgagatcactggaaccaagcttctgtcgagacaactccagaaacaataattaaagacatgtttaaaacacgatcattttgacccagtaaaagagggaaaatcacagctatatgattttcaaatcataaactgcatttacattacacgatatgcaatccaatcccatgattttaaggatgattgttgtaaanatattacagtcaactttgtaattaactgtccactatgtaattataaatggtgacaaagaagttcgaaaaaggggcgaaaaaactcatacaagagatgccccaaaataatcaaaaatcttaataagattgactcgtggacttgtagaattttaactgtaaaaccacgtaaaaaattctgtgttcatatttttatttttacagcttttatattttctctatgaaatcactgctgtgaggctcaaatttagttaacgaaattctgcgttaaaaactaagttttgttgcagtgtctattgatataattaattctagtgatttgccctctttgtgttgttcgtaattagttttggtcaaattaccattttacccttcaaattacttatatatcatttagtaccgttagttcactagtaaaagtataatttagatccaatctaaatttgtgcacaacttttcatttctaaaattaacacttaaagggaaccaacattcgatctgtgaggaaagtttagattccataattgtagatcatgttctcagccatccatattattaaattctcaaaacaaaaatcgtaagaatcatctctactggaaaaatattgagtgaatcaaagaaactaataacatgaataggagttcattattactcatgatttagactggtctactattgatcatcattatgatatcaattcggtctttataataaacgacatgtttgataaaagtagcttaaagacatatcgatccatgtcatatttaatctctattatatataaaaccttcacttagatgtcatactacatcaacaatctaaatcgagattgcttacaccaaataacaggcataagtgaaccatactagcaacaattgattaaagattccataactttaatatgttgctgctattttattcatggctaagtgatcttaattcttcttacaataaaagtcacaacctcatttataaataagaatttttttgatatttatatgtaaattatttaatattcaagcatatatgtaaatgttcaacttatatttataaataaaaatatctttacagaattttcaaggcataaaccctaataataggtatctatgttggatgaatatggcatcattgatacgaaatatatattttgctgatagagacaaaactcattatcaatgggaggagactttattcagagggacgttctatggtcatgccaaccactcaaaggtgtgagttgataaattcacaattgaagatattaatactacataattactcactgcgagactttgtgtctcaaattgaccattccatcagcacaatctggtacaatgaacatgccaatgatttcaaaagtatggatgtgtctcattaacttatgaccaaacatttgctaccttattacaaaaaggctgctcaaatttttactataaatatctattataaggtagatgctcaaattgatgaacaacaaccatatttaatatctaattgagaggaccatgccactcaatgcatttactctttcgtaagattcgaacatggtccatcaagacacagaattcaacacacaaaatagaccaatgagtttaattattcgtgtttgttgtgttgagagtgaaggtataccatgtaagcatatatggtgtgtaattcaaaatttggacgaaaaaaatatacccgaatctctcactcttaatcagtggcgaaagggtgtcaagacttctgccacagtagaatccctaacacaacaactggacgacaaaagctaaccctaaaattaaggtgatcaaatatttatgtgacattatttttattttcaaataataacattattatatgtctttataatcttacatggattgatgaatggtggttggtaattaatagttttaagataggaacaattatatatagttaactaatctaaatgttttatgtactacataatgataattgagtaacacgtatagtgcacttagctcatattcaaactttaattaatgagctattatgcatcacacaatgtagatgctttcaaaatggaaaagagttagattcctaggtcggtaagcatattcaaagagaaataagaaatcgttgaaggtgaacaaacttgcacaacgaaagcaccaaggactcatcatgacaatccttatattatacaagatccaattaaggtgcaaataaaaggatccagtactccaatcaattttttttaaaaaaaaaacatcaaaaggaagaggacctatttcaaatgatatgctacaaccaagtggcgatgcacagtgtgtggtgtgaagaaatgaaggtgacatggatgctgagttgcctatgatttggcaatccttctgctccaatatactggaaaaatatccctgaaaggatattcactaaagtacaaattctgttatacctttttgtatattgt

SEQ ID NO: 115538 - DNA, 2043 bp, Cannabis sativa
  modified_base (1948)..(1956): a, c, t, g, unknown or other
gtgcattttatttcctttactttttattggtttaaataagttcctcatgtcatgaggaagaatgggccggtcctacatcagaacttccctataattatatactttcatttttttttatataattatatcatgttttttacgtattcgtttgaccaagtaaattattcaacctcttaaccattgtaacagaaacgaaatagaggagagaaagagagaatgagagaaagtctcttattgattaagcaaagctttacaattatatatacacacatgattaaagaaccacaacaacaaacttttaaccaattgtaactaacaagagacacttaggtagttaaatccttactaaccaagctaactaatcaaacttagaattagtaggatcaccaattgtgaatttgtgtggaaaagatgagaacagttgacttgatataggcttggttaaaccatcaccatctaattcaatgttggaacatgcttgacctagaccagttgttgaagaattttctctcggacaaagtagagattcagttcgatatgtttggtgcgagcgtgcaaaactagatttgatgtgaggagaacagtgcttagattatcacaccatactatataggacatttaggcaatgtgatatccagctcaataaacaaagaatgcatccaagtaagtttagtgacagcttgagcaaggcttcaaaattcagcttcagtgctactttgagacactgtatattgtttcttacattgccaaacaacaagattagaaccaaagaatatagcataaatagatgtagatcgtttgtcatcacgatctgtggcccaatttacatcacaaaatgcaataagctcatagtgttatgattttctaagatgaatgccataatccatggtaccactatgatatttcagaattctctgaactgcttgccaatgagattgcaggggattggccatgaattgtcagactttattgacactgaataatatctctggtcttgtgattaccaagtattgtaaggctctaactatagattgatattgttgaggactctcaacatggggactaccataagctaagagtttagaccactaaccattagtgtattggatggcttggcttatccatatcatctttgtggagaagatctctaacatatttggcttgagacaagtgcaaacctgttgatgtagttgtaaccacaatgccaagaaagaaatgaaagtttcctagatccttgagagaaaatttggcatttagagaagttgtgtaatgagaaataagcttgggatcattgtctgtgatgataatatcatcaacatatatcaaaataaatgtcatggaaagaggagtatgccttatgaagagactgtgatcagatttttaagaaacaaaacccaatggcaaaaaatagtgatgtaatttctcaaaacatgcaggagggacttgtttgaggccatacaaagccttgtgcaacttgcatacaagctttggagaattaggttgttcagaactaggaggttgcaacatgtacacctcttcatgtaactcaccatttaaaaatgtattgttaacatcaagctactttatcttccagcctttggatagagcaagagtaagaacaactttgatagtgacaagtttaacaatagggctaaaagtctctgtgcaatcgaaagccaggttattgatggaaacctttagcaactaatctaggtttgaacttgagaacactgccatcaaagttttctttaattatatacacacatttgcatccaattgcagtcctgccaggtggtggtttgacaagagtgtatgttttgttcctttttaaagcaagaatctcttctatcataactttattccattgtaattgtttaagagcttgcttgagtggtgtgggaatttgagtatctaaataagctttatgttagaacttattttaccaggnnnnnnnnntactaacatgtatgtttgattaacacactaaatatgaattctctaaaacaatgaaataaacacagataaagtttagaaaaccttaca

SEQ ID NO: 115539 - DNA, 2812 bp, Cannabis sativa
  modified_base (2771)..(2786): a, c, t, g, unknown or other
atcagaagtaaattatattttacctgcgcaaaactaaacttttaccagcacataaaagtgacatttcttatttaccaaaaaaaaaaatatatttcttgtagtgggtatatgtttctatgtacgtacataaaaaataattaaaaatatatatatatgtgtgtgatggtatttctaaaaaaaattatttgaaatttctgtactatttgcaacatgttattagtaaaatgcaaatttgtaagaaaaaaaatgtgtctatgttatcagtgttttcgaatgaggacacgtgtaattttaaaagtggtactagcttaattacttcacgcccaatggcacgctcaactaagataatgagtcagattcattagcaaagtcatcttttccaggtgatatggacagatgaatcgtcctgtcgagacaattctccagcacagtgtgaatctgaaaaacatcagttagagcatccggagaagtaatcagcaagcatctagacatccagctccatatcatattcattagttaccagatctcacgatatcaggacttaactcccaagatctcatctgatgatcatattttccaagaatagaaagatagtaattagcgatcaaacatttaatgtgtctttattatctacaaaagtatgacactgttttgacatctatcaatatgatgtggcatccacatcagcatacagcatatccctcatgtgttgggctccattagatgggcccaagttattttattatttatatttaccccatcattgggaaagtctcacgattaagaaccctagcactataaatataagaatactcattcatgaaaatggttggaatctcattcctcaaattgctcaagtgaattttagggtttaaacacttgattaaatcataaggcttttccagtcttatcataataatatatacatgtggactaaggctcgttaacgctccaactatgtaaaagactctggtgttatttcgttattattcatctatttctttatctttcacatatattttattggtttctaaaaatctcagtaaatatattgctgctttcattaagagctgaagaaagtaatgagatacaatcaaagtttgtatacagcaaccttggtactcacacgaaacaaaactagcggttgcgatggatacactcctatggatgatgtagatcctgctacttaggcaaagataagagttgatagagatccaacagaagcaaccagttctcttggtaaaaagactcaacgtaatgaaaaatatgttgataaaaatcccatcaatgaggattgagagaaagatcctgagggcgacaatcctaaagatggtggaaaagataaagaagatgaggaatattattacgagccaaatcttgtagtcgttggaatggccaaagaactcgctaaaaccaagctgaaattggcggcacaagaaaaattctcccaccaaatgcaagaaaccttggccagactgaaggccgaatttgagccagagaatgtggtttccgatgaagatatttcttatgatcctactcctcaggacaataatactacaaagagaatggaccttaaagatctcagagcttttgatccaaacaagggtgaaggaaaaggtgtcatgcgagaacctccaagaaagactgctccaactgctccgcacaacaacacgaatgatgtcggccaacctctgcataaaaagaaggtagccaatgctccagggtaaggcaatcgtattgatttaagaggctaagttgtgcaaaataataggcctagttatcaagtacaaaattctactgtttgctaaagaaaaaaatcatcctagtaattttttttgagcggaccaatgatggggcaaataaaactcattcactttcttgtggatgtctttcaataaatgacctcccagaacgtttaaatacgaagaaagaaaatgctaaaggtgagagtgcaaggccccacagaaacgacctcagaaaccacatcaatggccaagtttgtgaatgtgaatcctaagacgccaaaacgaaacacctcaaagatcaaattactgatttaaccaagtttgtagaatgtcttgcccaaaagcaaaatgggacaatatctaattcagaagaagaagatacaaaactatgtgtaagaagaatgatagaggcacccttgtcgaaacactttagaatgcctcagatggagctgtacgaaagcaagatggacccaagggcccacttatctaaatacatctgacagatgcaagtagcaaaagcaagtgattacgcaaatgactctattttttattgaatttgaaaaaatctgctaaagactggtggaagagattatctgctggatctgttcatagatgtaaggatctacaaataatgtttaagatgcaattcatacccacaaaggattatgacatggagatcgatgcatcaagcgacaactaggagagagtctctaaaagtacattcagagaatgatggatgcatctgccaaaactaaagttaatgactatatgaagttcgtggccttaacctgagggatatttactggatcatttttgtggggagaattacaatgaaagaggtttgacactttatttgatttcttataaagggtctaaggtttcattaatttggaagaagtttatgttcacgcatatggagtacttccagttgttgagttttgtgccctaaataaaacttatttcaatataatcagatttaattactaattagtataagatcgaaaatcacttttatgttgcatggtnnnnnnnnnnnnnnnnatgattatatttaatgtataaattct

SEQ ID NO: 115540 - DNA, 3047 bp, Cannabis sativa
  modified_base (429)..(446): a, c, t, g, unknown or other
ttggtatattctgttaaatacacaagaatctgttaagtgcacaacaaaataagttagatagccattttatatattaggtaagatatatatatatataatattaagcccagtttttattaaatgcaatgattcgaaatgtaaccttgtgggataaacatgtatatattataaacaaaattatagatagaatgtcaaaagagatgtttgtatcagattaattttctcattttaaaagagaaaaaatcagttacatgcagatcgaatttgatcgagcaatactttacccatttgtaattgaatttttgtagctccaagtttgtaaagtgtttaattgatagtgcatacaattttatttgattacaaaaaagattaataaaatccttgaggtggtataaggaggctagttatatcttattattattattattnnnnnnnnnnnnnnnnnnattattattattattattttgactaaaattgagattatgtattattttgagaaatacaaaatctgattttatttaacaaaaatatgaaatttgatcggtaacttttgtaaacacatataggatccaaaaatgacatttaactatattttatttagtgaaaaatcttccaagaaacactctcaaattaatgtttaacatcactaggatatatagataattttttttgttccaaaatatattaaatgtgaatgacttggctctctatctaggatatatagataattttttttgttccaaaatatattaaatgtgggagatgagttaattttttatgatatgttagcaatttttttttttaaaaaaaaaaaaaattatttggaacacattaattattttattttgaatattacaaacattattttattaacttttatatgatttattattttaacatagaaacaacataatatgtcatacatgtttctatttgtttatcgagctaattattaagagaggagataaagaaagaaaaatgaagatatataacaatattatatatataaggatatatgttatatatatatatatatatgagaagatgaaaagttgacaacgttggacagaaaaataaggatgatcatcaaatgaatcttaaaaaaaaaaaaaaattggtccacacaactcccaataactttacagtagtcggccattgctataagaattatataaataaataaataaatgtttttactaattaagagaatccacaatatatattagaaccttttgatgttacaaaagctaaaagagagaatataagttataactataaatagagccataaattgttgaatgtcagccaccaaattatataaccaaaactcatcaaaccctcttcttctctctgatctctctctacatatatttatatatagttgttatatatataaatggctaatagggatcctcttgtggttgggagagtgataagtgatgtgttggaccctttcacgaaaactgtgtctcttaaagtatcatatactgggaatagggctattaacaatggtactgaccttagaccttctcaagttgctaactcacctagggttgagattggtggagatgatctcaggactttctacactttggtcagttatttatatctatatatatatatatatatatatatcttcactactctatcttcataataaatcattgataaattaatgtataattaatactgttaatgttgcaggttatggttgatcctgatgctcctaaccctagcgaacctaatcttaaagaatatttgcattggtatgtacttagtaatatatcctcatataattttatttgataatttttagagaatattactaacaaatcaaaggcacgtcaataagtgtgtgccactaataattattaacttttatttttcttaatttagtttaaatttaattaaagtgtataattttttcaggttggtgactgatattcctgcaactacaggaacaggctttggtacatatttatacactcattttttttgttaatatttatgcacaaaacacaattataatttattttacagaactaataacaccaataagttaacgataagttaacaacgttattttaagaagttaaaaaaatgtttaatcaagaattatcattcgataattatttttaatatataaagatatatattctatgtgtgatgatttaatgatgtgcgtatatacgcatatatgtaggacaagaagtgatgtgctacgagagcccaagaccgacggtgggaattcatcgctatgtgtttgttctgtttcggcagttaggaaggcagacagtgtatgcacctgggtggcgacacaacttcaacacaagagattttgctgagatctacaaccttggattgcctgttgctgccgtttacttcaactgccaaaaggaacttggctgtggtggaaggaggtcatcaacatgataaatattaattatatatactaatcataatcataatctatccatctatctatctatatatgtcatattattatatattgaataatgcttgagacacaacaactacaactattaatatttatatatattctataagttattgatctatctatatatagttgtgatttctcttgtaataataaaacagtagtattataattaagctagctaacactattgtactacagatatataatatatgaaattgagttgtaaatgtttcacgtactacgcatctagcaatatttaatatttttataaatattaaaattactagatgttaagttgtaaatgtttatgatgtatcatcaataatatatatatggatgcttcttgttacttattaccatcttcattatatattattattaattagttttgtttttcaatttgtatatacttaaccaataaaaatattataagaaaaaaaaattaaaaaactatggtacacgagattttttttttttttttttttttgaaaattaatgttggagattattttaccatgatctttactactatgatgttatttaacatcctaaatataaatttctaaaacaatagaatttaaacaca

SEQ ID NO: 115541 - DNA, 5362 bp, Cannabis sativa
  modified_base (40)..(69): a, c, t, g, unknown or other
aacattaaatgttatttcttatctatattaataagtaaannnnnnnnnnnnnnnnnnnnnnnnnnnnnnggcataaaacccaacagttaatcccaaaattgtattttagctttagaatcttctagagggcttgctgtggacctcgcgacttgttcagcctattaggagttgcctgcaagttctagtcgatcagccctatttttagggtctatcaagcatgtgtgtctgccttggctagccaaccttgtttttagggtctgtgtggcatgtccgtctaccttggctagccaacccttatttgggggcgtgatttagcatattcatacaactttgtgtttagcttctttgtaaagctttgtcgtacaacttctccatacaactttgcaattcatcttctttgtacaactttgttgtccaatttggctagccagccttccttagttggccaggcctccatggtcaggcagacctccttggtcggaaaaccttccttggccggccagctatggtccggccagtgtctaaagacttgtcttgttcttaccttggaagctgcatggagtgtacctgtctggttattgattggttgtcttccacgtgtcttctattttgactatgtggacatgccacatcttgtgggtgaaaattaggataataaagggaatgaagatcaaccccttgctcaggcagagcaaattgttgaaggcaaagaaattgctcaggcggagcaactaacggaggccccctaaaaggtcacacatgtggagctagatagcttatgcaaatcagtgagacaccttgcgatcgtagacaagactctcaatagagatagactgtctccactcacaagaaggatcatggcattggccatcctaaaatttacgatgctactaagatggactacgtatacgagaaaggatgatcatctttctgaactacataattttgaagtgcagactaatctataaagtatttgacatgattctcgatgtcagatctttctagctatgttgttagaaatagcacaacaatggtatatcaagcttcctctgggatctattgattcttagggtgcatttgcaagagcattctatgaccttctcactatcaaggcatagaccaatcgaggcatccactcaaaagaaagtactcagttaagatgcaatgattcttagaggcatccactcaaaggagcaagaccagcctttaaagaattacatgcaatgattcttagaggcatccactcaaaagaaagtactcagtcatgaagatgctaaagttatggcaatggcagtaggacttactcctatgagttcattctagcaggacttgaaactcaaagcagtgtatactgttcaagaattttagacagagctgatggcttcatcaagctcgaagaggccaccaagaaggccggtgatgttgatccatcactaattgcacattactttgcttatccacctccccagtctcaaattgatacttatcaggaagatgaggcatcaacatctagtacctccactgaatcaggttccccctctgtctcccatcatacctcaagtagggggcagcgatgaagaatcaccatctgctttcaaagatgactcaaacccggcgagaagtgttgaggttactccctctatttctcatgatgactaggaataaagggcatcgacgaagacgtttctgtaagtctcatgattatagtgagcaagaagtgacactgaggagtcccaatgataaaagggagaacctcatgttgtcatggaaacattagtacccagaaaatgcatagttggcacgctaatttccccaacatgattccagtgtcagtaccaaggaactagattagggagcatctgagatgatccctaaaatcgtattgttcttcaacagtggtccattttatactttgcaagtggatgaaaagtcacctactgattcgaagataccctgtacaatctctctttatagatcaacaggattcacatcattaatgcatgatgatccctacaccagtatagtggataagcttttttgaataaatgaggcctacatagccgtctcatttatatttttcaaattagctaaagacccgcaatcaccgtctcctagcacttgattattaatataatgaataaagcattggattattactttttggtacttcaattttaatcaatcatttgtgcctcacaagtcaacctggatatgtggctttgagataaccttagttgtcactttagtgagttaacactgctaagtcacaagtctccagatgagcgacactaatgtgattggatccaatagatatacataaaatactatggataaaacagatgcagtcaaatatttttgattggatcgattggaataattgaaattgtatggattgtatcggtaaaaaaaatgtaacattctatgtatgattggattagatctaaattggcttaaatacactaaatgtggcctaaaaaatacccctaaatatagttctttaaggttgcttttacaaagtattatcagtttttttaaaaaaaaaaactgtgatcaagatcacattaggtattatcacttactttagttgttgcatgttgtaagatagtacaaagaaaaaatagaacaatgaccatcttctcatgtgtatatatagcccaacatttgcgatattctcttgagaaattacgcttgggcaaaaaatatttttactataagtttaaataagttcatttaagtgttttaaaatattgtaaatggttaagtgtgcacacacaaattgttttttttttttcaacttatacgaatatttgatatttgttaataaaaatgttttcttttcatgctattgtttgtcttatatttcaggtcattataattaagttgagtttatgatttggtataactgtttgtaatatcccaaaaaatataataatatttatttggacatattttattaaatgtgtaattatatgaatattggagaaattataatctcacttaagataattatgggttaattagtggatttcgagtaaatgaacaaataaagcgtaatttatttatttcgaagattttatcggattatggggtattgtagatacccttttttaaaaaaaaaaattaaatatttgtgggttagcgaccgtagaaacttgacagattggtcggaaatgtcacgacattaaaggatgagttgaattggaaatagaccgaactagtttaaaattttaagttttcggtttggcgaattagttagaaattacttaaatacccctaagtatagtatagtttaagtttggtgggaggggtaggatggtctttttcaaaagttaattcttttgtctcctagtgattagttaggctaaaatctagtgttagaaaaaggattttatgcggaaagttattttgggaataaaaagataacttagaaattgagaaaaataaaaagagtaacccttttcttcttctcccttccttcgaacctagaggatcagcatactagggggattttcttcttcaatttactcagtttcagtgttcttgcaagagcttgaggctgtccaagctttgaggtgagttttcttggtgtttgtttggagatttcttaagtttaagctagttcttgatatgagttttctgattttggaactatggtattaggttgagtttaaattatgtttataggcctgatttagagcttacttaagtttagattaagtgtatttgatggatgcttggttaggaattagaaattttggtttaaaaacctaatttttgattctaacatggtggattggatatagtgctgaatttgtgagaattgtttgattgtatacattatatgtgtgttattgaactgttctagagctgtgtaccaggttttgatgggggttggttcgagttttggagggaagaaccttgattttttgtggtctgccagaaccggtcgaccggtttgttctggtgcaccagaactggtcgatcggttgtctatagagggaattcttaggttttttctcgagttctgttttggctcgaggttgtacctaatgtctgatttaggttatttatgtatcgaaaggcctattttgggattgttggagattcgggttgtccagtttagatttcgagttttatttctagagttttggtttcgatacttattgagttttgtatgttgtgatatagggttgggattgtccagctctgtttccactcaggtcagcccgcacacttgatttctggactgaggtaagaaaagtgacacgtactacttatggttaaataattaacgactgtgattgataaagtctcgattataatggatacctgtttatgtgtttgttatgccttggctatgaccaaaggttggaaacagtcaatactgttatgagtaactactcttgaaaccgcagttaggtttcttacttgtcgtttgttgtatcgggcaatgatagtgacatacgtagctcgtggataacgagtggtaaggttagaaatggtcattatcgttatgagtaattacttgttgaaaccgcagttaggtttcttacttatcgttcgctttatcgggcaatgatagtgacatacgcagctcgtggataatgagtggtgaggattggaaacgatcattaccgttatgagtaattattcttgaaatcggagataggttttttacttatcgtttgccgtatcgggcaacgatagtgacatatgtagctcgtggttaacgagtggtaaggatactttatgaagtaccacgattgtgtgattacgatgatgtgaaatgaattaagcatgttattatgtgatgagttgtaatcagatacatctttgttataatgtgaatgaatgaattttatattgcttatgaaagtagcctcttttcttgcatagtctcagtgattcacaggatgtaagaatacatgtttatagggatgtaagattagagtgatttacgaggcactaaaaatatgtgattgtgtattgactgaatatttgattagtgtaatgataaagctattcacggcaagatgctatgatatttttatattgtgtaatatacgggttcgtatagacgttatttatatatgaaggttgaatagataatgaatcacgagtatgtatgttatgttatgataagaatacttgtgtttttattgcttttgatttaatagctttaattgctgagtcattgtgactcacgggtgcttcatggtgcaggtaaaaaggttaaaagttgtgctcagccatgattcagaggtcttccagcggtgtacatgtcagccgcgtagtcttggattttgagaagcacgatcaatccttttctatgattggaaatgttgttaggttttatgcccta

SEQ ID NO: 115542 - DNA, 4633 bp, Cannabis sativa
  modified_base (4046)..(4046): a, c, t, g, unknown or other
agcagatcttaattgggcctcggcccacaagagatgctaaagtacgtatgtaaatggagtgagagagtgtgttacacttcttgttgccttccaggatgtcttttcttgtttttcttccctgtctacaggaactaggctaatgatccaatatttggagttttaaaaataaaaatgaataaatattatcattattagagaagaaaatgacagaaagtgactatgtataccctacttattgatcgatacaatattaatatttaatccaagttgctccttttgacaaagtattatgattttattggattaatttaattagaaaaaaaaaaaaaagcattttgaaattcagattatgttaggctttgttttatagaagaaaagaacaatcgcatcacatgaaaagaagttctccatttctagactaatctctatatagatataatttaaatataaattttagtgcaacttgaaatataatgacgaaaatgaaaaatgagaatagttaataaatggattgtggcaaaggcaccacgtcgtagtcgtagacatgaaatattattaagtcacatcaagaacattattacctgtttgtggtcgtgcacctattccttcctatactattactatatttacatcattaatgtcatgaaactgaaacccaacagttactggcttttcgattctccaagtatcctctcccatgtggataatatatatggtccctcctcattccaaatatttggagtagactacatatatttcatactcaacctaaagattcatcaattttttttcacttttttttcctttattttttgtcactgagatagatgtaaatcttattacaagaccattagagcattcttactaatcactatagtctataatacatcattctctatattgataatttatggcaaaaacccaccattccactaactcatttattctctatttacttttgtttttattttgtatgaattaaattgagaaattgatatatataaatttgtataaattagataaaaaaaaattgatattgatatagattgattgagttttttggtaactaataattaaaattatataaagtatttaataaaagttaaaagaaaaattttttacgtggttaggacattaatgagttttactttaggagtcactgtatttatgagaatattgatcactatttctgtttattattgggatatttataggctcataatggtggtaaaataccgctattgttgtgtttgtgtacgtcggtcggtttggtcagtttacgttacattttatttaacccaatgaaaagatcgggttagaaaaatctaattagtgcaatccacccaattaagaaaaaaaagtttcagtccgcccaatgaattggtcagtttagtcgggttaacccgtctaaactgagcactaatgtttattttttttttcacattcaattgttatactttagttattgtgataatgagataaatataaagattgaatttaaagttcaaatcatccaccataaaaaaaaaatatagttgtttgaacattttatttttataaatatgtatataaattatataatatatagattatatataataaaaacatatatatataaaaacactcttaatcgggttagttgggttaattcgggttgattgggcaggttggtattatttttaacccacccaatataaagattgggcggttatatttccgccgggttatctcggtttggtttgagggagttgtttgggttgggcaatttacaaaaatttatgtacagccctagtttgcaccatacttggcacaaatttcctaatctatttcagggcatagttgactatatttatggtagattttggattgtctataggtgtttggtgggaattgacttatcacttatttatgacttgacgactcatttatgtagtcattgattaatgtatggggtctcgtgaaatcagaaaatgatgggcttaaactcttaaacacgcttgtcaaagtaaggcgtctgatgctcttccccatgccgcatcaaatgcatgtatagtgtcttggtccttgagtaacatgtcacatttcattagtcctctcgtattaccctccagatatacttcactcttggagggtaaaagacgaaagatgctcgcggtctagctggactctcccgaagatgactaatttgtcattactcatttgaaataatagactctgagagtaattaaggcgacatgtcctataatgtgggtcccgttattgccacctagcttatcctgaactgcaatgtattttaaaagaaattctaggcaacattaaccccaaagtctttttttgcaatttcacaagatgggacttgcgatgtgcctcctagagtgctgacgtcatgttgcgcgtgatcattttaaatactgctcattaattttcctcatttttgataaaaataatttgatttctttatcgattctgatgccattaattgtaggatgtcagaaggacacttgagtagtataaccgtcctttttatggttgtccatatgccagctaccactctaactgttggatggtgaggcttttaatctttgaattaagatcgttggatcactaacaatccatgtcgccttagctggtatataaaaacccctcatctcttctttaagattttactctcatatcttttaaaatcttcaaaccagtcaaaacttttagtagcccagattttcttttactttttctttgacgttgtcaagctcaatttaaccgacattttgcaccagcatccacaactactcgactttcccctatttgtaagaactagctttacgagcttctttttatttcatttctgcaacttcatttgataatatgcttgcatgaatgtgttgttggtactatatctgtgattcttcgccattttcctaattcgtctttagtttttatctttaggcaagagattcttgtattagggataataggattcgccttttttctttcccatcccctgcaccatcatttttcatcatggtgctgtttgcacccgatgcatagcacagacaatttttgttttcgactatgcttgcatccaaagagggcctcttctcagcggttaggggactcccattcccttttgtttaagatttgatataggggctaactgctttcttgacttttcaaatgagtgacatcttaagggattttcacaaacacaaattctgcactttcgaaaaagagatttagaacatcattcacaaactaggatgttaaaccctgaagctcctgcccaaacttcttcccaagctgtattactacagtatcatgtggtgccactatctatggtgatgcagggtccaatcccggtccctaactatgtacaccaagctaccagttgggaagctaaggagctgcactcgtccatgggttgcatccaccacctgggaaccattatgtgtgagaatggaatcatacccttggactaggggtgtttcaccgtgtggcccgggagacaaagactcctaaccacaactattaagggtttggggcatggagccaagcacacctcatttccagcgtgatgcttctgctccaaacattattttgtaaattttttggttttcgtaggactcgctccatatcagttgataccccaaggatacccgcctatgtcaggcttatttattttttatactttaaggagttggtctgctcccatccccactaatattttatactgttgtgaacttttttcgatccccaagaagggagatagacggaaggatggtttctactccctccatgctcatctagacaacgagatggtcaacccgttcaacttccaaaagaacgtcaaggactgtcgtcattgagtcttcttttctttcagttttaaagcctttgaacatcctgatctcttaactgagtggactcaggaagagttacaaagacggcagcatggctcaggaagagcttggttggagcttatctgactaggtctcccacattaagctcttccctggtaagagttacaaagacggcagcatggctcaggnagagcttggttggagcttatctgactaggtctcccacattaagctcctccctgggaagagttacaaagacggcagcatggctcaggtagagcttggttggagcttatctgactaggtctcccacacattaagctcctccctggtaagagttacaaagacggcagcatggctcaggaagagcttggttggagcttatttattctgccaataaaaaattattaattaattcgcattaatctcttattttacaaggattaaaataaatattattttctctaaaataaaaattaaaatatttctctctttaatattatttaaaaataatattatatttaactaattaatatagttttatctaataaaactaaattgttaaatactattaattatacgattcataattgttataattaatcaaaactataatttcataaattactattttacccttaagaatttatttctcatagaaataaactctcactcaaatttactcatcaaataaaactttcccctatacagtgttatttagaggtggctcggagaccatggacctatattttgaagctctaataaacacttgatta

SEQ ID NO: 115543 - DNA, 3044 bp, Cannabis sativa
  modified_base (1010)..(1011): a, c, t, g, unknown or other
tgtaaaaatctatgtaattaacttatgaaaaatggcttttgggcatcatgcaatgaaaacaaaagcaatgtacatttgactttacactttacgtttttaggccacaagcgatgtttaaaataagcgaccaggaaggtggagatattcatacttctcagttcacttggtggtatcatgcttagccatctgtgcccccaaacaccacatcgtgtgtcgcattttgttgttttaattactctgtttttcaatatttataattcattagttaaggcaagatgcattttcaactaaattccttaaaaaggaaaatagcttgaattgcttcttaaagctagaataaatacactcattttaaagaaggaagcgttttcagcaaaaatttcctaaacaggaaatactcgcctgaattccttctcagaaattttcaaaaaaaatgagtcttttaagaaaaggctttgcttgaactcctacagacttcggctttatcctgattaggaaaaatgtcgccccaatcctgtagcgtgtgaaaccagccttcttgaattataaaaaggtctacacatccaaggaatatcaaggctccgtgatcataaagtgatcaggaacaacctagaaaaccattcgtgttttcaacagctttagttgtcctaagaaatttttaaaagggtcaagacaaaaaccatcctacttggcaagacgaagcatgtacttcttaaagtatctcctaattcagcaaaagattaaaatatcgactaatgtcaaagggtttaaagtgatggtcattggaaccacacacttctaaacagcataagaagacaacccttaaaattactatacatgccaacacataaagtaaagagttgaaaacagtacaaaatattaaagtctaagcacactgcttcacaaaaagaacaaaccaaggcgttcctgcaggcacgtgtcacatacagccccacagattgggctaaagtaaatacaactccacgacatagagagagagagagagaganngagagagagagagatagagagaggatttagaattgtcttaaaggaacatatagaagaggaaaaaaacaaaggaggcccctatcggtctggggcaagagaaggcgctgctaagtcaattgggactggggcattagttggctcctatagctctaggtttggctcagcgggatcttaagcaaacacttcctcgaccctgcaagaagacacctcagcttttgcaaactcctgagaactcgagactttagcacttgtttcctcatcactgttgctatcaactacgagaggaaactccttgagatatgtgttgttctgcgtagtgagtactcttctagtaacctcttccctgtctgtctcattaataagccgaagtatggaagggtctaccttccataagttgtgaaggactaccacataagacatctccaaggtgcgaaggcaatatctctccaccctagttcctgccctatcagccactttacctgtgtcctgaatgagttggggacagcttccctcattttatgcatggtagctaaagcaatatatgccttcacaccatttgctggactctggtcgactctcttttgtaatctatccatggtcttttgttaaagttcatagttatgacaggccctttccaaaagaagctccaaattaccatgatgtgcttcccaagaatctgcccatttcttctcattgtcgtgttcaacccggaggtcttgaatgtgtaaatccttttttatggatgtcctcttggaagcctatgacctattggatttgggtattgattgtttgggactgaagaaggacgtgggccttagcaacgtccctctcatttgttgctttggctatgtcctctcgaagggagcgtacagtcttctcagcatcttgctcaatttaggctttgtgatcgaaatacattttcagatatttggcgtcccacttctcctcctcgactgccagcttggccttccaatcttcttgaatcctttggttgttggaggctgcttgagtttcggcctgctcaactctagcgcgtaaggcctcatttttggtagtcatggactgaactttggcatgaagtttgtttaattctatggtcacattccccacttctttggtggtccaatcagcaaacaataccatttgaagaaaagaagatagagataaattactaggcctatctttgtaataaaagttgtaccacaactaagagtaaattacagagttgagacttacccctacaatctgttgtctagcggctattgacagtgtgtatagattaacactgctgctcactgcccacttgtccgaagtaagatcgctcacactaaggcctatgctgtccaacattttcggagcataagggacgcaaactctgcccaccttaggtaccaaattgtgactaactgcagttagatctaacactgggccgagagaggaaggttgtcggatcccctctacagtcttggccgtcttgatagaagagaagcgagtagcccgcttctaaagatttacctacacttgctcacgacccttcttcaaaatggtggccttcttgagatattcgtggctgataggcagcctcatgagaaaggagaatcccaactaaggagccatacctcttccgacgggctaaggtgggttcttgttaaaactatgtacgcaagtatacgtagtgaaacaagtaataaaatgataagtaagatcgtctccacatattgcaaacaaaaatatgttgtaaaaccaactaattacaacttaaagtaaaaggaaaaaaaagtaaaatggttgaccaatgattcaaaattaacatgatagtaagtacttgctaaaattaatgctattgttgctagaaaaatgctttcaaaaagtgtaatatggtaaaaagtggcttgaataactaatccctcctatgctggtttttccaagatgttatagcattacctcagcactcgtgccagtgataacacaatttttatgtgtttatgagaattttaaaaaactcacaatttaagttctaccatctagattca

SEQ ID NO: 115544 - DNA, 969 bp, Cannabis sativa
gtacatgtcaaaattcgggaaaaaaattactaattagcttaaaaattaaaatcaatttttttaaatttttaataaaaataaaaaatatatatatataaaaaaaattgcatcttcggctattagacaaaaaaaatgggaacggttaaatactttaaacttcaaataattcataaatatctaagacaaggtgaacttttcgtgtatgcaaagcccccatgccttgttgattacataacaacttaagccatagggtatgactatgccttcgattacgtgacacccctttcgtttcatctcatctcgaacgcttttagttacgaattttgttaaaatcgaagctaaatgtccgaaaaaaaaaaaaccaaagttaaaaggttattttgtatattgaggaaattagactctatacctttttatattgtcttcttttatttttaccttctttttaaaattttattatttttacttcttttttaaaatattgtactaattttgtccttaaacattgtactaattttgtcctgtcacttcaagatactctctatgtgactcccttatgtaagggtattttaggtacaatatatataaaaagaggtatatttcaattaaataaaaattagaggtaaatttagttaattgattgataaaagaggcatttttcaacttacccatgttgtattagtgtcatatgactcttaatgaaggttctaatgaaaatatataacatgtactattacaaaaagatcctttttggtcaaatatttgtgacaaatatgaaaacaattgaggctattgaaaaatgggtggtttgtgaactaacaatacaaatgatttacaaccaaggttacaatgcaaaagcctattgcgtcagaattaattagggaaatttacaccctatactgttttttcccaatttataacttttttactgttgcacggcattttcaacatttatactgtttttttttt

SEQ ID NO: 115545 - DNA, 1158 bp, Cannabis sativa
gtagtgctggggggtagcgttgggagtgggcccccattccaaagctaggtgccttgagcctctgcttcttcctagcagaactgtcacctgttattttggaagaaccgattctctccatgttcacacttgatacacctgtcagaagtcaacacaatagcaaaaaagggtcctcgcatgaccctagaattcttaaagacggcagacacggaaccagtgttcctaaggcaactgcaccctcacaaatcccttaaaaatctaaaacaagtaagtagaaaagaaagcttaccagttatcaaaagaagtttggggctggtgatcttggtgtagtatcctcactggcgggatcagtgtcttactataaaggtgtcagtaaagtttcgacatgagaagaactggaacaaaagaactccgatatggaaaatagaaaaaatgaaaactgtggaatggttgttgaaggtgtgtactgggtaccaggaagaggcaccttccacgagaagtgaatgcttaaactcgctcacccaagagacatttgacggttggataagtgggaagttgaggaggtacatcacctcccaacagctggctcccatcattgcatgcatcgtcaaaagtactctacaaatggaaatcctgcacaagtccaatcactgccgtttttgggcaccccactaaacatgggcttggcacgggcgcaaaattcaaaagtcaacatttgaagccttgataagaaaatagaattaatcatgccttctgaataatgacactttagtttggtggcttgtgacgtaatgtaacaaaaagtttgtcataaatcccatgtgctcgaaaccactcaagggaagatactgcaagctcccaaaccatgttatgcctcaaaagcttgggggataaatgttatccgtgtttttcgtaagcatgacatgtggattctaattacaaagggctgaaaagtcattagctaccctaatcccttaataaatgctccgtgaagataaaggcatcaacctcgcaaaagagtctccgtgaagggaagttccctgactgctagccactcaaaggggattcgtgaaccaaaatccccctccattctaggagctaaggccatcaacctttgcgaggaccatggattgcccagaggggccaagacattctgaaaca

SEQ ID NO: 115546 - DNA, 2503 bp, Cannabis sativa
attaagaatagtggtcaccattcgtacgaacaactttacaatacaatagatgagagtgtcaaagaaaaagatttgaagaagtgtttcgacgaagaagtgatcgagtcctataatggcgacgatcttgcatggatgttgttcttggatggatgtttcatactccaattcatttacagcttttatggcgatggtgatgatggccaattcgaaaaatcttgccttaaaaaagaccaaattgcttttgtgtcgaacgatcttttcttgcttgaaaatcaaattccctttagagtgcttaatttattgataagtcattctattgttcgatttcgcattaaacttaaaaaaagtatgtggacatttattcatgcaagcgttatgacacccgaaaagaagataacaagtgcaccagatttacatgatcgtgttaatcatcttcttgattttcttcgattggaactcatacacgacgaatcctctaaacaacgtgatgaaacgaacattttcttgaaaagtatttcttctttttttagaggattatgcaaatttaaaactcggaatgtggaggaaaagaacaacattccaattagggatgacaagagcaatcatgacaaagtaaaagagccacaaaataagagtaagagaatgttttacattattttagagtcataattaataatgtttgcaaaataatgagtattttttattttatttttcccttagatctacaaatcatttttgtcacactattttatgtcatctagatatatatttttcttttcgataaatttcaatcacttacataatatttatctatttataattattttactaagtgttgagaatatttctgcaagtccttatatatttttttattttattcctataaattctacacctcttgtatttttaatttgttgattaatatattttttattattatctgtcgacacaaaaattattgtcaagattttttataaggtaattttcatttttatggggtagtttgggaaaatatagctagctctttcatttgaaaaaaattattatttcatgaaaaaaaaaaaagaggaaaacattaaaaatatggacaaaaaaatattattcggtaattgttcttttggatattttatttttcattttcaattttacaaatattgtataaaaacaatgtaattttcactttcttaaaattcattttcttaagacaaaaaaaggtattataacattatcatgcaaagtgaaatctttttagctattttaccatttggctatatttactattatgctaatttttttccatgtttttgaattttcatgtatggtatgctacaacagatcaagaagaagatgaaaataataaattatcacaacaattttttcgcagcgcgaccgatcttaaggcgtctggaatatctataaaaccgagcaagagtacttctttaaaaagcataagtttttccccgcttttctgtactgctgagttagagcttcctgcattgatagttgacgactcaacaatccctaaattcgttaacataattgcctacgaaatgtgtccagacaatttcaacacggattatgaagtaacatcttacatcagtatgctagatacactcattgattatgcgaccgatgtaaaagagttaaggtcagctaaagtacttaccaactatttgggctcggacaaagaattggctaggcgtttcaatgaaatcgcgagatatcttgtaccaaactctcaactataccaagatgtcgttaaccaaatcgaagatcattataggagcaacttcaagatttggattgctcaatttttgaatgaacatttctctagtccttggactttagcagcatttcttggtgctgtttttgtgatcattttaacccttcttcagacttggtacaccatttactctccaccaggtccttgtgatgatttctgtcatcaaaagaattagtcactattaattatacaaggtacaaatatatatatacttaattatcataattattattaggagaatgatttagtgtttatgcaaattaatttctattttttataataaaagaaagggatattttcgtaagactcacaaaatacgaatttacaatttttttaatatttttacggatttttttttacaaatatacagatagttttttttttttgtttgttttaaaaacaatggtattttcacgttattgctaatgtgaaaacaataatgtagttttctgaaaaaaaaaattatataggaaaaaaatttgtaaaaatataagtattttgtgtaaaaattcctcaaatataatatattaaaatgttaatctttttttctttacatcatacttaatattattcatgatgcatgattatcactacaaaaaaaaagtcacattttagtgaaaatattttaatcacaacataaattttttagagattatttcacaaatgcacaaaaataacaaaaaaattataaaaatacagtttcacggaattttaaacatt

SEQ ID NO: 115547 - DNA, 4042 bp, Cannabis sativa
  modified_base (3341)..(3348): a, c, t, g, unknown or other
atctagtcgtagtacacactcccaatgcatctggtcgtagtacatactcctctgcatctggtcatagtacatactcccatgcatctgagcgtagtacatactcccatgcatttggtcgtattacagactcctatgcatttggtcgtagtacacacttctatgtatctggtcatagtacatactcccaatgcatccggtcgtagtacacactcccatgcatctagttgtagtacacactcccatgcatctggtcgtagtacacacttccatgcatctggtcataatacagactcccatgcatttggtcgtagtacatactcacatgcttcaggtcgtaacacctactctatcatgcatatatcatgacaaacacaaacgagctgcttgtaatggtgccaaaaaagaatgggaaggcaacttataataagtaagctttgtataaaccacaaaaaaactaatttaggaggtaattgttatacccattttttggactatttaatgaataagttgaattgaatgccacgtggcataaacaagaaattctcacaataaatacattgagggacaggtccaaaaaaatttgacgactcaacctatgaggtgatctcatctaaataaggatcacaaagttcattaagtgaggtatttcagtattttcaggatgttattcgataaatattcaacatctcacaacaaagatcttgtagctgctcttaatacaaagccagtgatgaatcacctcctaatacacagcagtgatgaatcacatcataatacacagcagtgatgaatgacctcgtaatacacaacagtgatgaatgacctcgttatacacatcagtgatgaatcacctcctaatacacagcagtgataaatcacctcgtaatacacagcagtgataaatcgcctcctaatacacaacagtgatgaatcacctcgtaatacacagtagtgatcaatcacctcgtaatacacagtagtgatgaatcacctcgtaatacacagtagtgattaatcacctcataatacacaccagtgatgaatcaccttgtaatacacatgcagcaatgtattgcctcatattacacagcaacggtgcacctgccttcaaataacatgatctaaccaagtcaaatactactttaaagaccactttttatattttaaatataaagaagttatttatacttatccaaatattcagttatatgtgaaacgtgggcaataactacccatcaattgtaccttttcactaagataagattgagtaaccaccatcctattcctataaataggggttcactcaaagggaaaaagggagggaattcagatttacaaaaacttttccaaatcgtaaacacaacaaaaacatagaaataatatagactcgtggagtatgtagattttaactgcaaaaccacataagaatatctggtgttcatttgttattttactgtctcttctattcttgaatcaataatcttcttagattaacttgacaaaaaattgcgtcaatagttaccctcatctaacaccttacatatctcattacatggattttaggtctgagcaatgtacatttgttggctactttgctcatcataaatggtacctatgtgaaagctctcaagggaggatttacatataccagaatgcagtgtttgatgaaatacgcttccctgctgtcatcgtgcagacatcaccacttttttctcatgtactctcttctacttctatctccacactttttctcattctcattttctaacttgtatggttcatgctaatacctgtgtttttacttctccaccaccgattgagtctcccatcatacctaccacacaagttcagtcattaaacacatatatccacaactagaaattcattcccagacaaaacccttcctcaaacgtcctccataccacaaaaaaatgaccattatttaactgcaaccttttccaaaatagtttcccaatctatacagtccaatttaccacaaaaggaatcaatcccaaccaactatcctctactagttccaacaatcatatcattttctctagccacatctgatgtatctgcaagtcctacaatccttttcctacatagaactcatgccatgacaactcgttctctaaatggaatcaagacaccaaaagcatatttaacttccaagcatcctttatagaggccctttttcccaaggaaccaaggactctcaaggaagccttacaaaaaaaattcctagcagcaatgaatcatgaagtcaatgatgtggtgaaggctcatacctagacattggttccttaccacccccaaatgcatgtcatagacaacaaatggatttatcagatcaagctaaaagctgatggcaccttggaaagtataaatctcaattagtagcaaaggaatatttgcaaacaccaagtattgactgtgctcacatttagtcacgttgtgaagcatgcaactgtatgaatagctctctccctttctgtgactttaaaatgggaggttaaacagttagttttttataatgcatttctatatggagaactagaagaaatagtgttcatgaagcatcctccaggatttgtagatccctttaaatctatacgcctatcattttcataaggcgttgtatggtttagaacaagtaccacagacttggaatgaaaaattaaggaacccattacttcaataggggtttaaagcatcacaatcagatacatcccttttcatttttggctcaagttttatgtttgttatcctcttagtttatgtggatgatatcctcataattggccctaatacataattaaactccaagctcatcacagatctaaacacttccttttctgtaaaagatcttggccctgctcactattttcatggtgttgagatctacaaaaatgttatgggaatgtacctatctcaaagtaaatgtatagcataatttttagtcagttacaactttatggtgccaaaggttgtcctaatccaacaagttcaaagtttctttatctgatggtgaatcatttaaggatattacattgtataggagcaccgtcggtgccttacaatacttgaaaattactcgccagatgtagtatttattatcaataaacttagtcaatttattaaagctctaactattattcataaatcatgtaacaataagtgaagttgaaatatttatacttatataattaaattattatttaaataaccactttattttgaaaatttagggttgtcgaaacaatcttaaatatcttttcaaaatttatcttcaaaactaatttcaaaatatgtagggtttattttgaattattttatcaaannnnnnnnaatatctaataagataaatgatatgaaaataacatactagacatctttcatattattttttaatcttataatttaataaaattaaaatattcaaataaactaattttaaaataaatatggtaagataattattatttaaagaataaaataataaaagaaatgataattctcaaaattatatttcaaaatatcttatattaagtctttctcaaatttctacaaaaatatctaacttatttaaatatttaaaaaaataattagcatttttaccccctaaacttaaaacactacaaaattatgtcccctaaaatatatgctatgttaaaaatttttccaaaaatataacaaatacgttattacagtccttacgttaagttctatttaattttataattataatgaaatttatcattctcttattggctcacaaataaatattttcaaaataattatttaaattcatataaaaatacgtttaaattaataaaataataaaatatacaaacaaataatagcttatcgtatttcttataaaaatatatattatataaaatgattatattgttaaaaccattataacctaaataaaagtataattaaaaaaaagattagaaaccattcttcttagtctctctctccaacctgtaaatcttcatcttcctttttcttgtttttttttcttcttctcacctta

SEQ ID NO: 115548 - DNA, 3777 bp, Cannabis sativa
tattcttcttgctattttcttgttcatagttcttctttgctctcttgagtcttgtgggtacctagcatttcttttagcttggtaagtacaataattctatttcctttatgtgtactagccttttctaagaaattgtatggttgcttattaattttttcaaagtgttgttgttggccatagttatcgaaggtaaacgtgactatatatagtgaaggttaagtcaatgaaagatgaataaaattgaaacttgtatctaagaagagattagcgtggccatataaatgtaaaatatacaaatgaaaacataaaaaaatttaaatttttgttactccgtataaatgtacaattttgagataatatggtgtatggagtaaaaatccctactttaaaatgcaaccaaaaaaagtatagaataaaaattgtttcatttttattccattacatttcattacctccagccaaacaccaccttaatgtttatctttcacccctgaacttctgtaggtatccgccctcgggcccgaaccctggactacaaacccaaaccttggacccggctttggcccctgtcttgaccccgagacctggccccaaacccaaaaatggacacggacttggcccatgacccaaaccctagcccagccccaagctcggacctgactcgaacctagaactagaccccaaatccgaccttagacccagacatggaccccaatcccagaccctgaacctcagacccagcttctgcctcgaactccatccccaaacccgtgtatgtgagagaaaatataaaatatatatatatatatatttatatattagacaaaaaattatttttgaaaatacaaaacaatattttgatgttttctgatttttagtttttcttaactcactttttagaaattatttttaaaaaaatttagccaaacactctctactaatttttaaaaacaactttttgtttttaaaaaaagaaaacaatttttaagttatgaaatcaaacactcctatatttctatgccagcaatagctctcttagctcttatttagtttataatctatcaaaaaactaccagaggtgttcggtgtaagtgttttagtagaactttaattgagagaatttgagattaaggaaatttcgaacccgattgtttaaagagtttgaaattactcccaaaatatgcttaagaatttgatccacacaaacataagtcttccattaagaattttacattcccattctcaagaacgcaaacccccctaacaaatacctgtaatgagaaacaaaggccccagttgctggagtgattctataaagaaaatttgagtcaagtagtaagaaaagatttgtttgaatagtacatcacataacttcaatccgcataccaaaatttaccggattgatatgcaattcacagctttaacatattaataatcgcttttataaaactccccactaacttgttcataagttattccacagttgacatcgtataaccttttgccccatctgcaactccagtttgagaaactcacagctctgcatctgattcatcatcctggtcatctcctttggaagaaccaatgctgcacatagattgatcatttattagaagctagccaaatctctgtgtgtgtcggtcacatttggattagatggattggattgaaaatataagagaaaaaatgtagaaaaacgaatgagttgatcatttgccaacaggcccaacactaaattaaaagaatataggtttcatgcaaagtatcaattctaatgggattaagttatcccaaactatgaggattaattatgttgttggattaattttttttattaacttctctaacttgataacaaaattacattataaaaattatccaatccaatcccgccatccaaacgagaccttaaggaataacttaccttgttctgctacaatgatgactcagatcttgacataaaaccttgcttacatctcctactttcacagatcctttctttatcagttccgaaaactacatggataagagataaaatgaaatgaacaactgtcaataacaaccaaataaaatcaacatctagtaaatttctagttttagaatgggaaagcattaactcacctcgtcttctgtttcctcaagtaacctgaatcacaatcaaaggttatactaatcatctttggcaaaagtgtcaagttcataacagaaacaaaagtggaaccctcttaccttccacaataggttgagatgtcttttgaataagcacgagcttcttgtttatctaatagaaattggggaaaaaaataattgccaggaaataaaataaaaccaaaattcattctacagcaagtttcctgttatgctccctatttgattgaatagaatatttaatgaaagcagcaagagtcacgaactgaagcaacaacaggaaatacttacttgtgatattatcccagttatctactttgatccactcctcatgtttggttgacttaacctgggcatgggaagttaaacaagaatgtcatcaaaccttatgatgagaaatgtcaattttagcttcttactatcaaatgaaagagcaagaaagccttagaaagagacttttgaaaagatcaaagcgcaaagccaaaagatactaaaagaacattataggctaccttgttaagagtgtaatcttgcatcttttcacaaaggccatccagaagttcaacaactctcaactcactcattctgttaaaacaatcgttccaaaacaatttgtttagctaattcaaaaattaacttaaataaatactgattcaatatttcaatctgcattgtgttcaaagctatcattttttgtagtattatttataatgaaaagttccagtctgaccatacaatcatatagtagaagacctaatctaataagattatggacaattgctaacattgaaatcatcccattccattgtgttctaatttatagaaaattcatatggtttagaaacattctgagatttcataagttttcttgaaacaacaagattatgatgaaaaattacagtctgactgtaacggctgacccataaaaatcaaatactgattgcagagattgaagtcaagtcatcccattccatacctgtaatcaataacctttcctctccgttgacctttagaatccaaacggtgtctcatatccaaatgattccttggtttttcctgatgaatccattacattagacaaaacaattttcccagctcaatttcttaaaacatagaaacaaaacaagttgatcttacattggaaagacctcgctctacctcctcctgccaaaaaagaaaaaaaaaatcatgaatgccaagagttgttttcagtgaaatacatttctggatctaaagtttggaatagagagaaagagattttgaggttacagcaacagcaatacaagcagcacatttatcttcgatgcaagtaacgacggagagaaagaagagcatgaaaatcagtaacacactcatcttcatcttcatcctctcttctcttctcttctattctcagaattttcccacgcttcctttctcagtatgtttcttgggtcgaactgactgtatcttagcccatgtttcagtatgaacactaatataacgttggcttattaggatttttgactagaagtgaagattcgaacatttttggttattatttttttttttgggaaatttatatggtatactaacttttgttaattttttacaaaaatactatcaggcgatattttttatttttttact

SEQ ID NO: 115549 - DNA, 1611 bp, Cannabis sativa
ttctgaaaactgttttaaaaaaacaaagccaaacaagtcaaattgttttcaaaaataattttttgtttttaaaaacaaaaaataattttttagttataatgcctattcaaggacttgatatctcggttcttgagatccatctcagtagcttcatcaaaaaacattcagatgtcctctccattgcagccatcttttaatctgatctaggtttctcctgctgaattcacactcaaagaataggtggtccaccgtttctgatctagcatcacacaaaagacaagcatcctcatgtgatccacaatattaattaattagatgtttttgaatagtttaccttcctttatatgatatttgtaatgtacgatacttaatatttggaatataaacttacattcctataaatatatatatatatataaatatatatatgtttcagaaccaaattaaaaaaaaaaatagatgaagaagaatttcctgttgatgaatttcacctccctatgtttttaattatacttttggcgacccagggaattagagggaggaaaagaggagggagaaatggttgaaatatatatagttaaataagaatttacaccccaagaaattcattaattaacctatccatttccataaatcacagcagaaaaagccctaaaatataaataaaatcatccaacaaagaacaataatattgacattgtaatacattcaaatattagaaaccaacctcataatcgaaacgattttggacgattagcaaattaaacactaccgctcagacagatataccccaactgaatctttaaattaatgagtgtcctttctggaaaataaaacaaaaaccaacacagtaacacatatgccaaaaacatgagactctacttacagttattttcattaattgtataataattattcttttgcaaattattgatatatatgataaatattataaattgtgttcaccatatctcacttgttagcacatatatcttatcaatctaacaagtttttattcctaatttttttcaaaattattttcatttaacattaacaattatgtgtcgtttacatgttacttaaatttctaatcttatactaaattaaaaacttaaaattctatgtttattaatttttcaatacgtacagacgagttttatccattccaactttaaacacgtagtctcacttggattttattacttcaaatgaattttgacaaactcaatatccgtcggagcattacttattttaccgtcattagaacactgaaaatatgtgttttcttttcaaacatgagtaaacataataaacacacctagtaacctaaaaaataattaactaaaaaaacaatataacaattcattgttcataaaatttatatggtcaattaaatttattttaaaaatgtatgaaaatgggagcaaatgccttgcatgtgccctcttactagtattgttaaaaaggagatcagtaggatacaccaccaattttctttatcattgattattaatagttgtaatattaatctattgataattattataagtcgccacttaccgcccagtggcccacgcgcagacaagtagttattaattggggtaagttttt

SEQ ID NO: 115550 - DNA, 5096 bp, Cannabis sativa
atgtcgaaagggcattgtgcagtgctttccatgcaaaaattttattttttgacggtagatttagactctaaaaagttttccaccaattcctatgattgtccgaataggaagattgttgttgttcttctaaacttgctgcaaaatgaaaacatgattttatagtataaattcctgaggttgtgtgacgctaaatcaatctgtcattggatggaaaaaaactcagggggatcataactattcattcaatatccatctctccgaaaaaatcctaaagtagctccaaattttattctctttcctttgtgatgaaatgtgcaactaggagtgaggcaggcccaatatatgtcatcaacttaaactcagtgaatccgggtacgaatttgtccaaaccacattgaatattaaagccataacctattttataccgatgctattttgtcaacaactctcaaccccaatgactgctttgtcatgttagagatggtgaatgtcctagcctttcttccaaaaagaattgtttaaaaaatacctacacttcaataatcaactcaacaaagaatttgacatttcaaatatcctccatgcttatttagctaagagagcttgattataatccacaaaagaatgaaaactcgtgccaccattaaatttgaatttacaaagaaacttctatattttccaatgaatttctgtgccatccttgttagacccctacctgaaatttgtcatgacgctttccaattgttgatagaaagttttcgttaaggaaaaataattcctagcataagttgaaattgtctgaaaaactgctttaagtaaaacctcttttccaccaatggagaacaatttgcattccaagcatgcattagcttccaaatacgctccttgatattactaagaaactcctttttatctcagcttaagtatgaagaaagaccaagatatctttcatgacactcactaattggcatatttatagtttgatggaataaattttttgcagcctcaagagttttacgggaaaatacatgactaattttttattgttgagcatttatcctgaagctcaatggtataggttcaagactcttttaattgccaaagcagaaatttcagtggtctcataaaataaaaggttgtcattagcaaagagtaagtgtgagacagaatgtgctctttttgtaagatgtagaccttgaagatttcataatgcttcctcatattgtagcaatctcaatagtccctcatagcaaatctaaaagatatatggcaatagaagatccccttgtcttagacctctagttggcttcacatgacccactacttcatcattgagtgagaaagagaaacttgtacatgacggggaattttatatcaaggctatccatttgctgtgacattccattaattttctcataactgcccaaagatatgccctttctactcgaacgctttactcatgtccaacttcagtgctgaataacttttccttccccttattttatgttggatgtgatggacaacttcaaaaacaacaatgatgttgtttgtgatgagcctattggaaaggaaagcaatttatgtttcagatactataaaagggagagcttccttaaatcttaaaactaccatctttgagatgagctcatatatgcagttgcacaaacttattggacaaaagtcacccataccacacgatgatttaatctgagggatgagagtgatcactgatgtgttaaatcaaattcatgttatgaccttcatttaaaacttctaaaaccacttcaatgactgtattacccacaatatgccaatagttttgataaaacatagccaacataccatcacttcctgagcttttacctgggctcatagactttaaggaagtaaaaacttcattagcagtaaagggaagtaggagagactcatttatttcatcagtaatagtggtgggaattgcatctgtaagaaaatttaaagcttcaatgtccaccgaagaagctaagaataactcagcaaaatatgcagaaataattgtagtcatttcagcctctaaggagatttctgctccattactgtcaatgagtgatgtaatcttgttgcctgatctgcgagaagaagcatgtgcataaaaaaactttatattttgatctccactgtgtagccaatccactcgagatctttgttgccaatatgtttcctcctgagccaaaagttcatcaagaatgttcttgggattttttaattcctccattactgttgcagttttgtcattttgattattcagcatggtaacttttttattgcatcttggtaatttgaagaatcaaatctttacaagttaggtaaaaactacagtttgaccattaaaataattttgtttgtccttatacgctaagctaaggcctacaaaagcttgttttgtccttctatagatgatacaagcaattaaaaaacaatagtactccccactataaaagataatggatttcgtttatatattaatcgctacaagataacccaattccaattaggtattgcctctaaactttcaatttaaattcttatacttttttgtttttcccttcttattttttctatttgggccattgatttgttatagatatttttcgaactaagacgaatacataaaatggatttcaaatttggaatgtcttcaaattcaagatccaaaaataggatgaatgttattaatttataggatatcagataattatagacaactaaaagttataatgaaagcatgttaagagcaagtataaactagagcttaccttaaaagttggcgccaagggaataaaattaagaatattctttgaatctcaaaatctatatgtaaaatctaagaaaagtagaaaactgaaggttagattccaatagaaaaagacaacctcaaaatgaagtaaaacatggcttgatctcttagtggctattgaaaaaacaattaagagttctcaactctatagaagcaaataaaaaattactaagactaactacttatgcttgactatgtgcataatacccacactatcaaacataatccccaaaagattctaatgtcaacctaaaactctttggaaagagatgactactaaatgttaaaagatcaaacgagtagcgtatacaccaaaacaaatcctacagatttaattttcatttatttgaaagtgtgtaagacagtcatatgattctctaaacacaaattacactaattatctttggtcatgtgcctttcctacgagacactatcaaggaacctaaaaacatatcacaatatcattacttcactttctagaacatcatattgttaactgaatatcttagtatacttacacaaccaatattaacccataagagaaaggaaaaaaacttcaaaagaatcaatagttacttgtttgcatagttttttgaaaaagaaaaacaagaccccataaaaaaaagttgaagaaaaaatacctctaaatggctaaatcaagagctgcgatttccaaattttctctacctgcttcctagtcgtggtttgaagttgaaggagggagaagaatgggtttgaggctagatggaggtattaggtgggtggggtgtttaatttgaggcccaacatctatcaaggttggacgtggcccatgattcacttccaatacggtaggatgtgaatcgtgggccatgtccaacactgatggacgttgggcctctctaaaaaaaggtttctcttaatttttaatatatcacgtccccgcctttttttccagtccaacattgatggacatgataattttttttctagtccatcaatgtaagactaggaatctcccaaattttttttcatgtccaataccttttttgttggacatgaaaaagagacatggaaaaagctatttgtagtagtgtttttgaaatttccaaattttgatttgtgccactaccgcaaagaagatggacaagcttccaagttatccaaaaactctttataacagcatcagttcgtggagccttccaatattgttgattgatggtggcttcttcttcatgttgtaaccaaagcttttcaaatctaaatcttgtatgccttttaccttgctggttttgggtattatgtaagcagacatcaactgaaagggccgactctatgatctatgttgtagtaatctagattgtgcatagtgatgggatcaaagtttaaatcccaaagatcattaacaaaacattaatctaatctttctgtaattatgtccactgagtgtctccctttaacccatgtgaaatgatctccctcaaaagattgttcatttaaatggctattgtcaagaactcttctgaaatgttccatttgtgcttcatttttcaaggctcctctcgatttgttttgattagagaaaaatttcattgaaatctctaataactagccatgaagataaaggtttcatattcttagtcgttcaaacagtgaccacgtatgaactctattttgaatttatggggctccataaaaagctgtgaaatgccatcttgtttcatttgcaaaagctatataatagccaagtatattagtattaaagtttaaaagtattacatctacatcaatccttccataacaacatcaaaccattcccaaacctcctttagggacttcaagtctattattgaaatataaagcttgacaaaaatgagaaattacattaggacctaacttagtttctattaaaaaaaaataacatgtgggggttgctctttaacaagcaaacaaagatgaaaaaatgtgctaggattccccaaaccatgtgcattccagctaacaattttcatggctgaatgcggggttggaaacttgcctttgctgcattgtcgagagatagctagaagaatgcattaaaacaacagaaactacgtggtttagttcttcttcaactgacaagatagaagcaaacatggatggttggttaccctacatctctttagtgtgtctctaagtgaactcccttcaagttgtctctttgatttgcaatttggagagttattttatttcctttatttttccattcgagtaaggataatgactgctatggagtatttgg

SEQ ID NO: 115551 - DNA, 2583 bp, Cannabis sativa
atacttacagagttacaaaaaaaaattaaatattattacttccaaaataaacttaaatatttatttgaaattaaacttaagtatttatatcacaaattactctaatataaacaacaaaataggaagaagaataagaataattttatggtgaaaatatcaaaatattagtaatcaatcaattaatgtagcattaggttgtagacccaacttcttccttgtcctccctacaaagaggtctttggatttgaccattccaggaacacttccagaaacggttgtgaatgagaactgagccactgcctctttcctcccaagtgataccattactgcctttggtgtacgaggctcatacttttccaatttgctttctttctcaccatccattattaacttcaagttctttgcagccactaaagcatgtttttgagccaaatacccctgtttaatctcctgcaatcacaatagataacattactatctcacagttagaaatgcacgcttcgagacattgtcaatctcccaaatgagccaagttctagttcatcatattagtctcttacacttgacatatttataggctctataaaactagctaacaaattactactaacatttttttgcctattaactattttgtaacactatctgatattatcactcataataactaatgtaactatatgtatgctaatttctagagtacttaaactaaggaggtaaattcactttccttggatgaactattttcctatttagttaatctgaaccatgtaacattgttcttatgctttgattctggctaaaaccatttgttgttcataaacaaatattgaaatactagtagttttaacacttactggaatatcagtaatgtctccaatggcgaatacattgtttcgattctttactcgcagattctcatcaaccatcaatcttccgcgcttgtccaagttagatttcaaaagtgttcgccgaagccatgatgaggccaccggtctcccagtgcatagaaaatggcaatctgccttcacagattctcctctagaagtttgaaaaagttttaccccatttgcattatcctcatcatcatcatcattatcatcatttagaatcactgactcccccaatttcacttcaactttttttgaagttaaccaattgagagccttgctagcagccttgattccaataaattccattaaccttgggccattatgaaccaatgtaagcaacttgtctggaaaatcaacagcaatctctcctgcaagttctacaccagtagggcctcctccaacaatcaaaattgaccgagccgaattaattttctcacattctgttcttgaaataagttacaacaacgctaaaacaaagttagcaattgctcttgaggcataacaacatagaaaaccaatattgaaaatgaatgaatgtatcagtatattacctgtttggtattggttcaacatctcagtccttgttttgggaacagaatctgtatggccagtggcaatgacaaggtaatcatagggaataaggcggccttcggctgtcaaaacttcggtttcagtgatatcgatggcacttgatgcaacaattctgccatttgtgagataatctctatggttgatcactgatctctcaccaaatgatggatccaccattgccctccaccttgcccatggtatctcaaaatattcttttctgtttcaaattttgtttccaattattagtactaatcataagagacctattctaatcctaccaaacatatcaaattaatataattaataggtttggctacaacccctttttctgtattgctttaattttccccaattaagattaaaaacatcaatttgtgtgcctagttttgaatcttattagcaataaaaaatgtatattcaaagaacaaataaccataattcattatgggatcacctacctaaaaacttgtgaataaaaataataattgcaatgaaaaataaaatcagggagagagagagagcatactcatcaatgagagtaagatcagaattgaattggatagatttagcaagaagagagccagcaacgccacctccaatgatgacaacccttcttttctctctttccatgtttagtttttcttcctaaccaaattctctctctctctgagatggggttttaattttaagatgatttttcattatatatggcattatttttttcactaagtcttgcgaaggaaaggaaaggaccctgtcaaagtgtaggaagattcattccattttcatggcaaccgtgttgaagagaattatgattatacaaaagtcaaacaacgttttcgaagatgttaacctgtctcaactacccttattagcggttgatgtctttatataaataattaatacttattactaggctatatattaagaaagaggattgcattggtagcaatactcagtggcgggggacctagaatttaatttagagggtgggcgtaaattttttcatatataaaaatattctaaaaaaataagtaaatataaagaaaaatacaattcaatattttaattcccaactaaaaagatattaaatattaag

SEQ ID NO: 115552 - DNA, 3559 bp, Cannabis sativa
  modified_base (47)..(54): a, c, t, g, unknown or other
ttctattttaccagcgcaataccaacttttgccagcacaaaaatgtnnnnnnnnaagtgacatttcttgtagtggttcttgttgcacaaagagcgttactaagtcctttccatgagcaattcgataatactttttcagtggcccaaacaaatggatgtacaacactcgtagaatgtttccaatagggttacattattattcgatttggagatactagaattgtgaaaaaaagtaaagaaataaaaacctatgtttagaagtggaattttgggaaggaatgaacaaaataataaaaattaaagtgttttaaagttttgtctctcttctttctctctcttttggtgtactcaccggagctatggcaaaagggacgagacaggaaagctaaacctaaggcaaaaagaaggaagatagggccgccttcttctgatcgagtcatcaaaactaggtccatggatgctcttttcgtgtgatggagctggaagctcgaggagtttttgaaatagggcaaaaatggtgtgagaaggtcttatcgcttgaggaaacagaggaggaattcagaaggcaaagcaaaattcttcaagatttttctgattagttgagcattgccaatagagcctcacaagatgctaccacagggatgaagactactcctccaattttgagatcaaatgtagttcggaatatggagagtaggtttgggaattcaattgtggatgaacacaaagaagctcgatctgagattgtcacacttaagtctaaagtaaaaattgattttgaagacattgcttatgaggtaaacttctggcaaccgttgattgtatgccacataattggggctaaccctccacttagcattttaggtggtttcgtcagaacgatatggaaggactcggttaataaggtagctagtatgattgctcgagggatcttcatcattcaatttcagaatatggagcaaagaaatagagttttacagggagaatatgtcttcttcgattgaaagccaatgatcatgaaaccatgaaattcgagactttgtttcacaaagactgaaataattacaacagtagctacttggattcagttgaagggcatggatattaagtatttggtggaaaaatccctattcgagatagttgagcaaatagggagtccactacaagttgatgagattactaaacacaggaataagctcctgtatcttggaatactcattgaggtaagtttcgcttaagactaacctgaaaaaatctcatttactgatgaatatgatcatgacatagaattagatgtgaaatatgaatagctgccactggtgtgctatacttgcacagggataggccatgaaaccaaaatgtataggaacaaggagccattaaaattgaagtagagaagaaaatttgggttccaaagaagaacaatatgcttagtaaagaacctgttattgatgaggatggatttcaacaggtttgtaaaagagaagaaaattgtatcagatgagcaacaaatataaacaaagtggataatatgtttgatgctcttgataatgagaaaggagaagatggagatagagaagttaacataggtgagggggagatccctccaactctaatggataaaattttttgttagaatttaaggggaattaacatccagcaaaagcataatgaaatcaagaacttgatttactctaagaaggttggtgtggttaggctcagaataaaaatttggccgggctagtttatacaagtttattttcgggttagtgctttatgaaaaacaatccatagcttgacaaggggagaatagtgcaggcttggcaactaaatatgtactctatagatattagagtgtgtactagccaactgattcagtatttagcacagtcaagacatcaataggatgagttctatataacttttgtgtgtggatttaatgaagaaaagagaagaagttaaatatggcacgatttgaaagacatctcggttcatgtggatagagcttggattgtcttaggttattttaatgatattctaactgcaaatgaatcagtggggaagaactcaaataaacaaccatctctattttagaaagtgtgttgagacatgttttctagaagattttaaattctcacgatcgtttttcacctgaaataataagcaaaagccagaatacagggtgttctcaatgattgattgagccttagtcaatgagaaatgggctggttcttttcagcattctgaagcattaaccttcttacttgatggtgtgttttaccatagtctagttttgttatttcatcaaaatatggtatgtgggaaaaagcccttcaggtattacattatgtggaaaaatgttgatggctttgatcaaagagtgaaacagagtttggaagaataggcatctggtacactaatgttgaaaatggtgacaaagctaaagagattgaaagcaatgtttagctagatatcaacaaagaaggcttcaacgacatctataaagctgaaattcaagcagaaaaaagtatgatggaagctcaagagaatcttaacaaggattctttaaattctattttaatgcttgatgaacagaatgcaaaggagaagtacatggccattcacaaagcttacatctctttctttgctcaaaaagccaaggttacttggatcaagagtagagatgagagaacactgatctttcatgcctccttaagacctaagagagttcaaaatagaatttattttattgagaacgatcatggtatctagtgtgatgatccaaccagtgttcaatatgcttttctaaagtattatcaaaatttgttgggcactgtcatggaaggaagatttcatgtgaatgaaacaattatggatgctggacctaagatttcatggtcacatctcaatattttacaagatgaacatagagttgaggaagtgaaagaggctatcctttccattctaagtatcaagtctgtgacagttagagtcccatgatccaaaggggaaagactaggggatgtacaattttacattgcctggggaaagtcatgtgtgatgattgtaagactatgtaggtatgtgactgggccaagctacaacagcttcctctgttaggtgttgcttgctattccaaagaaagcctctgtagatagactcaatttccttaacaatgctttttggaagaaccattattttgctccaataagaatggattgccatcagggctgaattaatgagcgcaactcttcaagcaaaagaccaattcttagtactccatgttcgaatcttgacaaccatcttttcaactaggagagagcactcctttgctgaaatcttttttgggcagatgggaatgcctaaacattcaaatgggacatcctgttttgaaaatccataggcatccaatattctttggaaatttgtatcacccatgtttatacagcagtcttattgggattaggcttcagaccagatatttgtgagaatagttcaaggccctgtagcatgtaataaatgctcttgtaatctccattgcaaaataacaagacatcatc

SEQ ID NO: 115553 - DNA, 3595 bp, Cannabis sativa
  modified_base (45)..(47): a, c, t, g, unknown or other
aaaaagactgctctgataccatgggagagagagagagagagagannnagagagagagagagagtaaatgatgaatatgaactcctgtcataggtgtaggtagagggttagcattgtccattttggccttaagaagtaaatccatgatgtatttcttttgggacagatgcagcccttctttggtgtgagtcacttgtatgcccaagaagtagttgatagaaccgaaatcattcaaggcaaacatgaatttgaggttggaaacgagttttgtgaaaactgttgtggaacatccagttaccaagatgtcgtccacataaactagaagaaaagtggaatgagagcggttttgagtttgttgaacgaagccttgggtgcttgtctcaggccatagatggccttggtcaacttgcatactaagtggggatcttctgaatcaatgaaaccatgaggttgtgtcataaatatctcctctcgtagctccccatttaggaatgctttattcacatccaattgtcttttagactagttgtaagataacgcaattgtgagaacaatcttaacagtagcagtcttgacaactggactgtatttttctataaaataaaagtcatattactgaaggaaccctttggcaaccaacttagccttaaacttggtaacactgccatctgagtttttttttttctttgtaaacccatttacagcctatagcttttctaccaggtggaagaggaaccttgatccaagttttcttttgagtgagggcttgatctctatttgcatagctgccagccacttagggtctttgagggcagcagcaagagtgcctggttctttagttaccaaaaagattttttttcttagacacacctaccttggcccttgttaccataggatgttgattaacaggaagttcaggggctggtgcaggattttctacagcagttgatgactcgagagcaggtgcagtggaaccaacacttaaagttggtgtgggaatggagctagaatgagtagatggcacattgttggtggaggaggaggaagaaggagaagtgggtggggaaggaatagtttacatggatggaggagatggggagttgttgatgggaatagtggcagatggagtagaaggggagatatggacaggggtaaggttggtgggaaataaggtagagtaaggaaattgatgtttattgaaaatgacatctttggacacatatactctacctgttgaggagagacacttatatcccttatgtttgagactatacccaaaaaagacacatttgacacacctaaattcaagcttgtggttgttgtaaggtcttgtgtttgggtaacaagcacactcaaacacttttagttaactgtaatcggggtctgtgtgatacaaaaccttgaatggagtggagttttgtatcactggggagggaagcctattgatgatgaaggcagaggctctaacagcctcatcccaaaaggacaagggcatagatgactgagctagtagggttagtgtagactctattaaatgtctatgtttcctctcagcaacaccattttgttggtgtgttgttggacacgagactttatggttaataccatgtgtcaagagataagattcaagtgcctggtattcaccaccccagtcggattggagagctttgataggacagtcaaactgttttttcactagagttataaagttaataaaagtgggaagtgcctttgatttgtttttcaaaagaaacacccaagtgtatcgactatatgcatcaatgaagtggacataatacttatatccccctgatgagagttctagggaagtaccccagagatcactatggatgagttgaagtagtttagtgtaaatagtttgagaattagaaaagggaagtctgtaaattttgcctttgcaacaagcatcacaaaagccattaacaattttattagaattgggaatgttacacaaagacattacatgtttgacaattctaacaagtggatgagccaatctgttatgtcataaagagaaatttgacaattgatcattattacaagtgctcttttgagcatgattgacagaaaataaaatactgggatggaaggaatggcttgaactattgtcttgaatgtgcatttgagaggaaggaatgacatagagaccatgtttaagatgtccttccatcaatactgccttggaatcccaatccttgacaaaacaatgattaggataaaattcaaagaaagcattgttatcagatgcaaactgagagacactaattagatttttagtaattttgaatacatgaagtaactggtttagaacaagagattgggatgagaaatgtgtactaaataatgtcttaccaacattttgaatctgcaggcctgcaccatctcccatatgtatctgatcttgtctaagatagagctccttatgagtgaaattattgtcattagttgtgtagtgactcgtggcacctgagtcagggtaccaagagttgtctacaacggtatctgcagtagcgatattgttgagaaatgctccacattggctgctcccacacctggaaaatccatattgaacctctgatagcatcgagctgcaatgtgtccaggcttggaacataattgataaatatgtctagatctagaagcaccattggtggaggtgtgtggagcagattgaccagtaaaaggaggaggagctccacgaccattagagttcgaaacatggccattatttgctctaagagggatagcatagggattctaagagccatgtcccctaccaggagtagcagaacaaggtccataaggggatttgtggtctgcattagaaaaagagaaaccagatcttcgacctcgagaaggtcgattagttgtcagattaacagagtctaaatcgttacgatgattatccatacggtgctcttatgaaagtaaaagagactcaattttagtgacagtatatggttggtttcgtgagttaacagatattatgaatgtatcataatcagaaggcagacctttaaagatcgcagcaattgttctttaacagagacatggtgaccaacaaacttaagtcgatcaacgactgtcttgattttcaacaagtaatcattaacagaaagagatcatttcttgatcgtcgatagctaattagtaaattgatcaattttagtagaagtctgtgttgcaaagtatacctgaagtgttttccaaacttgtgcaaaggtatcgtttccaacaactcgagtcaagactccttctgtcatcgacgagagaagccaagaatataggagttgatcttgctgctcccattgcatgtacaacggattgacacatctagcatgcaatcaagctcagtaaggaactttgaaggaggatcgacatcatcggagatgtagtcgattaattaatgtccacaaatggaagagaggacttgaggcctccaaagtaagaaatttttgttgtcaagtttaacagagagtttgtgggagaaaaccactggttgaaacgaagttgtaacgccctaatgctaaggcacgctatagtgttttttcaattatagtgcaatctttgctaat

SEQ ID NO: 115554 - DNA, 2278 bp, Cannabis sativa
  modified_base (511)..(516): a, c, t, g, unknown or other
  modified_base (589)..(593): a, c, t, g, unknown or other
  modified_base (2207)..(2211): a, c, t, g, unknown or other
aattagaaaatatgtcattattgaaagaaagataaatagttgaaataaagtggaaaatttgtaactagtgaggcccactactatggtcggccacttatgtgatttttgcccattattttctcttcttttaatcaatgtaattaaatcctaaaccctagttgaaatactataaaaggaatatgttgctctcattctcatccaatacttttcaacctaccaaatctagttatctaactctgtcaaacaactagtagatgagaggctgcttctatagtgatttcacaccttatcattgttcttcattaattcgagccacagtgagagagtaccatgcccacacatagcaagtcaagtactcaatcctagtgcagaagatggtggtcaaccaaaactgaaggagagaaggggatctaggctcagatcttattattactctgcgaccaaaaggaataagggttagagatttgagcgaaatgagtcatattattccactgccatcaatgtaaggttnnnnnnactcttatgtgtttaatttcatctcattagagaattcatatttagggtgttaatcaaacatacatgttagtannnnnagatcctggtaaaataattcccaatacatagaaggtctatctcaggatacacagagtacccaacaaaatgatagtacgatggaaaaagtagataatgaaatcctgaagagcttgcagctcattgacccacatactcatcagtatgttgaaagacaagagaaattcaccctgcatattttatctcaaaattatcacattatgataatatctcgcgttttcttctctcaacatttatagaaagacacaagaggtactacccaaggtattcttaggtacaaaaagttaccttccgaataaaacaacctaagagaattgtttatattgcgagatgaagaagcatagtcagcataaccgtttaaagataaagacaaagtgtggttatggcagttatttattattattccatgtgatgtacatatgaaacgtgggcattttccacgtttcacaaacggttacaaggataagatcccaaggaaataactgtctccctaaactcttattgtttatcgagatttttggaaactaaatatttgagaactaaagatataattaaatgcaaaaatgaagagatggagattttttacgtggtttgggtgctaattaaccttagtccgcgagtagtctattagcctcttagggcattttcgatgtgtttataatatttttataggaaatcttaactcagtactctatggttcttgtgaagaagacgaagagtaaacttggcagagttttagctatggtggtcgtgatccccccttcgtatgagaatagaaggatatttataggctaaataacgggtatggacatgcccattacctgcctaagatttctactaaaagctcactaatggggtaaattacatgaaaaattagagctgattgttgggtcccgggaaaactattgtgcccgggcgtgctgcagctggacaatgaggacatttttacaaagtaaacacgtgtcattcaaagatttaacctttaaaagtagtggccacatgtcgcccaaagctttctcctttaaatgcagggggtctatatttacctgtcaaaaaagtggtaaaggtgtgcgcactaccatgcttggacgtaggagacaagatctcatcctgtattagaaaaaacataaccgtcactaggtgatttggctcatatcaaaggtagacattcgtgacagtcctaggagatcgacatccacattaggctcgttaagtacctatctaggtatcaactgggcaagcttacatgtttgaaccctttcaggttcgggagaggcaacactccttccgcattctaaaagctaaggtaggaccaagtggactttcgcctaaccttcaattttgacttattttcggttcttatgaggcttctccgtgacaagattgtatcaattaaggaattatgaagctaatccctttctttaaatgccacgtgtcatacgtctagaaatacggataattcctataaatagagacagaactcacaaaacaaagaacgaataatttgaaaaagaaaagaagataattcataaagatatcttgtattttgtactttgtatacagttcatgaaaattgttgggttttatgccctaattaaaactcatttcaatataannnnntttacttattaatatagataagaaataacatttaatgttacatcgttcacatgattatatgtacata

SEQ ID NO: 115555 - DNA, 2034 bp, Cannabis sativa
tgagttagttttagttaaggaagaaaagtacctgaataaagaggtggtaaccttctgtttgtgcaggatcagcaggatttggctgatcgagtaagtcttggataccaaccagtatttgcttaactgttatagctggtctccatccctgaataaaataccaacacgccattaacaattatccaatatgttcgactgaattcaaccaaattccatcaccaaaggcaagagaaaataaaatacttacactgtcctcgttaagaattgataggcaaacagttcctgaggggtagacattcgggtggaagaaaccttgtggaaacttgcacttcggtggcttgcttgggtagtcttcactgaagttaagtgtaagtgggaaacaacctccctcccagtcagtctgcaaatatacacatgtaagaaaaatgttctacagaaacataaccatgtaaaaatcaagggaaaaaaaaaatctgcataatttaacagctagaagaggaaaaaacaatgcatatcttaaaataacaaaacaacgaacgttcaaatcaagaatgagaacctttcacagcattagtcctgctgctaaaatctccctttaaaattgacgcaaggctacttgcatcacgatgcataatgttagaagctaaaaaaatcatacacaaagcatcaaaatgctaaaataatacactcatgcaggcagcagatgagctctggttatttgtcaagtatagagaagataaggtaaccccaatttataggtacagaaggtcagagaacatatgctagcccatgagtattatagtccctcaatgcctctgattccaatatagtgttatcatggttaagcctaattttttcgttcaaaccattgaagtttggaaagaaatcgctgcgttcagaaattaaatttcatattgggtggcaaacacaaacgataaaggtgaaccccaataccaattacaaccacaatagatgaatcaatagattaaaaaaaacattgcaaaatgactaagctcgatcacaaaacaaaaacacataccagctatataaatataaccttaattaaacaaaaacacatattagggattcaatcataaaaatagatagatcaatatcaacataaatatatataatacacgaatacttacgccggtcttgccaggaatagtgcaatgccacaccatcaaattcaccgtaccatcaggcaaagtctccggcttagcaacaaaaccctaaactcaccaaaaaaacaaaaaatcaaaaatcaaattagggcaatcaaaacataataattgaaaatcaaacagagaagaaagagtttttgaacgcacatgaggatggttcttacgccatgactttcgctcttctgctagacgaccacgagcaataccacccgacatagcttcttcttcttctttcttagctctctctctctctagaactttctctctctaaaaaaccttttctctctctctttgactgtttggggtttttcggcgacttttaaatttataggagacggaggctttttattttccgatttccgattttacccctgaattggagactttaaggcggagaagatgagatggacggtcaggatttaatcttagattggtgcggagcagctcattggataatgactgtgattgtcgtttatatgtttttatttttgggattataaaattggtccctcctaaagtcaatggatttgcagactcgtccttttttaattatttttttcagaattattcttttttcgcgtgagaatcacgccacagtacgacactctttatacacaccctctctctcgctcacgtgacccaaccgacagcccactggacttctcatgttgggcttgggctttgtactttaccaacgtaatcattttaattggttccttaaatggatgggcctagttacttggtcttcgcccaaagaatttcctgttgtttatagggttttatttatgggataatttcaaaaaaaacaaaaaaaaattatgaaaatacagtctatatgaagtttttaatattg

SEQ ID NO: 115556 - DNA, 1923 bp, Cannabis sativa
  modified_base (815)..(822): a, c, t, g, unknown or other
tagctagctaagggagtgatcttcttatgatcattaccaatattgttgtatacgtatacgtgtgctagtactcttgtactaatcggttttattcgattatagtttgtatttaattttgtattatataaatataagaactttattttatttgtcacactattaattatatattcctgtgaatttaagtttctctccttaaaatttctagcataatataaggtgtttatggtggctttataagcagtacatatatgaatatcatcgatttatttaaaagaaagatatgcttttttttttggtgaatggtgacagagtattcatctgaacaattgacaatattttgattattgtccattgtatatgtaaatacgaagtagttcatcatgcaaatttacactggtctttttatgaacaaagatgagctgaacaaaagtgactaaaactgaaaaatgatcaaaaagaattcacaaatacaattttcctaatctaataaaaaaggttttactttaagaagatttattattagctcagtatgttttatttcataatggaaagagaagagtctccgaacgcatgggctgacccaaatagaagcgagaggggacagtcgtctcctctgaaaaaaaaattatgaaaaaaaatgtatatattttagttagttacaacatatatttataattatatgtgataaatataaacataataatatttttgacatattggttagtcacacatgttataaaggttattaagagttcaaaaatcctaataaaaatattttacgttgtactgaaaatttattattattattattnnnnnnnntattattattattattattgtgaatttcggtcaaaagaaacccataaaaatgataatgtaggaaattaatgcagtctgaaactgcccttacacccaacacccaacgttcaaaaactaggggtaaaaatgtctttaaccctttgtgcggataacaagggaatattcccttttcaaaaccagatattgctttttcaaaaccctactgccttttatggcagtatataagcctcccctttttgttgatgaaaaccctagcaacaaaaatcactttccccttcttcaaaacctagcagccgaaaacacttcagcctctctctccatcttgttttcttctagcttagaaaccatagcagttgcccctcatcttctcctcctccaagctttgtattgcagcaacctccttcttttcttcctcctttcttcttcaagctacagcagtagcttcaatggccgaccctactgttcttcttgttgcccttcaaatctgcaacacacatacaaaaccaagagagaaaatagtagcaacaaagatctaaaatgatctttgttggttatagaagagaaaagccgaaaaacacaacagaaaaataaagaagaatactaaagagttgatttcagagttccccttaaatcaagggtacatctccgtcaagcttccctcaaagacgcttgaatctccactatgaatgtcaaaaccggttacaagtttattgagattccatgctacaaatcagtaggtaatctcaagctttttctctcttttcttcactttattttctttggtttatcttaaaatatctctcactaactctctctattttttctctttgtttctgaggttgtttacaaaagaaaaactgttgccttatatttctctacaggagccgaacacaccttgtgaaagtgggaaggttgaacctctatttatattgttgttgctggttgttgttgtgtttgtttcttagctgagaaatagttataatctgttgttgatatttttcttgtaaagctgaaagtttgttagagtcttgagatattcatttacttctttatattgtaaagaaataaaagatctaggcctatgaaaacagaaccgacaac

SEQ ID NO: 115557 - DNA, 1968 bp, Cannabis sativa
  modified_base (40)..(51): a, c, t, g, unknown or other
  modified_base (1126)..(1128): a, c, t, g, unknown or other
  modified_base (1927)..(1927): a, c, t, g, unknown or other
ctctttctctcttcatcttcttcttctttctcctcttctnnnnnnnnnnnntttatattattttataacagaattatattaatacattttttttttgtctttaagtgtttaaaaattaaaacatacaaaattttgcttacccaatatagaatatattttttaatttttttattttaccatccaaaattttaattttaagaaaataatgaattatattaatacattttttttgtcttccaaatttactattctaaaaattacaatttatcatcacaaactaatcaattagcccttgtatttttttaaatgaaaaatttacataataaactaattttttttttaaaaaaaaaaaattaaaaaatacttctagatggaaaaaaattcattttcacgctttgaactttttttatttacagtaatacatcttcagtaaaaattataaatcgttgtttttatatagattatttattgttgtataatagttgttataagattaattttctggttatttttagttattttataatttatttatagttattgtgagattaatttctcgttttttaattttggttagatcttttatctatataaaagaaataaaatattttatatttcttttgtttccttttataagtataagggtgcttctagtataatttcccatcaatatatattagaggttttttttttccaaatagatttaaaaacaaccacgtcagatactctaaagtagagaaattttaaaatatttgaaactaaaaatttattacatattattctaaacatattatattaattatttttattcttaatatttttgtatatatagatatgtgtatatattaatattatatatttcaaatgaataaaatataccaaaatttgaagaaaaaatagagtttcgttaatttattttaaagaagttgatatatgatgtaatataaaagtttgaggcaataaaaaaagtgaaattttcatggtatattttaaaagatggattagagagtcgattggagtattgtaagttttctatgaaacatggccggccttgagttaatttgggccttagaaaaaaaatatttttttagacattttttataaaaataaatggtatttttaaaannnattaaaaaaatatgtatatttattaaaaaaaaaaataattaaacccctaataggagtgagctctatgcgtgagcctatcccatcttaacttaaggtcggccttgatgtgaaattatttacaaattgtaaatcaatatggtctatttggcttttaatgagctataatactctttttttcaaaaatagagaagagaaagatgaaatgataaaaaaaaaatacctctactagatgagctattttaactcaagttttaaataatgatacggtgtttcactatatgtagagaagcactatttattttttaaatagtattttaataatattttattaatactttattagtgtattttatatatattaaaaaaataatatttaaatgaatgtagagaaaaagtaaaaaatatatggtgtaaagtaaaagtttgaggtataataaataaagtaaaattttggtaaaatattttaaataatagagtaaataagacgtgaatgcacatgagatgatgtataagtgtattttcttcattttagagtagagaagaagtggggaaaatataattgtacatatatcgaaaagtatattatattagtagggccgacaaatgagtcagacacggtaacatgactcataacctacacaaaagttagcgggtttgaatataccttaaatagatttggaccgtgttcgagttaattcatctaaccatttaataaacggttgacagagctaacacgaaactgacttgttaatgacctatttaaaattaggctaattagtaattttttccctgaactttnacatgtactaaatcgtgccccttgaatttttttggccgtta

SEQ ID NO: 115558 - DNA, 2522 bp, Cannabis sativa
atagtttatggggcatttttaacgaccttaaaaattcaggggcataatttggtacatgtcaaagttcatggagcaaaaatcataattagtctatattaaatgtatcaaggctcaaattgttggtaggcttacaagtattgcatcttagtgaggtttccaattgaaggagaaagagagcctgtcaagaaattctggcccaaattcctacaacagttcatggaagaaaccaagttaagtcatgaccacattgctatttaaaattgttaataggaaaaagttgatgagaactataaaaaggtctaataataaactcatacagattgaagagggaggtaagattccatagctcttctggaattgtaccaataacatccattgcataaactttcctgtaaataaacaagtttttgaaacattaaacctataaacatgtacactacacacataaatataggttaagtctatagttcacctaataaagatgcgttttggtatactctttatctgttttatcatacaagagaaccttttagtccagttgttttttatgatcgtgtatgttgtagttatataagactacccataaatttttaaaaaaattctaaaaagtttacaatgttgaaactaagcttcaaataacatgttgcacgcatatacgactgatttttcttacacgtgtggtaaacaactgtttaaaccttattttcgttactattcggaataatctaaaaatttacaggtaattctaaataactataacgtacacgattataaaaaaaaaaaattagactagaaaagtctttagaatgccaaaacaaatggagtgtgtactatagattttttcatagatatacataaaaatatatgaagacatacagttgagtaatgtgacagagagagccattgttggcagaacagtcacatttgataaaagggttgaaagtgccactattgaaatcagagtcatctatggctgccccactgcatggttctccacttttattccattgttctgtatcagcctttatattccatttatcaaaaatagaattcaatattctcactacatgtaaaaaaaaacaaataatcagaatataattatacatacaagtcaaaatgaaaatatatgtaaacaacccaattttttggtgtacaccttggcggtttgtgaatttttattactattgctattgaaaaacattatatctctaaattatgtcatctctgactaaaataaataaataaaggtcaacaaaccaaactttgtaagttcacatttgatgttgcaaacagctaaaggttgaagcttttttcttcattatacaaggtattctaaaatcatttctatactcatacatatatacatatatatatatatatatttatataatcaaatttaaattaaagagaaaatacaaaaaaacttgaaaacccagttcttcaaaattgttcttaccaagttgcaataatagaataaaggttccaactttactaaaaattcacttctttaatgagagagagagagagagagagagagagagagagtacatatttatatacataaacataccttcagatggatctgtagtgggttgagttccattctgggctcttgtataaggagcaagaacaaaaaaacatgcaacaaaaaaataaatatataaagctcctgacatgaaaacttactgtgtttttctctcaatcacaaccaactttgcttaggctaatatatgcagaggaaagaagtaaatattgtatatgaaaatgtgaccatttatgatactgaagggagacagtatataattaaagttttcagtcttatttgtatattattatacaaataaatacattggacccccacactttcaaatggtggctaagcaagttgacaaacttattgcttgaaaaattaatttctttgtttttgttatatgtattctttatagaaagataaaatatagttttcatatatacacatgcgttgattggtattttgagggttgacaatattgaattgtgttttaaataaaaagcttttccacaaatagcaaccatgcttacatgggctccaccttttgaaagcaaaataagtgaagaagaagaagaggaagaacaagacttggtcaaacttgatgtgaattactattcaagtggtatattatctctatcaaattctcaagagtaatttgtgccaaaaccccctcaactatcaatttacttgtaaaaaaactatctaacctcatattttggtgggaaaaccctccaaagtacgtttacatttttaaggtgtcgtctgttcagcctcgttaaatcctaattttgcccacgtgacaatgacaggtcattaaaaaattatcctacgtggccatattttacaaaataaaaataaaaatgtaagagtaatttgcgtcaaaacttctccaactatcaatttacttgcaaaaaaccattcaaccttaaagttttttagatggttttttgcaagtaaattgatagttgggaggttttgccgcaaattactc

SEQ ID NO: 115559 - DNA, 1877 bp, Cannabis sativa
tattaaagaaaagggttttaacactatttttgtatcaaatatattgctttatacattttaatgtaaggtaaattatatgagtcgctactcggaaacgctatcaaaatataatagtattagtggctataaacattatttagtagttcaaattaagtactaatgataatattagaaaatatttatatataatagttttagagacatcactaacaatccaaaaccaaaaatgaaaatcaatctggttgtagaccaaccctatataggaatttatggagagaggtttcttaattgtcctattagcaaccctattagccaaaactaattaattagctagttgggcagattgcaatgaataatctattactataaatatacagtactacgtggcatcttggcagttgcgcacaacctacatgtcatgtgacaattcacactcttcacttaattcttttgtgtactgtgtttctaactcatactttaatattttcattttaaaacatcatagaattcagatgaaatatcataccaaaaaattcggctttgaatttaatcagttgtttccaaaaaaaatatatatatatattaataatgttaaatatgttccagtgcacatatcatttacccacttgattatatttaaatttgaagtttaagctagtgtggtaggtttataaatggtgggttacttagagcatttctaatagtaaaaaattaaaagatgcttgtttaggttaatagaagaagtggtaaaatgttgagatgttatagtattggagagaaaagaatgttattataagaatatgtgtgaatgctatacagtaacattgatgctatcattatttttttaataaaaaattaaaattaaaaaattattgttgctaaaaaattaaataataatgtatgagattataattatagtatttttgaagagtgttatattattggagtaattttagaagtaagagtgccaaaaataatataaaagagagataaaataaaatgttatatttttgtatgatttgaaaataatttttagcatccttaatggatgcaatcgttgaagatgctcttataagtcatgactaaaacttaggttaattaaaaattggattcatcctcaatcagattgatgaattagaatcagaataaattgcttacttaacttcagaaatcaaaatcaaaacaatcagtttcttattgatgtgttttacattacttaagacttggaatagattatttaagttgcatgatacctttaattaaagttttatttaaattttaaattttttctaattaaaagaggataaaattgacattatagatggaatgaaagtagcgattctgccaaccttcttatattggcaaagctcattttttaacaaaattacagaagtcaacaaggttatgaatgtcattctttattttcatatttcctaaaaacatttttaataaaataggtaaaaattgtgttatatttggaacataaaaagattttgtggtattacatttgtatcaatttttagcaatttctctctaatgcacaatcctaaaatttagagcacaatgttaaacaatgttaaaagttgatacaaatttaatatttttattaatagaataaaaaaaaacaataacttaattattaattttattatataaaacaataaaaaatgaatataaatagttcatagttaatgttataactaaataaaataataaaataattaaagctatataaaagtaagaggagtgctaagggaattctgtatcccactctcttttgcactctccctttaatgtgatgacaaatgtcatatattcagcaatagttatttttacttaataattagttatgctattttaatgttattacaattgtg

SEQ ID NO: 115560 - DNA, 1398 bp, Cannabis sativa
atctcatgctcactagcaataggattgggccagatttgggccacatggcccatttaactctacacagaaaagatcaggtgtgtcagtcttaatccgtaaaggaacacttgtaaaaaacgagaacaacgtaagcctaaagcctttgctcctattgaaattacaaaaatacccttgacatccaatccccgctctcttgcagcgactctcccctccgttcactcccttgtcttttttttctcaaattcctatgttttttcattctttcgcattcatttgcatgagacgccatttcttttttccaaaacgaaaaacaagaacctaaaaacaagggatactcgtttctctctcattttcccggaaaattaaacatacttttaatccgacggaaaacttggaggacttccgccctaacccaatggtttctgacgaagaactcgtgatccggctccgtgagattctatgcgtttcggaccttcataccaccacgcccagcagtgtccgccgccagctcgaggccgattttgggctcgctttatcagaccgaaaagcctttatccgcgaacaaatcgacatttacctgcaatccaacctcaccaaacctcaagaccaggaagaggaagttaaagaaggggataaaggagcagaggtcgctgaagtagaacaagaggaagaaggcgaagccgaaacggaagagggagaagacgaggatgatagtcagggcaaagatagcagaaaaggagggtaagtattcttcaattacatttgtgaatgaggttgcttgtgaggaatagaaaccaaattgttgttctgggtttatctctaaacggaataatcaagctttacactttcttattggaaaccagatagatttttgcattttatttaaacaaatgggaagaaggaaaaaaaaaaataaatacaggttttcatttattatttacaaaattgcattacttaatatcaacctggattatggttagaggaaatgttggttgttttagtggattattcgagtcttttaataagaaaagaaaattgaatttgattatattagctttcggaatttgaagatatcgacaacggtcatgtttgaattataattccttttaccatgtaagttgatctaaacaattcattttagatgtttgagaattacatttgagtgaatttgaactattttattcgagaatagattattaatttcatttttctttcttctgttggatatatcagctgtctcgttcatgggaattattgggaatgacgtatattctttatgattatcattgttcattcggtaaagtgtagttatgaaagtttctagtgcataatggattaatgttttaagacttgtgttctatatcacttttttttttttcatatatttccttatgccgt

SEQ ID NO: 115561 - DNA, 3111 bp, Cannabis sativa
tatttttataattttttttaatgtttaaattatttataattattttttaaaattaaaattacgcggaccactaaaaatttgccacatgtacaaggatgtacacgtagacagtccaccgtggcacttaactatgatttttggacagaggggtaccgccaatatccctaaattttatgttaaattgtttaattataattttattattttaaaatttattttaaatttagtgtaatattttttattttttcaagaaatttaaatttaatgttatggcttattgatgttaattatatgatttttttataatttagtgtgataatatttatagctaaaataaataatatattaaataataacgtgtgagatcataattataatattcttgaaatgtgctatactaatattggagtatttttagaagtaagagtgctaaaaatgatgtagaagagaaataaaataaaacattatattcttagatgatgtggagatataacacctttaaaaaaatgctacgattgtagatgctctaacaccatctagatgtgactccttgcaatagctagttaattaacgatattccctgtaaaaattaatacaataaattatatagaatcaaatacttaataatactaagacagacaaaactggtcagacatgataatacgactcaaaatccgcacgagagttagcgggtttggattttccttaaatgggtggtcatggtcaggttgacttgtctaacctatttaatcaataggtcgtgttcgggtggacacgactaacacgaaactgacatattaatgacctatttaaagttattttagtattttaacatgtcataaatgagtcatgcatagacttgttgaatacgtcataaacatgttattaggttgacatatgtatgcttataaatagattacacaggtcgtgtttgggtttaattttctaacacgattattaaacgggggttgtgttcggatcgaccatatactgattatacatgggtctcgacacaatacgaatacgatccgcgaatcgccactcctaaattataccaataccaatatatatttgttggaggattttaagcatcactaatcatgactaatgtattttagcattctctttttaaaatacctatagtcagtacataatcatgttaacacaaacacgtatagcaaatttttctacacatatttatttccattatttatttatttagtgttattcacaaaattcaaacgctacacacaattacgaataagtttattaattgataggatttggctcagaacaatatccggccacttttatacacagaatttttattagaataaataggatatggctcagaacaattgccacttttattaaaaggtgcatccttggaattaatttttccactttttaaataaaatcttctataaaaattacgttcatcactttttttcttaaatacattgaatttcttcaaaactatgcaagtaataaatcatttttatttttctaaaattgaacaaaagaaaatctaccacataattacatattccattacttgtaaaaagtatatttgagtattttgttttttgtttttgatatttggtaagaaaaaaaaaataataaacaatgtgtataatacatgttttatttaaattttttctatattcttctcgaaacttcataaactttatttggaagagattgatcacaacactttacaaactgctataatttatattataatataattttataaacttattaaataatataattttgtttgttatatagtataaacttgtaaaaagtactatgattttttttacgggagcatcttgaaagtatgatttcaaaatggaagaattatattcttttccatactaaaatgttacaaagaaaatgatataatatatattcgttacatattataattaattgaatatataatttccgaaactttttcattttctgaaaatggatactaattcattcaactacatcagctaaagcaaccgaatacatcgatcaatcaaagaaacaaatgttaaatattgtcgattacactttcaacattaatctttaaagtcttgaacaaaatatctcaaccgagagcaaaaaaatccatgcataaatatattccacaactaaaattaagctccttgggaagaaaagataatactattagtctattaccccatttgttgatctattacttcccaatgaaaacattagtaagaactcttttaacttgcagtgatgccttcaacaaactcaatccctgtccatataattaaaataaacacatttaattaataatatcatgaaacctcaacaaaaaaaacaacatatccataacaatataaatataataataacacttttaataagtacacatacctcatcaataccaactgttacaattttctcctgaagagtactaacatccttaacattaaagctattgaatatagctacactcgagatagtagacatgggcttcacttcaagatcatccattatcatataagtaacaacttctttaacaataccatcaaccccaaaagaagaagaagaagatgatgatgacatggatgaaccaacttttgtattagtagaaggttgtgccacctgagttaatgccctagtgaaataaccttttcggcaaccagggcaaagcccacttggatcatggcttacataataagtacagtagctacaaaggtatagctggttttttacattattggatttggtactatcattattggtcaacaaaaaaaggttattaggtgagcaaccttccattgaagacttaggtttaagaagtgaatctttatttacacttgattgtaaataagtttcattaagattttctaggctttggtagagtttgcctaaggtaccaaccatgtcaatatcattagttgacaagagtcttatgatagtaccaactggcattgatagaagagagaagagaaaatctgtgaagtcttttcctgcttcggcaaataaaacccttttcttctttggatcgatgagaagtttcagtgttaaaacatttggtggaggaggaggaggaggtggaagaggaggagttaccatattatatta

SEQ ID NO: 115562 - DNA, 9443 bp, Cannabis sativa
  modified_base (7826)..(7827): a, c, t, g, unknown or other
  modified_base (8935)..(8938): a, c, t, g, unknown or other
aaattcataaactagacatagtcaccacagccatcccagcaatctttgatcaattggtaacaaagtggttcacgtagccatgcattttcaaaacgaaaatgaatgacctgttgctgaacaatagtagtaaaaagttcaagcaaaatgggcgaatgatcggatgtcgatatctcaatattgtaaagtttagcggaactaaacatttgcaaccaagcaagattcgctaagcctctgtccaaacagacttcaatccaattcgaagtacccctacccctttcccaagtaaaaggataaccacaaagctccatgtcttgtaacccactgtcattcaaagcttgttaaaacccattcattaagaaatcaagatactgattccctccccttttatcctcatgagcacacacattattcatgtcattcattacgcaccaaggtaagcttgagttagcagccaaggagcgcaaaagattccaagttgtcatacgaagccctctattgggttccccatacagccccgtaaacctccattctgccataccctcaattgaaacttttacattaatataattaagtgagaatcctaggaccgaaacctcctcttcaaccttccaaagtaacacaatgcctctacttcttccttgcacatccaccaccatcatcccttcaaaccctaaggaaacccgaaccctctcaagctgagctcgattattgagagtttcacactggaaaattaaattgggttgcgtttggatcacaagattcttaaggaattgaacagcccatgggttctcaagcccatggcaattccatgataagattttcataatgggcagtgggcctggataccagcacccatcaagcatgtgttatttgaaccctcctcaacttggttcatatccacctcatccccactcccttctcattctctttgaatcaaccaccaataaacagtcctcttcattttgagtaatcattgatctttctaactgtccacatttgtctccttgttgacccttgttttcctccacaatcatagtgatttttatgctgccacctgtagccgattctttccttgcctttgaatgatgaaccaatccgacagccatggtagcatcattaccagtatcatcttccatagccatcatgaattgcttcagccacttagctccaattgtatgattcttacgtacaggcttgaccctcatccattccccatatggtttaacaatccttccatctaggacatcaaagcgtcaagggaaaaaattatccgtatggcccattagcccacatatgaaacagaatgtaggaaggtgttcattttaatttatgttaattaataaacaagtatcaatgtataggagtattttttatatatggtataaaattaattttatacgactgtaacaaaatgataccatagatttattatatttgatcacaattatacaattagattgattaaccaaatattcattactcgatttaattttctaaattaattgttaaaatattctaaaaattaatatggcgcaaatactgatggagtatcttacatataaatatatggtctctgtttcttagcttttcactcattctgcgcaaatagaaaatttcatctaaagagagttgggagagctttgaagcacgattttctatactaaagctattgttggggattgaagctcaaatatcaatggctgaagatatttcggttctttcaccgtatgtacgacttcaatatttttatctgctttgcatatcaattttatatgctttattttttatatcaaaattaatctaacagttggtatcagagcatatttttatctctaccttaatttaaattttgagtttttatatatgtatatatatttatatatatatacatgatcattttggattttcgttaatggctgatcatcgtaaattttttattttaattattttaatttatgttgttgttaattttattttttatatatttttttttgtatcaaattgaatattttcatagtatatgtttatatatatattttacattggttccataattttattgtatataattgattattataatctattctatatatataccatattttatgtggtataataattatatatgagtatatgtatacataaaaagttttagtttacggttgtttttgctctaaatctttagtttttatttttcggtatttatttcgattcttgtatgcatcaatacattcatataatgctataaattttttttatgcatgaaatcgatttgaaaactatgaaactatgaaagctgagggagttggtgggtctcgagatggttacgttggtagagtatctgtaggagaaatcatatccaaagggcagtcagccttaaccactttgaaaagttctgttgagaatggagacaaaaggaatttaaatgaggtggatccaagtcaacataaagagggacaggtggataaaatgaagctgagtcatcatagggagggtgaagttgaaagttttgaacgacatgtcgttgagggaaaaagagtggaaatcgcatctgttttctctgatgtttctgagtttgctacccagaagaaagtcactccctccataggtaaatcaaaggagaagggagagaagaaagaagggagaagtgtgattctaagaagcaaccatcttagtaaggagagagatgagaaagcatcggcagaccattctaagaaatggtcgacgaaggaaagggaggcagcaagcgatatggagatcgatgatgaaccgggggaaaaagggccaattgcgagaatgagattgagagaactatggaaattcaggagtttagactcccagaaacggtgacgggttttgcaaagggctggattgatgaaaagaaaaaggtggtgaacagtgtgaatggtcgaaagcttaaatcggcaaaagttttggctcgaagtaaagcttctcttttggttaataaggggagagaagatgggcatgatgacatcagtggtgatgatgggtagttagtggggtcggatatttctggaaaggaagatttattggccttaaacaaagatgataaagtggcgaaccttgagatccaaggtcgccgatcacaatgttaatactatggtgaaatgtctagggactcggcaaccctgaaacattcaatgcgctccatttgagagttgtggagatgaagccgaacttgatctttatttctgagtcgaaattactgaatagtcaagcggaggtagtggcgaggagattgggtttcaatgatttttttctggcagaaagggtggggcttagcggtggtttaatgctgttgtgggaagctggtcttaaggtaaaaattctatctcattccagatttcatatacattcttttgtctgtgatttgaattcgatggtgtggaattttactggggtgtatggcgatccagttagaagccaaagacataatttctaggctatgcttcatcgtattagagattaagctaatggcacgtggctaatcgggggtgattttaatgaagttcttcatgcgaaagaaaagcagggggtagggagaagaacttgaattctatggatgggttcaggaaagttatggaggagtgtgactttgaggaccttactaaagacattgatacttttacttggtgtaatggtcaaaaggagaagttcatgttggaaaaattagatagatgcctggccaattcggattgggttaatctttttcctcaaagtagagctttctatcttgaatggtggtgttcagaccacaaggccctggtgcttgataccgagggtggaagggattccaatgacggggggaaggcacttcgttcccggtttcattttgaagaggcatgggtagaggaagaagagtgtagtgacattgttagagaagggtggaacacgttggatccttgctcctcggattgggattttaagagtaaaactcaaaggtgtgggagtagattaaatagttggaatacaaagaagaaaaaagagttgcaacacagagttaaggagggcacaaagagggttaatgagttgtcgaaaagaatgaattttgacaattggggattacttaaaggtgctgaaaacaaccttaatgcaattcttgagaaacatgagagatactagaggcagcgaagcagaggtttatggatgaaatgtggggataaaaactccaaatattttcatcataaggcgatggcgagaaagaagaagaacaagatcagtgagataatggatcatcaaggtgggttgatgagaaatcactctgagattagtaaggtcgctattgaatatttccaaggcattttcacttctactaatcctagtgagcagatgatgagtgaggtggtggacaaagtgaaatgcaaagtctctgcaaacactaatagggacctactagaggctttcactgaagaggagatcaccaaagtggttttttcttgaatcctttgaaggccccaggaaaaaatggcctccctgctctcttcttccagaagtattgggaaactactagaggggatatcattcgggtttgcctcaacatcctaaataacaatgcgtcaatggatcatcttaacgacactcttattgctcttatccccaaagtggacaaaccgtcaaagatggaagagtttcgcccgattagcctatgtaacgtcatctacaagatcatatccaagtgcctggccaaccgaatgaagatgtgtttgaatgaggtaatcttggagtttcaaagtgcttttgtgggaagtcggataatacaagataacgcaattgtaggctttgaagggatacattgtatgaaatgaaaccggtttgggaatggatcaaaagtggccttcaagcttgatatgtcaaaagcttatgaacgagttgaatggccttttgtggaggcagtcatgttgaaattgggtttcgatagtcagtgcatcatgaaaatatccaagtgcatttcatctgtgtccttttcggtgttgatcaatggaagacctacgagaaactttactcccaagaggggattaagacaaggggatccactatccccttttctgtttttattctgtgccgaggctttgtctagcctaatcctggatgcggaagagaagggccttattcatggactgaggtttggtagaaatggtgtttcggtctcccacctgttcttcgcaaacgacagcttgatttttgtggaagcggacaaagaagaatgttaccaagtcaagaaaattctggcagcctatgaagcgacttcaggccaaaccatcaatttcacaaaatcaaaaatgtgctttgggaaggtggttgatgaagcctcgaaaactgaatgtgctgatttatttggagtcaagaaggtgggttttttgataagtaccttggtatcccaatctttgtgggaagaaagaagtgtgaactttttgctgcaattaaaaagagggtgtggaatagacttagaggttggaaaagaagtttgttttcggcagccggcaaagaggtgttgattaaagcagtcatccaagcaatgccttgttacacgatgggggtgttccgacttcccaagaaaaatatccatgagcttcaaggaatgactgctagattctggtggggttcttcaaagaaaaaaaagaaaactcattggggagcttggagtaaactttgtcttcctaaggagaaagggggtttggggttcaaagacttagagctttttaataaagccttgctagccaagcaagtgtggcgggttgttagaaatcctatgtcccttgttggaaaggtgttgaagagcagctatctctccaaatcctctatgttggatgctaaaaaaggttcgtgttcatctgcagtttggaggggtttgctttggggtagagagattgtggaagcaggctctcggtggagagttggttcgggggaaaacattgatattataaaagataggtagatgcctagacctgtgaaatttagaccaatcttaaatcccggtatacccgctggtaccaaagtcgttgatctcagattagcaaatggggattgggatgccgagtttattaaggcaatctgttgtgaagacgatgcagagattatattgggaatccaacaaggctcttctaagagtgaagataggctgatctggcacttcgcaaaaaatggggaatacaatgttcgaagcgggtacaacactgctcttaatgggagagtgttcgaagagaatttcgacacagaaagcactaagaaatggtggaagcacatgtggagcttgagagtcccccctaaagtcaaacagtttctctggaaagtgagtcatgagtggctcccgactaatagtgttttgttttgcaggaaaatggaggttgataaacattgtgggtgttgtaaaggtgcgagaaaggaagaaacaatcattcatgccctttgggagtgcccaatagccaaggaaacgtggaaacgatgcaggctgtacaaagagataaaaaacgagatcaatccggatatacaaaatttcttatggatgctaaaagaaaagctgtccggggcaaactttgatctctttgtgatgatttcatggcaactatggtatagcagaaacttgtcgctgcacaataatttctcccccaagagtgaggatgttattgcggtagctacaagaattcttgaagagtaccaaagcaaccatggaagacggagtcccaagacaaacaccccagccccggagaggaagcggtgggcccccccagattgtggtacattgctctttaatgtggatgcggcggtcaacaccaccaacaagagtagcagtgcgggaggggtgcttcgcgatcataaaggcagctgtgtcatgtccttccgacagtactggcacttcccgttcaacccatatgttgcagaactcaaagcaatcaaggaagccattctcattgctggtaatcgtaatctcagaggtttttttttatacaattagattgcctcaatgcagtaaaagcgattaactctagttatgttttggatagggatgttgaatttttgttggaggatattaaaaaaggcctcttgtcttgtaatttcttaggagtgaattatgtgccaagaacttgtaattccttggctgactatttagcaaagaatgccttagttgttaaggattctcttgtgtgggatggaggtgtgcctcctgttgccttttcaaccttgttggttgataatttggccttcccctaggtttctttgtactgttctctttcctcaaaaaaaaaaaaaaagaattttttctaaaatatacgtttggacccgagaactctctttagaattaaagtccaatttttaagtagtttcgttccatgaaatctatatgaatgccttaatttttgcatttagattcatttaaaattgattttggattaatttggttgtcaaaattaagaagttacaatcgggtatgggtcgggtccactgtgacccgcgtgcagaaaaacaagtcatttgcacccccgttggaggttgatggtggcctaaaattccgtgtcgttttccacaatatatgaaaaacgatatgttatttttttatattaattataaggtagccttttgaaaaaagcgcaaattgttgagtaatttgcggcataaatacttaagtttaactcctagttgcaaataaatacctaagttcaatttttggcggtaataatacctaagttataattctagaacttttgtaggtacctgactgttaagtgttaagtaaattgccacgtagcaatttctgattggtccaagtcattaaagatttattttcttaaaaaaattaatttaannataccaataagaaaatgacacgtgtataatgacttaatatttaacagttaggtacctacagagttccaaaaatataacttatattttattactatacaaccaaaaattaaacttaagtatttatttacaactgagaattaaatttaagtatttatgccgcaaattactccgaattgttactagttattgtatatttttaaacaattaatttttgaattaaaagaagaagttacatactaattaattaactaatagcagaaacacgtgtcaattagtaaaccacaaattagataccaccttgaatcaggtatcaacatatagtaattataataatttgtagttaactagcaaatgcattactgtctctcccattaatttggtagtaattgaacatattggtagaatagaatgaccataattagttgttgagtttatcatataataaaataatagaattatatgaaattaagtagtagtactagtagtgaagatgaagatagtgattaaataaaataaattaaatgaataaaaaccagatgcaggggttacgtacacaaggacacaatcccgagatctcctcacatgcttaagtttgtagctcaatgctaaagccagaaccaaacttattaagttattactactataatataatcttttcattttgtcctcggcctgcaaatattcgatacttgcgttcaaattatattataatatatttccaaggattatacatataaacatgagaatccacgttaataatatatctaatcaacctctttttgtttttcaatattttttttaattcctcagcatgtgccccagtttcttccactttctttcaacaagtcactttgtgtagtaaatatttttatatatatatatatatatatatatacataaatatacaagaagttacattaaatatacctaatcatcatagttaaatttatttttattcgttagataattattaaataattttagttaatcaaaaaattaattacaaaattacaaaattatttttatatcaaacatgagagagaaaaattacaaataagaagctccttataatataaaactatgcccaaacaatatatatatatatatnnnnggaacacttcttaatgggtaatatccattgatgtgcactaaaaaaattaataagataacaatctaataaccttttatagtaagcttccaacaattatttttttaaaaaaattatatttattttttatgaaattgaaaataataattacaaccaatagtttaaaaaaattataaattattttaaaaaattaattgaaattactactttattattttatgaaattgtgagtttattaataatttattcttataaaactaataatcatttacatgtatatgaatgtgtttttttttttattaggagaataagagcttgattgtgaaatccaattgtgttaatattattcatgctcttaaaaataaaacactacaatacttcttagttcttacttagagtattattgttagaaaaattgaaaaatcgtatttttgcaaatgtcaattatatataagaaaatataaaactgtacgcgtctgcagaagcagaaagtaattctgttactgca

SEQ ID NO: 115563 - DNA, 3139 bp, Cannabis sativa
agaaattcctattgcaactagcgctgcaaccacttttgaaacccaaactgtaaatttaaaaaaaaaaagttaaaaaaatagtatataggtactgattttaaattaatttaaatgtatataaatattaatatattatttgtaacattattatttttttattgttatttttaatattagacagtatgttcaatttttactatttttaaattttatatttattttcttcaaatttttaaaattttaaatatttaaaaaacacaaaattaaaaaattaactagttttccataatttataaaattttaaaaatacacataacaaagataaaaactaaaaatataactaagtatatatgcaatgcacataataatgtagtgcaacataaaaataatttaaaagtacaatatttttgtaaataaaattttaaaaattgtaaaaataattaatattgtactattatattttaataatttttttattatttttatatatttcttaaataaataaacttgtgaaaggttgcggtcccatcaatcaatgtatattctaccgcttaattgattatatatatactaaaaattgtgggtatttaattacttagtaaattaaatgggcatatatttgtattttttaattttcattttatataagtataattttactttttttttctaatgaataaaatagttttgtctattttacttttttattattaatttacacattcaaatctctttacataaaagatttttttgattaattaagaagcatacattattttcaaagtaaccattaaagataaaaggaaaatacaacgttcgtacgtatgtacatgaataataatgaaaggtgaactatttagatatattgaatttaccagagcctgaaatttagacagtgaaccccaaataaagacaaatagtttgatatatgtgaaaatacatatataaaaataagatagattagtacgtatgataaggattagagcaagaaaaagttgtgtgtttttttcttgggaaatgagagtaagaaaaaattattacgattgactaaaccctaccacattcagagccaaaaaagtatagtgcttggcctatattatatctctctctatatatatacatattcagagtgctaccacacgtaacctctgtctcccatgcagaccagaagacccctcgtaagatactaagaattatatatatatataaaaatatatatatttatatacactctctccctttcttcatatttgtttctgtttatctatattatttatttctcacaaagttattgaacatgttaatgttacactaccaagggaaatacaacatgtcacaattattgttagtttaactacactaatcaaatatattgtttttgaaatagggttatagatagataaaggttagacctatagtcattataaaatgtgtagataattgagggatgaatcatatcagttatattgtttgttgttaacgcaaatttttgttaactaaatttgagcctcataatattgattttatacagaaaaaattaaagctaacaaaatatagaatatgaacacagggtttttacgtgattttgcagttaaaattctgtatagtcaatcttattccgatttttgagtattttttttctgagcctctttcatgagttttttcgttctttttttgagcttgtttgccactatttctaattacatagtaggcaattaattacaaagttgaccataatatgtttacagcaattatgcttaaaatcatgggatttaattacatatcatgaaatgtaaatgcggtttatgatttgaaaatcgtatagttgtgatttttccacttttactgggtcaaatttgtcgtgtattaaaccatctttaattgttgaatttggagttgtcttgacataaacttgattatagtgatcccaatagcgagctgggccattcttccttccaaggtcgatgatgtatgttttgtgtcgatcgcagttatttataaagaaatcttctgactcgccaaggtcgtgagcctcgctcctgttagttggatgaagctattggaagtcttcccatagcgagatggtcatttcgcatacttgttctttgagtcgatccgacttttacacttagtttgcttattgcaagctaaggacttttaaagttggtatgtgtcactttctctggtgcctcgctactcgcatttagcgatgtatggtttcttgctaatacactaagtgccagtttgtacattgattcctcgcctaaaactttacagtcagcgggttacaaatatactctgactcttatgtaattaatgagttattccataaaaagttattgcaccgattcacattccctttatcttgacatgtgtcctccagccgaatttcgggtaaaacaattgccccttaaaaagttctttttttagtaaaaagagctttttaataattacagaaggcatttttatcaaaatcttttcttaggaaaaatgcatcctttaattctggtggtgtacagtttcgaggatcattatgaatcgtctcttcatattttgcacaacttccaaccaatagatttctcaatctttggctttcttgtcactggacttcgtgtataaaaaggcggctcaagcttgttattttttacaaaccttctggctctttagtgagatctattttcataatggatcatctctttcctgtcaaaatgtctcttctgagttcaaaagttcatccttccaaactcataatacccagatgcactaaccattctccattttttcctacagacatcaagtctctaccggagccgcaaatgatagattccaggactgaggagattccgaccaatccaaaccaggggaaccccgtagcctgccatggccgatcctcacaagtgatccctgagggtatagatcttgtgagcgatcttaaaggtcctcctcaggatgatgaagaatttcagagaaagattggcatggtttcatgtgtatatgggaaggaatttggcgcggtttctatcagagaatctagccaacccaaggcccaaacctgggcccgaagacttttgtgccaacctctttcgggtatcgaggaatttcttgaggataggaaaaagatctcggcttcaggaaatgg

SEQ ID NO: 115564 - DNA, 3143 bp, Cannabis sativa
aaaataaagtcaaacaagccaaattgttttcaaaaaataattttctgtttttaaaaacaaaaaagagtttattagttatgatgccaaacatacactatatttttcaataattttttctctatgaaatatatattttgcccccactaaaagatgtagttgctctgccactatatagaatgttagttattttaaagtattccttatgcataaattatagcttgaaaagaatgtagaagatttttaattattatatatttgaatttgaattattctcagtcaaacaatggaatggtgaggaacatcaaagatttttactaggactgaaaatgcttggaaaaggggattggagaggaatatcaaccaagtatgtgaagactagaactcctactcaagttgctagccatgctcaaaaatatttcaagaggcaaaatgcttctgaagaattgaaaaaacgcagaaagagcatttttgaccattcaaatcacaatctacttatgtctcaaatttcttgcccaccaacaccaacagatcaggtcacttgttaattaagacccctgttattttaattaaggctaattggtaaaattttagggagaatttttaacggccaaaaaaaattcaaggagcacgatttagtacatgtcaaagttcaggggaaaaattattaattagcttttaattaatgtacagtcattgagtcattaaataataagatttattattgatataattttctcagcttcaaaaccggtgcagcttggacaaatatgatgcattttcttcaaattcctttatagtcccggtgtgtataatctcagctttactaattattattaataactttcactacgtaaataattatatgatcattgtaccattgtttatatatatgttcagccaatgccaataataaactatagtactgcaccaaaatctcttccaataataccaaaatcttctccaaagattcatccaatggaatctgtgtagttgcctcatcaaacaactacttcaagaattgattcgaattatcttccactacaaaaaaaaatagctacttttagtgaattttttagtcgcaatataaattttttgtaactaaatgtgacttttaggaacaacaaatagtatttagacacaagttgtcactaatttagttttagtcacaacaatttcaaatttttgtgactaatacttttagccacaaactttttagtcacaacataagagtgatgatttgtaattagtcgcaactattttacttttagccacaaattttgttgtaactaaaaataagatttttttatagtgttcctctccatatagggccattattaattctaaattattttcttattttttatttttcataggtttaatcctgtcaaaaataatttttattcaattaatgaaatcctagtataggatttattttttattctttaaagttgttaaaatttgggatttacaaatttgatgaaacataattgtaattttttgttgattatatatggcattgtttgtttatttaaaatttatataataattaaaaaaaataatttaaataaaatgtatatttttcaaaaatgtttaatcaaaccttcgttttactaggattaaaatctattttatatattctctcaaagaaaacaagatatctattctttatataaaaaaaaaaggttgtatataacaaattgtgattctactagtctatttattattgtattatatctagtcgtgttcattcggtctaactcgtatttttttggtcaaacaacatccaatctgcacttagtgtagattttatatttcggatccaattcgatccgcataacagttttaatccagtccaatccaatccgcaataatgcggattgaatcggttatttttgttcggttattttttttttcaatgataaattatttaatatttcatagaaaaaaaaattaaaaaaagattattgtttcttaatctccaataataatctatttctatcttcatttatatataaatcaaaccaatatacatatatgtcaatatatacttatctttaaatttacactaaaatatatatgtattcattactaaaataaataagttagtatatatatatatttaaatttatgtgtatatgatgtgaataagaattatttttctagtattttttattataaaataaataaaatacactaactcaatatattgctaaaaaagattaaaaaattagaagtttgtgttttttttaatattactagaaaattaatatatattataattataattttttaaaaatatatataatttagtgcggaatggatttgatcggttactttttgaggtcaaacaacatctaatccgcacaagtgcgaattttagatttttcaatccaatccaatccgcgcaagtgcagatatccgcattttgtgaattagattggattggatcgtgcggattagattgcgatcggatacttagtgaacacccctaattgtatcttacttaattttcttaattatcaaaacacaaaatgtattcaaaaaacagttattagatatttttttcaaaaagagaaagaaaaaagaaaaacttataaccaagacttggaccaaaaacccaactctagatctaaaccccaaccaaaccttagactcgactacgacttcaaccaagctttggcacttgagctccaacctcgatcccgaaccacaaatgcgacattgttcctaattttctaaataataccaatatatatatatatataaatatatatatattacacgtataatttatctagtactatttaaatgtacatttattatttatttcttgattatataatattaaaaaaaataagtgtgtagatagtgtgtacaatttaagtgtatcacaatcattattcttatatatgtggatatgaagaaagtattgatcatgagccattcaacaatttacctaatttttatgtattttgaacaaattattttataatatgggtctcataatgaatactttagatttagaaacacgacttaaatgtttttcttaccattgctctaaaccagggccggccagagggtggggcagccggggcctcggccccaggccccataattttggaggccccgaaaaaattaaaatt

SEQ ID NO: 115565 - DNA, 1542 bp, Cannabis sativa
tagtttatattattttataagtattcatttactttattattgtcatggatatattgtccatctttgatttctcataataataataattatgtccttcaagctgaaaattttatagcattcgaatacatttttattatcatgttctttaagaatatttttcaattgaaatattgggatctgaatatttcaattgagttatatattttgaatcaaaatatgtcattacaagaaatgtgatttttgctggcgcattattgcgccgacaaaaatagtcatagcacgtcggcaaacttttatctatgcataaaggcgccggtaaaagctgtcagcgaatcttaatcggtaaaaggacttttgtcgacgcaattcacttttgcacctgtaaaaataactttaagtggcacttatatgcgccggtaaaaactatacaccatagtaaatttggtcccaaatccgataatgattagctagtcggcaaattactgcaccgacaaaagttttgcgcattttttctaattggtgcaaatagttttgccagcgtaataatgcgccagcaaaacttttcgcgccaattaagattttggcacgaatgacctttaccgacacataaatgtgccagtaaaaagtccaagggtttaggattttaggtttttagggcaagttttattggcccataaatatgttgggaaagttttgctttaatttttttaattttattatatttaataaattataataatatttaattaattttaaatgtaaaattagattttaaagaagcattattaaaacaaaaaacggttttcacattaataattaaaaagtattttgatcgaactaatatacattcaatttatactgaacgtaataagttataaaaatttacaacattattagtaaataaaaaaaatattaaaatatatttggaaaaaaaaagttaagttcacaagttaattatgaaatatatattgttttaaagacgggtaatgccatcatcgttattgttctgagtgtcgggacgatgcgatgacgatcgagcaccaggaggagtggggaaaggtggaagatccataagagtcaagttgaaaccagacacaactcaagagagatactcaaactagtctttgaatcgcttgaggtagagttgttgtgtttcatactacttctcgaataccgagtttcctgctgtgcctccaccacttttttttggaatacctcgtactgctccatagtaacagtctgtgggacataagaagtcgtggcaggtgctctttcagccccaactgccttcaatctcgggagatggccaaagcctctcatatgtcgatattgctcacccagtacttgtgtcataacaggcaagtctcgtgggtactgggtgggatctatagcatcctcaacaggctgatcctcaatgggcgctggttgatttgcagtcaattcaaccatttgctcctaaaaaataaaataaattaaatagtcagtttgaatacaaaaaaaaaaaatgaaataaatgtcaaaattaatacacatcaatgtaaa

SEQ ID NO: 115566 - DNA, 980 bp, Cannabis sativa
gtttctttttttatctgaatgaaaagaaaaagagtttcaattagataagaacctgggctgtgttttgttagttaaatgattaatttaacagtaattaagtacacaaaggctgagaataaatgaatgaaaaactgcaaccattcttggattaagtcaaaaactaaaagatcagttctttgttcatacaattcaagaggaaaaatcaaatctgatttgggataatatagtaaccatatattttgctataaagtaattgaattgataatgaggaacataacttgggtccataataatcctatcttattcaaagcttcaaactagctcttgccatggccaaagcaccatcataagttttgtttccaccaatgaatccactcatgtggacgaaaacacagcccgggattcctgttgcctccgagagttcttcgtctctaagacctcgccattgcaatgcaagagccttgcggctctcgaatctatcgggagatactgccactgcttgcactcgccattgtttggccctttcgtcctataaagttagaatgctgaagtgagtttgcatagattcatattaaacacatatttgatcccaaaatgtcaattcttttaagtacctgataaagaacatatttgattgaagggttaatcttcaactcctcctcaagctcaaataagtgaagcttccactgttagttcattaaaagtccaaattcagaatttgttgggagctaaaccaaactaacaagtaaaagttaccgaatagacattctgttatattaaatgacaaaacagtaccttaaattcattttttttaacataactataactaacctaaagacaatttctaacaacatatgcataaaacgtaaccacataaggtcaaaactggagattttaccactatagatagatgaaattttactttaaaaaaaaaggattgaactaggattgtagggctttaccccgaagggagcccttcc

SEQ ID NO: 115567 - DNA, 1400 bp, Cannabis sativa
  modified_base (913)..(919): a, c, t, g, unknown or other
tttattttgaaaagttttgatttagtaataatttttttaaattttttaagtatataaaatcaaatttcccaaacaaaatccctaacttagatacatttttgacaaaatatatggttgtgtttgataatactttttaaattaattttgtatttttttaattagaaaaatgaaaatattttttaaaaaaatgatttataaaattattttcattttttaatcttttaattgagaatcaaaattttgaaaaaatttaaaaattaaaaaaaaaaatcattttcaaaattttcttaatcaatattttagactctgacaaacccataccccagcctctaagactgggacccaggcccgaaccccagaccataaactcgaactcagaccctggactcaaacccggaccccagccccaaactcgaaccccaacccctgacctcggaccaagacttggaccacaatctcaaacctaaaccccaacctctaagattaggatccagactcgaacccaaaccccgacctcagaccctggcctcagaccctggtcctagatttgaaccccggaccccagcccgaaccctgaccttaacccggaccccagcctctgagactgggacttggacccgaaccccaaatttgaaccccagtccctagattcgaatccagccccacctcagactgaaacctcgactttggccccgaatccaaaccctgaccccggactaggacccagctccgaaccctggaccctagacccctaccctggacctggccctagacccgactgttggtttttatggtccatattagagttagaaaaatagaagcggatttgattaaaaaataatttaatccaatatgaaccagaagctcaaggatctcaacataatgtatatagattaaatctagactaatgaannnnnnnacaatacctcttgtagcctatcagagaattctcaccatcttttagtattttgtcgaacatccaatccaagaacttgttgaacaccacaatctttcaagctagattcaataatcaggaatagagtgggctaatatattctatttctcaaatctgactttgggagtattgtgatgtaatattctaaagtttttatgaagattaaaaaccctaattaacttaattaagtataaatgtaagattatattattatataatctgatgtatgtcactgtatgagattatttgagtttaagtctttgcatatgtgtttatgggcatttttgtaattttaacccattggtaataaaatcgtaaatttataatactctatcctaatagattatagggattttttcattaatgtacaacaaaaacaattatattacaaaaaatatgcaaaaaaacacaattttaaaaatgtacacatttgaaaatatattta

SEQ ID NO: 115568 - DNA, 1404 bp, Cannabis sativa
tgtattatcatcatccaaaaatatctcattattatacacttgactgaactcttgctctaattggttgctgtagaacaactctgatgaatcagtggcaccatcaaaggataatgaggctacttccacactgatttcaggctcaatttcttgatgatcatcctcgtcgatttctatgaccggaacattcttgatctcttgttggggttttgtaaagggttggttgttgccattgccagtgagttgttgtacaagttgcttgaagtttgagctatcagttatgtagacttttggcttgaggacttttatccaactattcaagtccttcttttcattgttcttagttgttttcacagatgttgattgacttactctcttccccatattagtatatatttactttttaggctttggaataatcagcccaagttttgggttagcggaggattctaagaagaagtatttatatgaagattaattaagaaaggaagtagtaagtgtggaaattggtaatagaaaaaggtcacaagtcattaagatgctgaaaatgatgttaatatatgaaaatataagaaagttcaaaaacaagaatccaaaattagaagcctaaatcacacacacacacatacagactcatttattaattaggaagatgctaatgtttgtgtgcacatgaaaaattggtcaattcaagataaaacattaagaaatagtacttatatttgaactcatttgagatagaaggacatataaggcacgttgttaccattccatttgtgaattattataatatcatgagattttgctttgtgtttctctgtcctttccaattgattacatatttaatatataattttacgtaacaatttttcatctatctaatgttagatggtttacatgtccaagtcctttacatcacattaaaatcttggtttttggctgtggctgtcgacttaatatttatataaatatatatatatatttatatatatatatcaatgtcaataatgacatgcattcactgtttgccgaaacactacgttttaagaagaaggtgattgaattgattgatgccatccttagttatatatgaacctattatatatcaggcttaatgtttaattattactagaggcattttgttgcacacaattgagacaactagataatgaaattaaacatttgtgatattcaaattaacataagataagataaattccaacctcttgatctaacatataacatgaatcatcgcatgtgtgcgtgttaactagtaaggcactcaataagagcattattattgagtactagtggtgtctaacaccttctataaatgaagctttatgattagttagcgatatttcctaaaaactattttcttaagagatctgatacttaattacacca

SEQ ID NO: 115569 - DNA, 752 bp, Cannabis sativa
ccagccggagcgtatccataccctcctcaagctgggtacgcgcctcctcatcctcaagctgggtacgggcctcctcctcctcaagctgggtacggatatccaccggcggctgcacccggatatgggtacccaccagcttacccggttcaacaaccgggttatgggtacccgcctcagaagccgaaaaggaatggtggaaacatggcgcttggattgggggccggtttgcttggcggtttgttagtcggtgatatgatttctgatgcttccgatatgggtggcttcgatgatggaggctttgatttttagattttttattttttttagtttgttttatttttcttgtcatcggaaaaagcgtgtttttttctaattacgatgtaaatgatgggaggttttttaagtgatcgaaaggtttaatcgaataacttatcatagaaaaattgattcttcatttttttttggttggtatctttcattatattatggaacaaatattagaaaatttgggaataatagtctcatctcaaccattctttccgtaaccagcgaatcgcaatttatttataaactatgagcttattattttaaaattcatcagactaaataatatctgcatcaatatcaatatcgcaatttatctgcatcaatctgaaaaagagccaaaaaatcaatctataaagtttttttttttgaaagatgtatattcaactcaacgaaaactacaaaagtttaggcaagtctgccattat

SEQ ID NO: 115570 - DNA, 1657 bp, Cannabis sativa
  modified_base (1627)..(1631): a, c, t, g, unknown or other
acacgattaaaactcaattaaaaatatactaaacttaatctaaaattaatactaaaaataacctaaaatttaaaaataaaaatgacaacatcactcacccaatgttgatagaaactaagctaaacaattatttatcaaaaaaacataaacatgaaccaatattaaacagtaattatgatactaaggaaaggttaattaggagctggagttggggggatgagacgagtaaggtggaaagggaaaggaggtaatccagttgcagataaggtgacttgtattgaggttatctgattctcacttcgtccacgaaaattaacaatatcatatcttttgagtatttccaatatttcttctaccgttccttctctcatgttgtgacaaaggacacgttgaaatatttctgagatggagaacataacttcaccattctccggatgaaaccaaatcttatctgggtaaattatctgcggtttgtcttgccatgtagggaagcaagccctgttgtacactaaactccatgacccattattgttttcccaaaccctccacatgtagtttttctcctcctcttcctccttttctggatttgctggtcttaccatagccaaccgtagacgaccctcactcactcccagcgaaaatttggggtacgataggtctaaaggtggtgtactcacgtagggtggaaatcggtcagttttggggagttcgatacgcccaacaaatttgttacgaccaggatcaaagacaacgacaataatggttttggttttggaacaagtcataatacagtaaaaattcccgttcaaggaaacaaggttgtcggtaccatctaacggagaaagcccttctccaatatatgatctgcttcattttctagttttccaacggaaattggccaccttgatatgatcataaacaatcgaaaccctgtatttgaataataataatttattaccactgtctggcacctcctcgcacgacaatccaaacttttcgccataataagatacgggattgagattaagattaggaagaaggaaccattgtcgagtaaatggattgcagatatataattttctgcgttcatctctaaatctttccacaagcagcaaatcgttgaaacaggcttttatattcattaatccatcctcaggaatgaaattcaaataactagtaaaggaggagagttgtttttggtaaacaacattatcagtaggacgacaatactttcttccgcaaagcatgatcctcatgcattcccccacctgcatcacaagcgttgtgggcctttttcctttgaaggcgccaacaaattggggactccaaatcagcatacgccagcgtttgcagacgacgctgcattggattgccaaccgctgatcagagagtcgtaataggatttccaaaagtaaatcgtcacaaataccgtccattgatgcaccaccaccatcatcaatcctcacgagttttccatccttttttttcttttgagtttgccaaaagtcgcccttgtttctcgccatgatgaatacttatgatgatgatcgtatattggctgaaattccttgtgattttacacagtagtcaactattatatttgacatatatctttatatattaaaannnnntatctaacggcatttcttggtttaac

SEQ ID NO: 115571 - DNA, 850 bp, Cannabis sativa
ttggtagacacccaagaaagcgctcccaaatatccctagccacaacagtttcacacagatcccacactatccagaccactttcacatcaagttaatcttgattcagttggaaaagaccatccagtcacaggatccactgaagggcgggaaagaatagatacaccatagtctgcataacagtaataaatcttatcaatataatatgtaatgttatacagattattgttatgtaccttatcattacaggcttgtcaaatcgtatcgaccacaatacatagaagcatagaggaacaattcatggacattaattaagtctttcgagctcatgttctagataaactttatccagtcccacatatgagcacctcgaatttgagattgggaaaaataccccacagggaggacctaatttagagatgatcaagtaagattacaatgaaggaaaagatgctccatagattctttatgatccccacaaatagggcaagaagtatcatagagatacattggcccagcaccgacttaataaggagaacatttgatagaatcctccaccataaaatctttgtctttcacggatattactgccttagagggtgcaggattgggggaacgctcgcaagggctgagttagataggttgatttggaggaagtcatccattaattttcttagtctatatccaataatcactgctattaccactcaatttacccctctgaaaatagcactaagtactcttgattggtcagaccgggggcactacaaaaaatcttatttttagtcacaacaaaacttatgattaaaagtaaaaattgtgactaattataaatcatgattcctatgttgtg

SEQ ID NO: 115572 - DNA, 1317 bp, Cannabis sativa
  modified_base (1274)..(1290): a, c, t, g, unknown or other
aaaaaaaaaaaaaaaaagaggagacataacagtaagaaaaaagagatgggaaaatagcgtaagcattatcctatctagtctaaagaagcaaaaaattcaacctaagctactttcagaactaatgggagaagaaatgtcttataatggtgaggaattggtttgaggaggtacgaaggaaaaagtgggatcgctatagcccttagattttatgatgtcgtataagtcaaaaatattcaaggaagataactcccattcgtcagcttgccagtcattagtttcatattgacacacgatctcaaagaacaaactattacatgaagtttgaacatggaactcggaatactaactatcaaacatatgggctataaggtcaacacagttccaaatataaaaattatatttgcaatccctaaacttcactaaactagttgactcagatttaaggacagtaggagaccattcataaaagtgagaaattttacctcggggagcctcttttagagtctcggcggcttcccgagtggtagtgttatttctatatggaaatgagcgatgtagtcacgatcttcttctttctcaggcattggaatttgctcccatgataaatactttatatccatagtgaattgattttttgcgagaagcccacaagccagtaagtttttaccatggagatgaaacttcgcagttcacaaaccataaggaagatttaccaagagctcatgacacctttgagtggcagcaattgggattggtctttttagacgggcttaaaaaaataaaaatacaaagtaaataagaatgaataccaagcataaaaattcaacatggaaatatgatgataatcaagttctagaaaatactaatgtattatcctaaagctagtggtgttgattgggtagagttcggtcgtctaaaagaaattgtgcttgtactcttttttatttaggagtctaacgattatcttattatcgttaagtacccaaataataaaaaccataggagcagttcttccttgtaggacatgccttgagggcgtaaaaacacatgatttctaagggagaggaaccttcccaccctaggatgtggaaaatgaacttcaagtaggcaagaattctatatgcattgagaataagttagaatggcacgactccaatgtagttgcagaagtctttaaagtacttattaaggggaaggacgaccctcgctttaatatgctcggtgctccatgcacctatcctcgaagaaccgcttgttggaaattattttaccannnnnnnnnnnnnnnnnacaagtatgtttattaacatcctacat

SEQ ID NO: 115573 - DNA, 4004 bp, Cannabis sativa
tgtctcttttatttctattctctcttattatccctgctattttcaattagacaatatagagttggccactttacaacatcaagaagaacaacaacaattagaaaaaaaattaaatactctaccatgtttccagtagaatgagttatacttttatttttaatttttttttgtgtaaaggtttacgtctagctttgctgtttagcaaagctagacatgaaaagcaatgatttttcaatgtatatgtatatagaatattaattatgcccttttatatttctttcttgttaaacatgatccccacaaccattttatgacttgttcaaactatgctagacatgaaaaagggtcatcaaatgggtgttttgtagtagtgggtattgagccatgtttgagcctattgtgttttcttgagtgaagttctctgaaaatgtttttatataagggattttggtggcaatattgtcggtataatttgtgacacttaaccccacaaataatatttttgacggtaaaaccttcaaaacctagctcacatctcctatgttgtttactattctgttagttttcttctgttaaataccaaagtagactacttatgtgcacacaactgtacacgtgtaatattcttattagtcctcataatataatcatttaaaatttaaaattaaaaaataattattttcttaaataaaaataatattatgtggaccactaaaaatatatgtcatgagaatatcaggtacattgtgacatgtcccttatgacacttaacaagagtcttttggacgaaagagcaaatagtataataaaagtgaagtttgtaggggtttaccccaatcagtttctaagattaattgtcaaaaatcttatagttcaaataattttggggccaatatatgatgcactaattaagatatacatcccacaacacacacaacaatctaatattaataagatcaaatataaaagaacttgatatgagagctttattaatgtaacttataacataactatttgtaaatttagctataagagtataattttataaatattaggaaatttatcacgggatttgatctataagtaacgcaacaacactattttttgtctcttttccaatatgcgtatagccatcaccatctttgtagagaagatccattactctcgaaaaattgagaacaagagataaaactggataaggcacattagaaggcctgaggaatgctttgtttatttctttccatgaattaatcacttgctttcttagctcatcacatgcctcttgttctgacaccccatattgcctcatgtaactctcaacggtagacggtgaatgatctctttgttgctcaaactgtgcaaccaaattaaacatgatatgcttgactatataaattattatatgtatattattaattaatgattgggttatacgtgattttaccttatgagagactatgtcatccatgaacctacaaaggatattgcaatctctcattatcttggggtcttttgagagccactcaaaatcttgctttgttacacaatctttcatgccaattaaagaggtcactatcatcatggtgtatccacaagaaatcaaagaaaccttcaaatgctcatcgaagctagggaaatatccttcgtgcaaccatcgagcttcactgaaatatgctccaagtaatcttttcatctgctaattaagattatacattaaattattgataaaagatgtagtagaatatttatgaaatataaagaattgtgtgactgtgtgtgtgtatgtaccgcttctcttgcgtagtaaactttgtaactttcctcctttccaagctcactctcaaattcttcataacaatttaaaagaaccttataaaatgtctgtaaacattctggacgaagttgatccgcacaatttaagtcccacctaaaaaaaattacataaaaaatcaattgtcgtaattaaaaattagagaagtaattatatcattaataataattggaatatatgtatacatcaatataaaagccaatatatatagtgattgaatcagacctattaattgattcagtaaggagctcaagctcttcaaatgtaccatatgcatcataatatcatctgcaactgaggccaatgcaataacttttgttgaaataattcttgccagtgacaattcaggttcatgaaaaactcctaatagccaaaggtatagctccacaatcctatctcttgcaaaaggtagtttgtgtacaaagtctatttctttccaccacctattattatacaagaaaaatatagggcttggtcaacaacgactagatcatatatatttgtatataaatggcactcttatattatatataaatataataaacatacctggaaatttgactaagctcttttctatgcaaacattgtaatagattgaaatccaactttgcaagttctagcaatgttttgttatgagaaatcttgttttcgtaagatgaaatgtaatgcctggcgtggagcctctctaggctctttcttataggtctctgcaaggctagtaatacttcatttgataatggatgtgttttttcatttttcacaaactgatgaaggtgagtggtggtgaaagcaagtgcttcatttaatatattctcgccaatatagcttaaatgtgaggcctcatataagctcagcaaaccaagaatgtcagttatcaagcactccttaaaattcccttgctcatctttaaatattttaaatatatctgcgtaattaagatataaaatgcatactttaaaaaaaaatgacataaagaattctattatttcttaatattgattcctcaatcaaatactaaaatatatataccatacatatatatatatatatatttatgtgatccgaatgcatattacatctattgtatagaacaaaatgaaaatgggagatgagtaattctttttatcactactgaaaagtagttagatactttcccaatttttaggattaggcaaataggatatatcatatagcagtctatatattaaaagtaaaagagtttactttttcttttccgaaataatttagtatttagttgacttatttgattcaaatatctccaacctataactcacatttatgtttgtttctaacctaaccccttaaaaaattagtatttttaggattgctaaagttttcatggctagttaacttctaacaattgctaaaggacaccgttagtgcttagcactctctttgatgtcataccgttattgatgtaattaagtgtagtgtcgcgtgtcatataatttattaaaaaaaaaaataacttttagaaaatatcgctaactaaccgtgaagcaccaccttataaaaggtgctaggcaccactggtgcccaataacaatactctttgtttaaatattctaataaacttaatatatttacaaatataaaatacattaaattacaataaactataatttttgtaatcaatatttttgaccataagtttttggtaattagataataggcttaatgatatttcattaaggtaatatttttgtaatgataattgagaaatataaagggatgactatttagttacactcaaaatgtaaaagttacattttttataatattctaggttcccattttattatatcattattaaaaacatattctatttttagaataaaacttaaaaaaattattttttaattcaaaatatttatcaaaaataaattaacaattatcatttaattttatttgaaaataaaaatcaatattaattattatttataagtaaacaaaatatattactaaattaaatgacattaagttacaagtaatttctaaattatttttagttaatttcaaaattaatgtaaacattcaatatgatagctaaaaaataagggaatatactcatttagtaccttgtgtttttatgaaaaatatatttggtaccctatgttttcaataataattaattggtacctcatatttttaa

SEQ ID NO: 115574 - DNA, 2287 bp, Cannabis sativa
tgaaatggattttatttagggcactaaacccaacatgtcttactccccatgatgctttcaccctttgatcctttcaagcaaagtcttatgcaacttcagccttccgtcgcggaacccgaagcatgcttctttaaaattcaacatcagtctcacattcataatgttttttgtgcatgaaggatcaccgcgggtatgacacgtcttcaaccctccttctcgaaatggaaagactgcttgaagtctatcttactccccgtgatgctttcaccctttgatctttccagaaaagtcaaagcttgaatttgtatgcaactttagccttctttcacggaagccaaagcttgccccataaaaattcaacatgactctcgcgggccctataatgtttcacccttcatgtttaagaagcaaagtcagtgtctaatgttttgtgcacctttatcctttcctagtgaaagacaaaagttcgccattcacaaaactcatgtctctcgcttagtaagacggacctcgccataggagaattatttgcgcaagggtgcaggcccagctttccctctgagaaaccaaaaccctactgtgccacaagagcttacattttcccttacaaggttcgtgtcatggagagatcatttagggctagccatgcaactgggttttcacctgtaaccccacaactttctcacaaagaccaagagattactaaactttcaagaattcccctccaagctgtcatggagagggaagacatggctcaggtgaatagtgtactttccggagcaaagcagaaccacactcaaacgtcctcctcaagaatcgaaagaagacacgagttagatttcaaaaaatgaccaagaattcgagaccaaacttcccagctcatttggggggtatgctatgcctgattgctgacaactgcaacttcttacgttcgtttgcaaaagttattagttcaagtgcacacatgcaaccaaaaataggaaatcttttaaattatgtcaacccaagggaaacacacttgaattctttcctcaaaggctaaacttaagtacgaatctagggataaaatgagtattcaaccaacattcttgaaaagaaaaatactcccaaattccttcttacaaatctctatgaacatcctataagtttagtccatcaggtggcataattgactaaaatgttaggctgacatggaccaaagtaggaaaaatgcctaagtctaacgcagtcgcgggtattactcccagaacctaacatcgtgaaagaactaaagcctgaagaagatgcatgaaattatgaagactcctattttgtgaaaggaaatcacctccaagctaactcttaacgagtggtcttttacaatcaagaggttaagtagttggaagaagcattacaattccgagaaagaaagggtaaaactgagaaactatccctggatcgactgagagatggtgaagactagcaggatggttgaaacactggttattagaacaagatgttccaatgacgcaactagcccctaaaagtctaccaaaatttatctcaagcaagaaatgtcaaagaaaaccctactcactattacaagcagcccccgcagccagggcaaattgatattgttcccccaactctaaaattgtagaaaaagggggatatatataaaaaaagaaataacaattgaaaaaaaaaagaaaggattactgaagttcaagactgggcgccgcctgaccgggttgaagggcttgctccgaacattcgctccatggtctccctatatagatgatggacagctctcatgcttcatatgagaagagcctgatgagcattctcatcctctagtagccaattctctttctgtagaaccttaacttgaagcctgacctcagtgatctcagctagaagggtcttgttggtgttatgcaagtcgcgattatataccttgacttgctccagtttactcaccagcataccaacctccttggcagccctctctgccagcaaggacacctgttggaataggccaaagtatcagagcaaggggtagaacggaaaaaaaaataataaaataaagagaggaagggaatgtctcaaggccttaccccaactttctggtgcttggcagagtgggccagcataaaaacattgacgctgttgtaagtatggatggcaattatacccgcggatttgggtacccgcaggtactcgcccctaatggggttgatatgggggttgaatttcgggggcaggggcgggtatgggtttaaagattcatacctgagtcggaaacggg

SEQ ID NO: 115575 - DNA, 1841 bp, Cannabis sativa
ttttttcaaataaaaaatttgtaatctttaaaaataaaatacattcaaaatcttaaaaagaccaaaatcttaaataaaactagcaatacgtggctcggcacgtacattcacctagtcatcaactacgtgccaaaacataatttttcaatcatgtccctccacaataaaaaaaataataataattttttacttacaacataattattttaattaaatgtcacaacaaaaaattatttgtgattaaaacataattaatatttaaatacaagttgtcactaatttagaaaatacatttagtcacaataaattataattttcataactaatacatttgactacacggaccgtttaatcacgacatagaaatagcaatttataattaactataatttttttatttttaatcacaaatatttttattgtgactaaaagtaaatttttttatagtgctttaaacaaattaacaatcatatatactataggcaaaaataattgtttgagcagagatgcttccctttgttttattagtgctctgttatcttaattaatagaaattaataatacttctttcaaaaaataaagtaaaaggaaaaacaatcttcactatgcgccaattggctctaggtccgaatttaatatttttttaatgatagataaaataacaaacaaattatgccccttaaaaactaaataaataaaatatgattacgtgtaaagtttttaattagtcgtcatcacctgtaccatatattaattaattattagttctatatagctagctaataattaatgtggtcaataaatatataagcatatatattaattaattaattttggttatttggtggttacgtaggcatggagcaatggaaggatatacgctgctcctcatcgagtagtgatgagtggaagaaaggcaagatactcaactggcctatttacgtaccacgaaggagttatacacattcctaacgagttagtcgatcaccaacatcctttgcaattcaaaccttttaatcattatggcctacttaattacttcagctcctctataactgctcactcttcttccaaggcctactgtggtctttgatcatcatgaaacaatattatatgttatgtaatattgtaataatttgttgtgtggaaataattactcaaataacagcttcttaattgccttattctaaataatacaattaaaatgtatataaaaactttttttcttttgaattatgacaatatatatactactacacctgccaaaaaccaaaaattgattgcacgtacggtgtgcactatacactcctttattttggaggttcaaatcgatcatataataataataataatctatgttattaagaaaaatcgaatacagtgattaattaatcatgtaatcaacctgttatttttttggaaggtaaatggaaaatttcaatttaataagttaattgaacataattcattcatgcatatattatttattgactagaattaacaataacaaattaattaaaccgttttgcaataaatatataggaaaaaccaaaacaccatcttcaactaaaagactcataaaccaccagatgcgaaatatcagaacaatttaaaaaataatagatttctatcctaagtgagcatataataaatcacacctagctatcaataaaaatcagttaaaaaaaattctattaaatttggacaaacacaccccaattagaaagaaaaagaaagtaaggccatttcatttcgacaaaagacccacgcccaaattccatagctttgggtccgcaatcccgatcatgattttcctacccccaaagggaagggtcattccc

SEQ ID NO: 115576 - DNA, 2054 bp, Cannabis sativa
atgttaatgaaacatgcttgttagtaaatctagatcctagtaaaacatatttccaacaacaatccctacctacaccatgagttgcttccgtctaccagcctatttttgcaaaaaaaaattgagtccataatggccaatttttggtggggtttgactgaaaatggatcgaaaataaattggcgttcttggaaccttctttgtaaatccaaatcggatggtggcatgggatttcagttttttgtccacttcaatcaagcattattagctaaacaagcttggcgaatcctaaagaagcccgactctcttctcagtagagttcttaagaatagatactttccgaataatacttttcttgaagccactttgggtcactccccttctttaacttggcaagaaatacattggggaggagagcttcttttaaaaggcctacgctggaaaattggcgatggaagaacagtaaaatcaggttttgacctgtggataccaggccacaatattttcttcccttttcactacacatgaccatctaatggtgttgttacaaacttgattacggacgaaaggcaatggaatgtgcctgttctactacaattttttactcccttggatgtggatagaattttgacaatacctctaagttttttcaacagcagcgacactgttatatggcataagaacaactcaagatactacacagtcaaaaccaggtaccacttagcagtagccttagacaaaattgatcaaagttcaagttccaacactgcttcatcttggtgaaaatttttttgggctctgcaactacccctaaagtgaaaatttttgcttggcgggcaatccatgatgcacttccggttgctacatccttggtgaaaaggaaaataataatagagtctacttgctctatttgtaagcaagtccgggaatcggttggacatgccttttttaactacaaatatgcctgagcagtttggcaaaactcggatatggttttgtattggcatctatcatcttcaatgcataaaggtgattatttatttcatctgtcctcaatctactccaaagctgaaatggaacaaatcttttacacactttgggaaatatggaatgaacggaaccgtgttgcccatggacaacaagcaaaaccagcaaaagatctcacctcctatgctataacatatttaacaagtttcatattagctcaacaaaagtaccataatgctgcaactgcatctgtaacgagacagtagccacaacaatcactttctgcacctactactcaatcgtggaggcctcctgctacagatcatttcaaaatgaacatggatgctgttgttgatgtctcacggaatgttgttggcgtgggtgtcatcctaagagactctaacggcaaagttgttgctgcactctccaagcagctaattggcaattatagctcacatgaaatggaggccaaaactcttttccatagtttaaattgggccattcaacaacaactgccaacattataggtcgaaattgatgctcttatggtcgcctctgctctacgagctcccttcaattcaatttcaccttttaatgatttgcttgttgacatctcttatcttttatcctttctccttaatgtaactgtctcacatgtcaaacatactgccaatatggctactcacggtttggcaaagtttgcgttaggggtggatgagacttgttactggttcgaggatattcctccacctatttactatgttattgtaaatgaattctatgtttaatttatgataacaagtattttcactcaaaaaaaaggtagtgtatttagtgttatcaaatatttgttaagggttaaatttgcattattttttaaaacactatgagagtattttttttgctaataaactgtaattttagtattatatcacttatttacatctctattgaaattactcttggtgcgtttggaaagccatatgtaattagatttgtgtgtaattggaggtaattacacaatttggcatgtttgtgtgaccatgtaattacactataactgtgtaatt

SEQ ID NO: 115577 - DNA, 2452 bp, Cannabis sativa
taatacttaatttctcaagagtttgtcctcccaaaaaaaccatcatttctccgtgggtccttcctatttatagaatttttaggaatgactgttatttcctttagatcttatctagatactcgttcatgaaatgtgaacgatctccacgtttcatatttataacatgtgggattaatgatctaactactggtaactgttttttgtacttatcttaaaagcagtttctttaccgagataacatacccaaaaatatgcctcgcattcttcactaaaatggctaggcgtattttgcaaagtgttaattgaagtatcttccttgcttctgtcttctgagatgagtctttagatagtacttaggattgagtcattcgtgttccttagagtcaattatctcacatcatttatgaacattccgtgatgggtcgtctttggctcatattccttagtctttcaatatactcacgagtatgtgggtcaatgagtcgtaagctcttaaagaactcattatctacccttttcactcagctcatcccttcgtgttttatgtacaccttgtttacctcggttaagttttgagattagcttatgatgttgttattctcgctaatcattgtatttataattttatcgcttttatttgatagccataatataataatgcgagacaacgcctcattaattgtagcacatcctgaggtgagaagcttattttattctttatgtttatagtttttctcaatcttcgagacttatattcacatgccatgttcatatttatggctcgtagtaatatgagctatcaaattgtattttattttatttttacctttttgaattttttgttttttatacaaagtatctaaaaccacatttttgtggattttttcataggttttttacttgtattttttttagaaaacattggaaaaataactgtcatatttaacaaaaaaaaatagttaaaaatccgtaaaaaaatgttaaagaaattgtaaatctatattttgttaaacattttgtcattttttggtattatgaaatacaacctttatttcttcttcttgctttacatgcaaaataatggacaaagcctatcacatatttatattgaaaatttaaatatctaaacacaaagaaacttatagaattactctagccataaaatttattttgcaataataacttatagatgcaatatattcaaaattttgacttatagttaacataaattatttcaattgaaatttacacaaagtacccaacattgtattatatttttgtaacaattaaaataacgtataaataatatcatttttagaacaacttaaaaacaacggtctgtaaaaaaaaattgtaataaaaaacaaaatcttgtaaaaatttaaatattttgttatttttggatatttctaaaataatccgcaatttcaacatacatagataagacacataactagttaggtaattaaccgaagaaaaatgataaaaacacaaactattgcaacttgcgcttgacccttagtttaaaagggatgaaaatatagaatgaagtcttattatccatgcatttgtaagtgaaacgatgacaaattgcatcatttcgttaaagaaaatgaaacgatcatacgtcgctttttaatcaagcatcatgtggtacattttaattataacgacatgagacgtcactttcatgacaagcgacgactcatgcttattcttaataattttttaatttaattaaataatgttgattagttaatattattagtcaaacttaatacagaagtaaattaatttaaataattaactataaagagaatagtgtgataaataatattatttaggaactacttgattggattcagaagtacaagaaatcgaagttaggaggggaatctatgttggaagtcaagaaataataacgttttgatatccaaacacaagtcactatagaaaaatagtgaaagagacaatatagtatgtatatgaaaaatcagtacagaaactaatatagataaaaaaaaatgattgagaaaccttgtgtaaagtcatgagttgattctttgagcctctatttttagagtctctgttttggttttgattgtaatgaaaaatatgacctgtacagttttgtttgaaatcaataaaaatttatcaaaattaatgtaaacacttatttacgtagttttaagttaaaaaatgttatctaattataaataaattatttaacaaagtttgaaagttatttaagataattcaataaaatttttatttatattttttaaaaaagaaaattaaagttgcacatcgctttttagacaagccgtgtggtaaattttatagatgagacgacacttttcttctgatgaatttattattattattagagtaatttgcggcaaaaccccctcaactatcaatttacttacaaaaaatcatccaacctcatatt

SEQ ID NO: 115578 - DNA, 2232 bp, Cannabis sativa
atatagatagacaaattgagaagttaagtccaaaaccaaaccaaaaaaaatcaaaaggattattagaaatttagaatcttaggaaatcggaagtgggtcatgttttcattggtagttgacaattacaacaccacctcaacaaagcatccgaataaatataaatagatcctatttttcaaaaataataaaaaacaaaattaaaaaaaaaaaattctacaatacaccaagggtgctatttcagtattttaaaaaaatagtttaattttttttatgatggtatatgttatagttatttaagagattttgcaaaattttaagaaattcggaaaaatttaacatgttaaaaataaagtttaaaaagtttgttggatgagtgacttctttattctataaagtgtaaaatagacgatttttttattgtacattattttgaattttttaaaattttataaaatgtctcaaataattatactgtacacgattataaaaaaatgaattaaaaaattcttatttatgtcgaaacagttaaaaattgtatcaatatacttattttaatagggtgctcttatataaataaatagatacccacttcaattttttttttttactttattttattttaatttaatttgagaatttgcatattattattatttcctttttgatttcatggacaagactatgccacctccccatatatatatatttatatataagcaatgctattctatgctccattcaccacccaacccaatcatatatgctttctcctttaatattatattggtttggttaatatatctttatttatttagcatattaaacataagcaatagtgaaattatatatcttaattaatcattatgcatgccaagggaagtatctatgttgatgctattttggattcttctattttagtaatatcaatttagaatttttaattttaaacaaattatatatttaggaatattcaacttaaattgttgaaagtgaatcttcttctcactcccaattagtgtggccttagttgaacacttgtcataactaagcttgatcttccttaaccaactcacatcatatccaagtggatattttctactatgagaattgctattaggttaatgattaatggttttatttatcaataatatataaaatttaaaattaaattatactaatagctatatatttataatattttttattcctacattattaattatgtaacattaatctacaactttacaattacaagtatgttccatgaataaaaaaaggagtacacaacaaatgttaccaataataaattaatgaaattgtttgaaattttgctattaatttgtgtgatagactaagtttggaaaaagattaaaatattaagaagacaatgttcaaacttttgaacttaagctaccacaatcatatttataattatttagtacttaaaaaatataaaagatgatggtgtcgtatagtaatattttattattaaaatttttaaatcataaaaatgaaaatagaaatgtgtgttttataactatttttgcttttaaattttagaaacaaaaaataaagtgtgtttcatgaatttttattttctttattatttttttttatttaagtaaggaatgagaactcaagtgagagaaagtgggtcgaggctaagggctgaggtctggggtgtgagttcaggtctagggtcgggttttgggttcagggccaagtcgggtattgagtccaaggtttggggttcaagggtcgagtttgggtccgggagccaagggtatagggtctagggtccaagtacgggattcaggggtcaagttttgggtccaatgtcgggtgtcgggtctgaggccaagttcggtgtcgagtccgaggagtgggatctaaggttcggaggtgagtttgggttcgggttctaatttaggggccagggctaagtccaaggtctgagggctagagtcgggtcaaggttggggtttggggctaggattagggctagggtccaatcgcaggcagggccggtcctaaaatttagtgggtcataagaaaaaatatttttggcccttattttaaaaaaatgtggtatattttttcaaaaaaatctgtttaaaatttaaaagatatttttttggctcctgagttaggtgggccttaagcataggggtgggcatcatccaatccaatccaattgaaccgaaccgatccaatccaatccaattacaaaaa

SEQ ID NO: 115579 - DNA, 1579 bp, Cannabis sativa
  modified_base (26)..(41): a, c, t, g, unknown or other
aggatgttaataaaacatacttggtnnnnnnnnnnnnnnnnggtaaaatatttccaacaatagtcctaatggggagttaccacctaatgttgtatgtaagctaaaaaaatctctatatggactcaagcaagcttctaggcaatggtttgaaaagttctccacaaccttgattgaagaaggttttcaacattcgacttctgatcactccttattcatccaacataatggatcaaccatcataatacttttagtctatgtggatgatgtgatcttagctagcaacaacatagcaacattggaaaaattgaaacttaatttgaacaacaaatataaattaaaggaccttggtgaattgaagtacttccttggtattgtgatttctagaaccaacaaaggcattttcatatcccaaagacactatgccctgcaactgctagaagatttaggtcaattgggatgcaaacatgctaacacaccaatggaagtcaacttaaaactcagctaagatggagaagaaaagcttgctgatcccaaactctatagaaggataattggaaagttacaatatctaacaatcactagacctaacttggcttatacagtgaataaactatgttagttcctagtcactctcaaagtttcacatatgaatgttgcacaaagggcacttcagcatgttaaaagttctctaggacaagggttattctactctactgattcagaggtaaagctcgaggcatacacagatacagactgtgctacttgtgttgatacaaggagatcaacaacagttttttgtgtgtttcttggaagctctcttgtgtcttagaaaagtaagaaacaacacatagtttcaaggtcctcaacagaggctgaatatagagcaatgtcaaatatcacatgtgaattggtttggttactttccttactgcaagaattaaaaattgaacatagagaacctaccattttacattgtgataataaagttgctcaacaaattgctgcaaactctgttttttatgagagaactaaacatatagagattgattgccacttggtaagcgataaagttcaagaagggaccataaaaatagctcacacttctagcaaggaacaaataactgaaatttatacaaaggctctttcttcctaatcagcttcaaattctcaaagaaaaaatgggaatttgtaatatctacactccaccttaagggggagcattaaagtttgctaataaggtgtagtgttagttaggaagtttttgtagtctgttaaaaatcagttagaagttgttagctggttttagttgtctgaagctgtatataaacatttttgtactgctttcttccctatcactgaaacatagcattatccttttcattctctctttttctccttgatctcttctttctctaaaactaatatatcttaagatctcttttttttttttaatgaaaagtatttttaaaagtatttggatatcagtaaaaaaagattttttgtgagtaaattaagaattatgtaaattattttaagggcttttctcataaatgtacaacaaaaacaaaataattacaaa

SEQ ID NO: 115580 - DNA, 4590 bp, Cannabis sativa
aatataatattataataaaatgtaattaaagaaactcaaaaatttatatattttatttaaatattttataattataaataaaaataataagaatatttttacattttattctattactttcccaaactaaacattgtaattaattattacaattcttattctattacattactattaccattatcaaaataagaatcacaaaacaaagaaagaatctttacaacaatgaattgtagcaacatttctcaaacttaatttcactcttttatttccttttatcacaaagccatacactttcttttattatcatcaattattttgaagttgaagaaaagttattaaaagaagaagagaaattgaaaccccgttgttgatcttgcatgatgagatgttgttgatcaaaaggattacctcttcttggattatacacttgaatattattattcatcatcatataattattattattattattattatcatctaataataaaagtttttgattagcattatttgatgacaaaacaaccgattcctccaataacttctcccaacacacgtgtccatcatcaacaacaacatcatcatcatcatcaaacttaatcaacggttcaaaatcatccacaataattctcttcacatcaccaccttttccactctcattctcattctcatctttctcagacgaaacgacctccgtctccggcaacggcgacgacccataagacgaagaatcatcggtaaactgccacattccgttgagaaaactctccaaagcttgaatctgcaaaaatggtattctctcaatcaaagggtactcataatatccacaaaaccctaactccttacacctctcgtaaaattcaccgagctcctcaaactgttgagaagctttcttgtaaatcccaaaagcttccgtacaactcgaatacggcattcgaaacatattatccaaaaccacaacgatttcttttctaaaagtatcgtaacaaaagaaactgtctctgattatatacttcatcgccgatttaacaacgaagcttctcgccgccgaaccattcggacgacactccattactcgatcgattaagctctgtaattgaggaagaatctcaagctttctacccatttccttcattttctcagctaaccccatttcttcttcttcttctttgtcaataaagctctgttttttatcttcttccaattcaaaatcagagcaattcaaagcttcatcaatcaaatgggcataagatctaacaaaaagggtataataatccggcgaagaaatcgaagaatcatccgaaaaccgacatgggtataatgagattaaaccgttggttcggatccacaacagttcagatcgaaagggactgttgtgaggaacagagcggaggagacggtggagaaggatgagacattttaaagccactctccagcaatgggtacggccaaatcgacgggtgaagctgagagagaaagctctaatggaggaatgaccggagatggagaagagtttgagaagttggtgaacgtgtttttcttgtaaaggcatatcgtttgggtgtgtggctcttactatgagattgtctacgttggagaagcctccaatggtggctatcttggcgtagttgactacgctgtgttctttcacggccgtgcatacttgccgtaatcttctctgcattttgatacagaagagagagagagagagagagagtggtgtagagagagaaagtgagttagttataatgtggagaagaaagctgttattactgttttcttcttttgggtttgttttattttttctcataattaatttattactgtaaatggtcttgtgttattctttaattatcaatttagtcctttgagaaaagaataattgcaaaaaatattagtaggggtgaaccgatgaattctctattgtttagatgtgtttaaatttattttacccgtttataaaatattttaattaactaaaacacacataattataaaaaaaatttaaaaaattctcctaactaacataaaatttagtttacatttttctaaaatgatttttttaccttatttttgataaacacattatagtatgttatttgcacattgttttgatgttgcttttatatttgtaacatgttgctttaataaaactctataagaatatatttaaaatgtatattttgtgtaattttgtttctttttttctttttgaatgatttaatacattatgatatgttaaaaaaaaaggtatacataacaaaaattgttaattttgtaagaatttttaataaataaattagacaaaatacattacaaaatgttagtatcttttgtttaagaaaatttacttaaataaacgcttaaataaaaaaaaattacttagtatattttgtcttaataaaatactataagatatagtattataagattatttgtcacaaattataagatacgtatattactatgagtaatataatattatttttaatgtaatattgcttgttattgtatactaattttcagggtaccgatgatgattattattaaaaaaaaaaatcaaaatataaagtattattttacaccaatttctaaattgaatatgttctaaatttttaatgaaaaagttattattataattattattattaattttaaggacttgattataaataaataaatatatatttatatagaaattgaactaattttttctttgcaataaaaatttgaattaacatgcagggtcgttaatgatgctataattagatatatttatttgaatgtgatgggaaattttattaatttattaaagtagaaaataaatatatttacaagattaggacacttgtgttctgtatacaattcaagcagagccgttgatggagtctaatcaatggcttagaatctgacacgttgcacactagctacatatatttattgatttattattatttttgattttacaataacaatgtaggaaagaatgtgattgggctttgggaagatcgtaactaagttaagagttcaagaaaactaagtttgtttttgtgattgattttgtttgtttttatacaaaaatacaccaagtcttttgagaaccaccctggcaaaacctatatatatattactagaataattctttacttaaattttatcaaattttaaaaatatatggattgttttcattcttgaattttttacaatttttttcagtgcacattgactgtatatgtagttttgtggaggtttattcaaagtacattataaatttgttttgttgatataatccaaaaagtgatttaaaatttgtgttttttgaaatgtaatttggaaataaaaattagaattttgtatgtaaaaaattatttaaaaaaatatgattgattctgatgtgatttaatgtttttgagtttttttttttttgaaaaaaaatattaaatttgtaattggttgagaaatgagaatctcaaaatataaaagtatgaaaatttttagagaattttcagattcaatgatttgaaaatgtagaaaacataaataactaatttcatttttattagcttaaaactcaaactcaaagtcatttaaagatttagtttttatgaaatcttaaccaattgagaattctcggatccccatattttaagtttttaaaaatataaaattattttgagttctaaaccaatgtaatttctcaaaattcatttcacttgtgttatggtattttttaaaataggttttgacaaaagtgttgattttcaaaacatagtaattaatttgaagaaattatattgtatacccactttagtttatatgttttaattttaccattatttccatattctttcatatatacctacttttataaataatgttcctattataccctttaagttaatgtaaattatgtgctagacttaaatgaaatgtgagagtatattaggcaactcacttacaaaaatgaatatatgttaatgaaatataatatgagagtattttttattaatggataaaaaaagtattcttcaatttattccaattaatttagtgcttgacattattttcagaaataattttaaaattaaagttacaaaaaacataaaatatttacaaacttttaaaatatttttctgtctataaaattatattttattaatttgtgttttggtttttattttttgaaactattcagtaaacaccttttatagtttttttttttatatatttttttaaaaaacaaatatttattttttaatgttaaattattttgtaaatttttaaaataatatattttaagtaatttttatgttatttaattaatactaattaaactaacaaaattataccacctgtatataatgacattaagaaaagggaagcatttgccccataattttaagtaataattacataatgcacaattttttgtaaaatatttatatttttacgttcaaagaatatattttttttttatatgtttttacggttttccaaaaaataacacaaaaacaacataaaatcaacaagaaaacaacataaaagtaacatcaaaataacaacaaaaaaaataacaaaaaataacat

SEQ ID NO: 115581 - DNA, 1411 bp, Cannabis sativa
  modified_base (1373)..(1380): a, c, t, g, unknown or other
aaacccaaaacaattatttctcccataatgcatgaattggaggataataataatgcatgcatgtacggctgctaccctagtggtttcttggcctttttcttaagaaacaaacaaagtcgatcgaattggccatatattggttgttgctaatcatgcaaaattattcaaaggaaagggatcagtcatataaatatataaatatatgtgtatctgtatatatgcatcgatctctccttttccaattatcctgactatattgctttgtcaataacgaaaccaactttgatatatctggctatatattgaacccacaagtatagtcggcatcagtttcaagcgtgtgaccagcttcatttagagaatgtgaaaagtctccttcatgataagttacatcatatatatttatcaagatagtaataataataataagtttacatcatacatatatataaatattacatcttcttcttctttctttctttggtcaattttgttgagcattaataatataatattgtaaacttaccacacatatttgtatatgtgtaaaccactatacaaaatgaacaataatgaaatgtcacaccttattcattttctctacactattgttatatatataaaaatatatagatatatatatttatacatgcccccctcggacatgttgctttctgaaattgatcaaattattattattataattgccaaaacctaaaatatgagaagagggttgaaatttgtgaatctgtctacgtacgattattgcgtattataggtttatataggctctcttgttattaacttgtgtacagtttgagaatgcaataaaattaataatgtgcatatatataattaaacacaagcaaggtttatagagaaattttaaaatatattagtggtacttaacattctcttatatatgttaatatcgcatatcgctattgattcaactaatacaatcaggtccatcaggtccatataatttaatataataacttttaagaagtatcgctagccaattgaaatacaacatgtttataatgttcaataacaataagtttatatatatattcttcatgaggcttgacttttgtgggaggatgattgaaggggccaatcaatacttaaaaggaaataatttcaagaagacagacggttctcctactcctaccactcaattaatagatttatatatatatgcatattaatttttcaataacattaattaattcatgaaatatctatatttcttgtctatactatgaactcagaaggtgcatcggcttttgtccattatttgatacttatttcccaattatatttattattaggctgaaaacaaatctactacagtagaatctctatttaannnnnnnntattcaagaataatctctaatttgttataaa

SEQ ID NO: 115582 - DNA, 4325 bp, Cannabis sativa
atagcctaccccgttagatgaataattatatgaatcaatggccacgatcatcagaccgtaggggcgggatgacatcggggccctatatatacacatagcctatatagaatactattatgtgctatataataacacaattatagaggggcaaagtagccaattcaatttctgtacagcatggtaactgcaccccagtaaaaaattcttatgagaaggatgattaaggtacatatttgtacaacaagatttggcaacaatacaagccccaactgtagggagtagtagaataaataacactatcatccacaaaataaaaataatcaaactacattacagagttttcactcattgatgattcctcttccttgagctgccccgctccgatcccgtgctcgagattctgttttaagtactaacgataaacaaatggggacaaccaaaacttgcttctcttcaatagaaaaaggaaaaaagtttgaacaacttacaaatcatcatcgtcttgttttttacttctcgatgaatctaatgtcactcgtgacggtccagaggcctgcgagattcagcaaaaactcagctcaaatgtacatttgctaaattggcaaggcctaattcagtgcatagcttaagatgtgactaattcagagatgggaatatccttggtatcagagaaattattaatgtcgttaagagagaaattttaagcctattttgaaacagtaacggcacaagtgatttagctactggtatcctacactagatttatgtactaccagatgaatcataatatcaagtccgagcaatgtataaaatcaaggcaacaacatgaaaattagttaaatggtttcaaagatggtactgacaggactgcatacttgtttgctgcttccgctatgagcctccaggtactcctcataagactgcaaaaaaggatgagaaaagagttaattatcattgaaaataaaacctgaactactttaaatttgtctgagaaacaaaagctgtagaggaatttcaataaagccagaagaactgaatattgaccagcaggcacaggtttgtgaacagcccagatcaagttctatagaatgccaaaaatataaggaaaagttcctcctaccaaatcggaatgcagtccacaagtaccaaacaagaaacacaagaagattgtctaatgacaccaaatgataatgccatgtttagatctccaagttcataattggatgaaacattcttcaaaatgtcacagtgaaagggttctaatagtaatcaaagaaacaatggaagacacaaatgaaagaagctatgattcagagttaataccatttcaagaaagtcgtcctctgtcaaaccactagctataggactttctgctgtcaaagcccacatatcaaatcgagaagacacatccctgtccacttgcacattaggaagatatttattgttgccagagtgtttcatccttgttacttttgaagctgcagaatttacagcaacattttcaggaaaattagtaccagtagttccacaatgggctaactgatatttaatagcttcattctgatgttggtacagtaatgaagaatacagcattggtgactgagaccaggaagaatgcatcagaggcacattgtagtcttcttctccatatgaagatggaggttctatacagggtctttttgaagcaaaatcattcctggaaatagatcgaaattcaagacataaaacataattgagaggtattaaaaataacaaaaagtatatccactttcagctgtgtaaacatgttacctaattggtagaccatcaacactactcttcacatcaagaagctcacacagtgcttctccaatttcagtagataactcctgggaaagaatacaggagagggagggctattgttaacagtattccaaaatattacaaaacaagaagatgcaaaaagcatttgatagaaatcatacctggcagtctctgctaattttgacaggtttatagtcattcaagggattcttgagatgaagcgttttttgaaacggcagatcatttaattgcagccattttaccttaaaactgcgcccccaagggttacattttccatttccctggctccaaacattatctcgcctccatccaacagatgacatcatttgagcatacccttggaaaaaaccactcatgttgacactgaatattaatattactctaccagaattctgcaaggtatgcacatacttcttcataaatataggttgcaaaagttaagcaagattatctcttttttattctgaaaaaagagaggtcacttgtcttaactgtaaaaatttaagcaagatattataacatgaggaatcttacatgaaaggcttcttccaatatcggttcattcatcacttgagtcgcccaaattcctttctcaattgataattggatattctgatgattcaaactctttatgataaaatatctagtatcacataatttactccttttgtttacagttgaatgatcaatgcaattgtgagcatcacccaaatctttttccctagaatgatcaccattctcattacctttataactcgaactctctacaaaaataaaacatatagttcacatctcatacataaaagtacaccacaaaaataaaaggaatattggcggcaaaaccacttaactatatcgattgtaacacttaacccccacaaacttattttttgacggctaaattacataaacctcacttctgttatgctagttacccttgactgtccatgtgtaccaaaatgtacacaatctatgttttgattggtccacctaattttcaatatttaaataaaaataaaataatttaattctttttaaaaataattaaaaatgagaaaaaaaaaatctttcttttttttttctctttcttttccttcttctagatgaaccatcagatcagaccttcccccctgtttccttcttcttcttcctcctcctgactatattcatcaccatattcttcataaaaagctgcctttatagcttctgctgaagctctatgaccaccaccaatatcactcatcaaaataagaactttctttagttttaaaggctcaacaacattcaaacccaaacaatcatcttccaaaacactacaaccctcttcaattatctcattattattattattattagagtaatttgtggcaaaaatacttaaatttaactcccaattgtaaataaatacataaattaaatttttggcggtaatcaagttataaatctgaaacttctgtaggtacctgactgttaagtgttaagtagattgtcacgtggcaatccctgattgatccacgtcataaaatttttattttctaaaaagaattagtttaaatatacaaataagaaaatgacatgtgaataataattgacatttaacggccaggtacctacgaagttccaaaaatataactcatgtattattacagccaaaaattaaacttaagtatttatttgcaatcgggagttaaacttagatatatatactgcaaattactcttattattattattattattatcctcgccaacatttctaacagaagcaaacccaattggaattctttcacaatggaacctaatagctctgttaaactgaataacaactttactaaaactatttctactactcaaacccaatgaagcaccaaatttgggtcctttcccatttacagaagaacaatcctcaaacacatcaaaatacatgaaattagacaaaaatgaagagtacccaactgagccaaaatttctaaacctttgaccaaaggaaaatcgacccaggaaatagagggaaaaagagagagagggttcgcgggattcgggattttcgcgtggagggtgggcttcgagtctggttccaacacccacgaaggaaccagagagagatatcaggagactcactttggcgacggtgacgtcccttttcttgttcctctccggtctctctctctctctcgggctcactctcctctctctctttaagagatctgagggttttttttttcagatctggaactatatcttcaaaacataacggttgggttgcctgggccatgaatccgactggaactggcatggtcgcagctcaatctctcatcgtcatcaaacactccaacgaatctgtttccgtaatgacttttggcatcagttcgtactaatcgatcattccttcgaagctttcttttgatgtttggggacttagcttggggttttcacggattaatttggttcggtttggattttcaattttttcaaaccaaaccactattacggttttttaaa

SEQ ID NO: 115583 - DNA, 1479 bp, Cannabis sativa
aaaattgataaaaaaattattaaattttttctcatcatgcattggaatggtctttccttcaattttaaaatggaagtgtcattccaccaaaatggtggaaaggccattccattggaatgacattccaaactttaatatgcaaccaaacaaaggaatagaatggagattgtttcctttcctttccattccatttcattactttcaaccaaacgccacctaagtgtattgaagactctaggtaattatgggaagtttgtgaaatctaatcccgataattttataggcgtgtggagagtatctgcatgtttggctcgcatcaatgttgaaaaatcaatcaaacggcgcatgaagttgagtaatggttttgggtgaattttaagtacgaaaagcttccaacgttttgtttcatttgtggaattatggattattctaaaagattttgctctaagttgtttgagaaatcgttacaccttcacgagaaaccttatggtttggagttcagggctatgaattagaggaatgcacagtggcttcattctagtgcggtggcacgtgatgggggcaggcaggtcgaaaatggtggcaatatttttcagggaagtcttatgattcctagaaattaggagcaaaatgtggggatgaatgaaaagaattggggcaaagatattattgaagatcatggccaagttgttagccacaataataaggatgtggttatgggaggaaattatggagagaggcattaaatattagtggtaaatgagactttttttattctgctattactttgttagttgaccctaagaggaaaaggtcagaccatttgttggtgggctcggtgggcatacagaaggggctagttgaggaagtatgggatgttatcgagaatgatggtgttgggctttcaaaaaataggtttttggcaggttctagtgttcaggcctgcccggagccatgagtttcttaagctagaattatcgtgggcttgggaacctacgggctagacaattcttagtggaccttgtgttccaaaaaaagcccagtgtttaatttctttgtgaaactttgagtgatatgaaaggggtggagaggattagggctcagttggggtttgaaggggtgttttattgtggaggcccgtggccacattggaggtttggctttgctttggaaggccgagagtgaggtggtgatgtagtgtttctcttatcgtcataatgatggggtggttcagatgcaaggtttagcagcttgttgttttactggagtctatggggagcaaaagcgtggtttgtagttccaaacatgggattagtttcgttctcttaaagatgatcatggcttgtcatggtgtttaatgggggacatgaataatttgggggatcattctgagaagaggggtgattgtaaatgtcctgagtggttaattgaggggtttcgaggggtgttgtgtaacaccctaactattttaggcgtatt

SEQ ID NO: 115584 - DNA, 1516 bp, Cannabis sativa
tggtaaaataaatccaacaaatattacctcaaatctacaatcaagtgtgttggctaacctaagtggaagctgttgcccaacgattagtggccctaagtcacaatcacataaaactgataaacgactcgctaaaatcactcttggagacataaacacaaaactagaagtttttctaccaatagatagcgtagaaatatcataaatatcaaggaaataaaaagaactaaggcccctaaaaatcaccccaatcgatcaactagatccccaaatagtccagcgtttcctggggtcctgcctgaccaaatggttaatcgtttcctggtagaaaacagaaacctcaacttttctacttcaattctactccaaattcaatgaaacctttcagatcacctatatacaccacaataaacataattcaattaaaaattacatcatcaaacctcataaacaagaatttctattgttgagcaagttttgagttcaagaagttttgagttcaagaactcaaacttgctcaactctcactatagctgccaaaaataacacaaagcggcttcagacagacctaattcaagttttaaaacaaccctaaactccccaataacaaagtgaaacgacttccaacctcacatatacaaaccatgctttttcttagaaatcgcaaagagaaataagaggttaaggttacctttgattcttcctagattaattgctcgtcaaactttgctaaattccctttagaatggtctgtatccacaagacaagctcgggttttcttaggttagggtgagtgtgagagagtgagagattaatgagagagaaagagagggagagtttgatatctaattgattttatctttctaacgcctttgttttattcagcttgttaaaagtactagaattccactaaaaacaatttatacaaccttaggaaaattaccacaaatgtccttttttctagcttaagaaacttttatttcctttcgggtaaaatagtaaaaaactattacctcacataagtccaacatttcaaaagtctataaaatcttgcccaactaatttaagatactaaactatatttttgtgatattaatgaccaaatcattgagtttcactgttactaagtacaaaatacaaaagtaataaaattcatatataacatgtatgatacacttagaatttaataaaatctctgtaattaagaaattatctctctaatatctatttttaagaatatatcttactttttttaatgcatatataatcataaataataattaatttattaataattaagtgtctactaatttttatgactactaatttttatgactaaatatgtggttattacattcgtaaagtcacacactttataaatagtttctgttggtttctttcacaacaaattaattaattttttagggtaaatagcggcataagtatccaaagttttgagttagtaagcggcataaactcaatgattttttttagtggcataaatacccaatgtttgtaa

SEQ ID NO: 115585 - DNA, 2074 bp, Cannabis sativa
aaatgtcttcttaaatatttatttaattacttaaaaaatagttaattttaattaattaattctaaaaatggaatttttacttattggtaacctgctatttcaagttaaaaataaaatgtaaccatatagttacaataaaaatgtaatcattaaatagtcacctatatatatatttgttgtaaagagaattgctaaaaggtattattgtgcctagtactttatttggtgtcatgccgttattagtgtaattaaatatcgaatctaatataatttaagaaaataaattttagagaatatcaataagatgttgagtaccactagtatcaaataacaatgctcattcgtaaacaaataggaccagtccaccatattatttttaatttattaaattatatatattattatattatatatataaatatatatattggcgaaaagtctatgtatgtagcttgcctagaaacaaatgtatgttagaggatacgtgtgaactatacatacgtgcagcaatatgcttagttgtatttacttgagaaaaactatagatgcttcaataatgtaccccattaaaagagatgcacccggtattcaaaaaaatattttagtttaatttttttatattcatgtacgttattgttgtttaggacatctgatagaattttgagaaattcagaataatttaaaatataaaaaatagtgttcaaacagtctattccacacgcatataaaataaaataatcacgtgtgtaaccgactgtttgaattatgctttcgcggtgttaaattttttcgaattttttaaaattttacaggacgtcttaaatgactacaacatatacgaccatgagaaaaaattagactaatttttttttggaacatataaaagtgtatcagtgcaccattttaaggagtgaattgtaaaattttttaaaactatatattatagttgaatatcacatgaataaatataggtataagtatttatacaaaaaaaaaataaacaataaattagtacgtaaatataatgttgttacaatgtagaaaggaatgtgttgacgcagtttttcgtcaactgatctaaaaagaccgtaatagtaaagaggactacgatgaattaatttaactaaataaaaccgtaataaatcaaatggacaccaatgatttataatagttcacctcacatgtcgcaatggtaatggggctacgtccactttagtttttgctgattatatctgacacaccagagttatgttctcaatagtgtgtggataaaaatatagcgaaggatttttaggtaaaatcttaatcgagacctatgaacacaagactcatggaagactcaatattaacaaatctgattgaagtgggcggttataaggttcttgagaacaataaaccaataaagtagataaaataaatgtatatcaatggtgtttgaggtcttggtgtcgactaagtattttggactcaaggaaaaagatgaagggataggtatggtattcttggtaaccgtgaagtaagtcagaaagaagttcccttcacttcagtctcttactctccttatataggttgtagggtttgttagtgatcccccacatctcggggtgtctcactaacaaatcttgtatatcatcttttctaatgaataaaaattacaagaaaataaatatctacaaaaatttccttatttctaggccgaaatcccacaatcattgggaaaatggttattttcgactaaggacgcaccaatttaaaatagagtgacaagggatgtcacctcttggcttgaaattcatgatattggtgataagtgttgaaaacatgtgttttggggtgccactgttcgcatagaatgccacatggatttgtggaagtatccacttcattactcatgaaattcaccaaagcccaaaatttcttgttgtagtcgtggccatctattggtaaagggagaaggattttttcaaaaaatttcaagacttttgggaattcaagaaactttagaggtaattgttggaatatatttaactaagatctagatttactaacaagtatgtttttaacatcctaaaca

SEQ ID NO: 115586 - DNA, 2018 bp, Cannabis sativa
agtgactaccaaccaatctcttattgtaatgttctctataaaatagctaccaaaatgatttgctctaagcttagaaatatccttccagatttgattttttagaatcaaagtggctttgtttggggaaggtatattgcatataacataatagtttatcaagatttggtgcgatattatggaagggctaattctcgacccaactacatgattaagctggatctcaaaaaagcatataatacggtagaatgtgagttcattgaagaggtattacaggcattcaattttccctaagagtttatacaaatattatgatatgtattaaaactcccaggtttagcttaatgatgaatgggtcggtgcatggtttttttgaggcaaagagaggcttgcgccaaggtgatccaatatcccctttattgtttcacgaacgatgtcgaggcttgaagataaattatctttgctttgcagatgatgttttattgttttgtaatatggacttcaagtcaatttacttcaagctagaaggattgaagcttttctcacagactttaggactacagtctagtgaagctaaaccaaccttctatttttgtggcatggatctgcaagaagtttagagagtcattgatatgtctggcttttcgagaagtaatatgtcgtttacatatttaggaatacctatttgtgcaaaaagattatcgaatgcggaatgtgatggtctaattgaaaagatggttgctagaatcagagtttggagctctcgccctatctcttatgctgggtgagtaactttaattagttaggtgttgattttattcactcatattgggcatagattatgcttcttccttaaaggatgctgaaataaataaatgcaatttgtcgttttttttttctttggaaggggacaatagattttaatggtgcaggatatgtttcatggcatgatttgtgtaggcctcgaaaggaaagtggtttggcgtttaagaggcttttgcaatggaatcaagcggctcttggaatatatttttgggtgataggtactaaacaagacacactatggatgaaatagatccatgatatttatatcaagggtgaaaactggtgggattacaggaatactgcgcatagtagttggtattggaggcaaatagtgcaagccaaagagaagttcaagcaagtaattagtctccgacaagccgcgatatgcaaatatacaatcaagcaaggatatgagaaactgaacaagaagttatgtcctggtatggggagatttgggactgatttatcactccagaacataaatttattatatggttggctgtgttaaataagcttcagaaaaatgatagattattcaagttcaatattagtgatgatgataattgtttgatttgtgcacaaaaagtggaaacaacaagccacttatttttttaatgttattatagcaggcaatgttttgaggctatctcagattggttgggttggaagcggattgactctcgattaatgagggtgttaaaagccattaaaaagaggaggtgcatgagatttagaagataagcttttgctacaacagtagctacggtagtgtattatgtttggaagggttagaatgtggtattttggaatagttctttgccaacattgagtgttttgatttctagagtgatgcaggatgtgaagtttagactcttaggagtcttaccaaagaaattatctaaagttgatttggaatggtttgaaagcttgtaaggtgaattgtgtataatataataaatatactatacacaaatcaccttataattaggggtgaaaatcagtcggttatggtcggtttttaaaattttataaccgaccggtcggttacgatttttattttacgaaaaccgtaaccgacagtttagaaattataactctataaaaccgaccgtacggtttttggcggttttcggtttggcggttttaggcagtttttggcagttttgggcggttttttaggcggtttttggcggttt

SEQ ID NO: 115587 - DNA, 2215 bp, Cannabis sativa
ctctttccctacacgacgctcttccgatctgcctccttgactctttcaatttagcccctatcaatcccaaaggtccccttctcacctggaacaatcatgtagccgcccccaaaacatccaacaacgtatcgattggtgcattgtcaacccggtttggtctaaccttttccctgatgcactcttttcccacttaggtttctttggttctgaccatcgggctcttgagcttatcactgaaggcacaaccaagcctacccatgaccatggtcaaaagcggttcttttttgaaaatgttcggctctcagaacccaagtgggatgataccctgatctcggcatggaagtgccctacccataaccttgagatcatccctcgtttggtagccactcaatctaattgtgctgctcatttaaatgactagaatcacaagaaaaaatttcagttcaaaaaacgcatttctcgccttgagaaagacctcgaacaagctaagagtagcaagttgggattctgatacggtgagcaaaatcaaaaatctccagtctaatttggacgctctcctttacaaggaagaaacctattggaaacaaagagcaagaactcaatggcttgcccagggggataagaatacaaaattcttccaccctcatgcgtcccacagaaggtgaataaataagattcgcaagctctatagctccaatggagctctcctcactaaggacgaggatatcaatcatgaaatagaatcctatttccaatcgctcttcacatccacgaatccatccaaccccgacatgcaatcagcttttaatggtattgactctcacttgactgagagcgataaatctgtgttagatgatatcttcacggtggacgaaattgaaaaagctttcttccagcttccggtcgacaaagctcctggtattgatggctttaattccaatttctacaaagctaactggccccttgtcaaaaatgatgtcctctctgctgctctcagtttccttaatgataatggtaacattatccctctcaacaccaccctcattatccttattccaaaagtgaagcaccctgtttcggtgaaggatttcagacccataagcctttgtactatcatttacaaaatcatctccaaaaccattgcgaataggcttaagctggtcttaaacaatttgatctcccctaatcagagtgctttccttcttggtaggctcatctcagacaatatcattattgcccaggaagtagctcattcaatcaagctcaaatccaaagggagaaaaggatggatggctcttaaacttgatatggctaaagagtttgacagggttgaatgggattttattagtgccatcttaaagaaaatggactttcgcccgcgtttctctcggttaatctctgattgcatcacgacgaccactttcaaaatgaatgttaatggtaaagtctctggccatatcactcccactcgagttattcgacaaggggaccctctctctccctatctcttcttgctctgtgctgagggattatcttctattcttcaacaatttgaaagaacaggggctttatctggttttaaagtcgcccgtcgagctccatcaatctcacatctcctatttgctgatgacagttttctcttttgtcaagcctctataacatcttgcaacgcgatcaaggaggtcctaagcttgtacgatcgggccacgggatagaaagtgaattttgataaatcatccctgtacttctcccctaatgtttccctcacggaccaaacactgatttcggactacatgcaaattctggtaaaatcatcttttgagaaatacttgggactccctcaacacattggccgaacgaaaaaaaaacaagtcttccattacctccatgacaaagtctaggcccatctcaacaactggaaacataaagttttctcaaaaggcggcaaagaaatccttctcaattctgtgattcaggcaattcccacctacaccatggcctgctttcgtcttcctgtatccacatgccattcccttgaatctatcatggctaacttttggtggggtttcaatgagaacaatcacctcaaaactcactggcaaagctggcataaactctgcaaatccaagagtcacggggggcttggtttccgctccctcgtccatttcaatcaggctttgcttgctaaacaagcctggcgcatcctcaagcaccc

SEQ ID NO: 115588 - DNA, 1554 bp, Cannabis sativa
  modified_base (1480)..(1509): a, c, t, g, unknown or other
atctaaatcctggtaaaataattccaacacgaaacccttcgaagattcaacaaaatcgaatgagatgataaagatccaaacacaaatcagtaccagagaaacatgtacaaacacaaatctagctaatggggagaagatgagagaagagaagaacaaacacagtgttttaagaggttcaccccaaagattgagttactttctcagtgagctgccttagagaagctcaagccaaatccaatatgaccaaccttcgattaaaataatttgagatgatttcagtcacaacacggtaatctctccaagaataattagctaaagttactaactttctttcttttactgatttagcaaatctctctttttttcactcttctcttctcacttctattctttctttctgagagtctctctctctctaggttctcaatctcactttgcatttggtgtaggagactccttatatcaaggttctggtaagatctctttgctcctacgagctcttttatttaattttgttattctgtttgttgtaagtagcagtagttaattttttggtagtcgaaacggttaggttagttggtttgtttggctcttttaactgattgttctgtcctgttatgacacgtcagcttttatggcgatttattctaataatttccacctaaatctccataaaagtttatttgttatagcatatgggtaaatagctttctctaagggtcctagctcttagtctccttaggttcattctaccttgtccacccttaacaaactcatgcaaagtttgaatttttttagggtgactatcttagtacccatgttagttaggttctattctgttggtatcttttggatgctaacctcttctttagttaccttatcccttataaagtgatacttcacttctataatctttgttctgttgtgaaaatttgtgttcttgcattggtgtatacagctttggctatctaaatacactgtagggatctatttcattttagtaacttcttataagagactttaaagccagatggcttcctttattgcttatgtgacatcaatatattctgacttagtggttgataaagcaaccgcaccactggttggagttgtactttctagctaataattccatctgaatgtaaagtagtatgcaatagtagattttctattatctctgtctcctacaaaatctgcagcattatagccttcaattaggagctttgcatttcgtcttctaaacaacagtccaaattttattgtcccaaatagatatctaaatgtctatttcattgcctgtaagtgctcttttctagggtcatgacatatgtcaagtctggccttgtacagaccattaggtacattacaaatcctaatgcattggagtagggtatctttttcatctgatcaatctcttaagatgtagtagggaattgagcttttgatagttgatgctaatagtgttgggttttgtgccctnnnnnnnnnnnnnnnnnnnnnnnnnnnnnntacttattaataaagatcagaaattacattttatgttgcatggtt

SEQ ID NO: 115589 - DNA, 2878 bp, Cannabis sativa
  modified_base (2825)..(2852): a, c, t, g, unknown or other
ctaccagggctggccatcctctcaagaacactacactggccaaccagccttgcacaacacctccttatggccgaccaactttcatcaacactgaaaagtgagcaaagttagatgtgtaacttatcgaggccaactcctaaagactgctagatgatagcctcttcaactcaccatctctgagctccttaagtgcgtcatcgactgttggtaagactctatccatgcatctacgagccacttccatggctctctgccccttggccaaatttgccccttggctgggtctctaggcacccttgcccgaaggttgagtcctcctcaatggaggttcaacgatcatgggtttcctagccggtgtaggcccaggaggaggaggaggaggaagagaaggtcctgcagcgtcactggaatgggtggttcaggccactttggccctagggcacctgaagtctcgtctgaaggctctccaactagacctctgagtcttgaagccatatctgcaaaaagaaagcaacaaagtcagaacacaagtgacaaatattcaatactagaaaaaagatggtgcaatcaactctcaactaccatcatcctcaaaagatgagtcatctaaatcatgaactgttgccttgcccttgcctctagatgtaggtgaggggcgtgtgggactaacataactctagtctctaggcctaatcagtagagcggcgtccccaatggtgcccccgtgagccaagcagtggcagagggccttttctctcttctctaaattcttggctatttgagataaaggaacattgtcgtccatatcaggtgtatgcccgcctcctgggctagcctccttagcagatatggctccatctagaccacttgatgggccctcatcccccttaactctagagtcggtggggatacaggctgtatctccgaaagttggccacaaaggccaacctcagtatatccctcctctctactaggagggatagaatatgtttagccctatccctcatttggagggtaggaatggagcgtctataagtaggcactctctgaaaatggcagtgtcgaacctgctagatatcccagcaatgaaatacttctggacatatccccccaccttcgacaaaggcgtactgttggtgtcacccaaccactaatatccaatctggataaagtagaagtaccccgttcgattctacttcagagcagattttaagtcaaaatagtatccaatctcataaggagtaggctaaaaccagcctagctcgacataaagaacaaagatcgctgaaaggtacttgatacctttcggtgtgatttgtgttgggcacattccgaagtatgttgcgatttatctaaagtaggggtgcaaaggcagtactgcccatgctaaatgtgacgctctgaccacgccatctaattgagggccaaccggtgcgctccttggtccctcgacgacacctcacactagaagcctctcaccagtccactctctcttattttatcaagagtctcagcactaataatagatggaggagaggcacaacagtctccctacaccccaaaatcaagaacttgaggctcagtagcctgtattagaacatggtctacacttatcaccaaaggctggccaagcatattcaagggctacctgtcatcatcatacaagcccagaaggctattggaaaaaagcagaacatgtcatgtactgcctcatcctagcaagtacaacctccttaacctcagactcgatgtttgggctcttaacaccatggttagccataggcacctctgcctggccaacctctagatttctatcatctagaggctacatggtcttctctactatacttaccatacccattatttctagcctggtagtgtaaaggtcaaaatgtggcgctctatggtaagactgattggttctggctataatgtatcagtatcagcctcaagatcactcagaaatttgctagggaatggattggatgctagtccataaagggaagaatgactaaacctataacaacacgattgtcacctccccagaccaatacttgaaatcacctacatagaagagacaaggggagatgagcaacttgacaaagtgataaagttcagacaacactctagctaatcgtacctaagggtacttgcaagaccaattacatcgtacaaggctaggtatcagggaagtatcgtctcaagtatactaacttaaacaaatggcaagtcttaagttgtacattcgactataatagactcaccattaagtcttatacaaagtttctaagggagtcagtatgagattatagttgtatatgcctataaggccttgacaaaagagaataaaaacttggccacccgcttggaacctaggccttggctggccagggttcccaagcaaaaagagattcggctagggttccattacccaactaagggctagccagggaccttaagcctagacattggccggccatactttagggtaccccctatggctgactagctcccaagagaagaccttcatcgctagctaggtattgaacaagacccctatggccaactaaggtgtgtaacatatcaaagtgtgtgtttttaaaaactcaaacatgttctttgtgttcttcgtgactcaaagagtcaagaatcacaatgaaggtcaaaattgaatctttttcttcaggaaatcacacattatatatcctaaaactatcatgcggatcaaaatactaaaaagattacaatcaaacattagatcataaatattcaaagcaaagaaaagcttgacacaacttaaattgaatactttaatttttcgaaannnnnnnnnnnnnnnnnnnnnnnnnnnnttgagttgtaaattaatttaaattaa

SEQ ID NO: 115590 - DNA, 903 bp, Cannabis sativa
  modified_base (844)..(877): a, c, t, g, unknown or other
tttttaggttttaaatttttggtttagggaaatttttttttgattttctaagtatagaaaatcaaatttcccataaaaaattattgcagtgcgtatgttactaataaattaaaaaagtgtcaaattaattaactatattttgaaaaaaataataaatatataatattttggaataataaattaactattattcaaattacatgcttataattttaaatctatagaataactaattaaattttaagcaaaaataaatataattgatacacttctttcatttatgtaagctgtatttgttttacattaatatgagaatgaaggagttgaagagtgagagcctacgagtgaaattgcatgtaactaaattttaaatatatagcttgtaaaaacaaaacttgcttaaaaatcacatattaccaaaatttacaacatatttgtgaacttaaattactactgtaaaattaaactaattaatatggattgtacatttttattaacgcgtgtatgtacattgaatattgaatatttgtatgcaacttaattgaacaattttaattataaaatttataaataaaatattattataacatcatgcaaatgttataattgttatatttttaataatatttttattatgtcatcaatatttatttgtgtgacatttataattaaaatgtcattatttatttttaacgatatttactcatgacatttaaaataaaagtgtcatgtttataaacttctatgacattgaaagaaaaatatcatagataatttgttgtgaaaaatactatgtgttgtagtgaagggttagagatttgagtggaatgagacatattattcnnnnnnnnnnnnnnnnnnnnnnnnnnnnnnnnnnatgtgtttacttataatcgttttaga

SEQ ID NO: 115591 - DNA, 2430 bp, Cannabis sativa
tctttccagagagaataacatgttgtgtttcactagtgcgcactaacacactatttaccatatgccttggtcgactatatctatatatataagacatattaaaatatgtataagcatagatactgtactgattcgccatcttttttttttactgctaatatataataattaataataataacaatgacaaattgtgctcaaaatagatatatatctggggaaaagtaaaaggaaaaaaaaatagtagtatgaaaattgttccagtagaaggatagatgtacgttcatgaatgattatattattacatgacctattctattcctattggggttgaattatgagaactgatgaattcagtaggtagtgctgttttctctatctctttcctcttttcgtgggtccaaacaccaacaattatacctagtgaaatccaacccaccaagatatcgatccaagtagtgggtacttgtatagacaaacaaaactaaaagcatctctttctttaatctttactctcaccctatctctctctcattgaacccaaattaatagttttaattaaaaatgtattataaatatatacattactaaaaacaatgcatctttctttttcttaaccccacttgtttcttatgccatcttttccgtttcaataaatctataatatccaagcactttacaagctacatttaattttcttctttgattaatctaaagctagaaagtacaattaatggctgtattctttaacataataatctcacttttgtaagcccccttaattactaaattaaccattaattagatctttccgagttagcaaagatttcccaagaatatgatctaattatatggataatgttgctttagttaggaaccacaaatttaagtccatttactatattcataagattgcaatccaacactatgcaaagaaagaccacaaagaaatttttggaccgttttgaaatatggtcaaattgttactaatttattcatgctcgaaggatgccgacaatatttttaatatggcgatcataagtggtgatataaacatagtacaactataatataatgtgaatccatacaacaaattaacatagtattagggaaaagttggctagcaaattggtctataactattaataaattacagagatagctaaatcgataaatgatgtattgctcagcatgatttgacaaatatgttatccttgaaaaaaaaaaatacgataagacaataacaacatcaagctagcaaataaagtaattaattatgaagtatactggcacccaacccaaacagagattagttaaattttattaagaaaagaaaagatacgatacgaatagtaagttcacaatctgctcaaactatagtgtatctctctaaacttctatacagagcaaaattcgaaagaaaaaagcttaaaaaatacatcatttaaaatgataaatttttttaggggcacttggtttgaggatttaaactaattaatcctactgattatattatgattctatggaaacttgtaactttattatttggttgtaaatgagaatgtttagttgaataatgtttactaatcgcattgattagaggagtattattgtctgcaaacttataactttattatttggttgtatataagaatatttaatttgattaatattaactaaattacacagtttattgaacacaagaatttagtaaataaatcttgtgaaatgttagtttaaaattatttgtaagaaattaattgtattaagattaataaagggaatatttagaattaacttttgtgaaagaatttgtataagttcacccttataacaagtatgagttactattctaatgtaagtattacactatagctaataaattaattaagcttatgaattctcaaaatcaaaaggcaattaatggctttataaaagtcagagcaagaaaatgattatgtttagctaaatttttacttttggttatagctagaagtataaaataagtataagttttgacttatttttaccgtttaaataactattatatgaagatattttttgctttccaaaatgtttagatatcatcaaaaaaaaaaaaaaaattgtaagtaaattaagaataatgtaaattattttaatttttaaaataatttttcaaaagttttttttaggaaaagttaaaaatcttaacttcttctaaaatacctttaaattaaaaaatatatttttattttttatccaaacaccattagaagattttttttaattctaaaagcttaaaaacttataaaaactaagttttttttttttgaacggtaaattcaacttctattaaccttcaaattcagctaccaagcaaggtagcaagtcagttgggacagaccccatactgaacatacaatcaggatataataaagccgctctagc

SEQ ID NO: 115592 - DNA, 1541 bp, Cannabis sativa
  modified_base (1514)..(1515): a, c, t, g, unknown or other
agagagagagagagagattacctcacttcttctgaattttcttcagttttccacatgacatctttcaaacctgatgagaagctcttgtagaactgtaaaaaatggaaagaaaaaaagagtgtggggtgcccagatcaattaatatagtctcaagttggccaacttaataatgaggcaatattagatctttcatttttgtatggttaggaattatagaaaaaaagtagtatagtttttgcatttattatacatggcttctgtttctttctgtcaagttgagcttaataatcaatacacaatctcaaaacaagagaaacaacttgccttgtgaaactctagtgtatcaccaccagtttttcgaagctctaccatgtgcaaggagggtgccacctcaaatacctgaatttggaaaacaaagtactcattacaccgcagtggcgtgtaaataaataattttgttcttacaattctgtacaatttatataataattttttgttatttcccaattttgatataaatttctgtatgagttgtgaaattatttgccacataaacgtgtatcaagtttgtgtgtctgcctcgttgtcatgtataaaaatgaagttgatactagttttggtcctcacaaaagtttttgtatattggaaagaataaatgcaatacacttccctaactaataatgaaatacctcagtggctacagagagatgcccttttcttccagttttatcaccttgcagtttcatctgtaaaaaattgaagtgagcagaaaaaggtaaataaataagtaaaattatgaaaataatgagcttggtaaaaacgaaaaaaagttaaaatcacaattttatcctttaacatggatgtaagcaatttagttgaaccataattaataattatgtgtcttctttgagcttaaatatttgtgttgtccaaaaatatccgtcaattacaactggaaaataaataaatagaacaagagaggagcatatataacaatattaattagactacgtacgtaccttgtagttctgcttgcgaatattaaagcccaaaggctttgctgcttcctcaattttatccatgatttcatttgcaggcttctgagatgtgaaacgggtttctctcttcacaagaccctatatcacaaaatcatcaaatcaaaattgtagaaaagaaaaaagaaaaaaaatagttagcagcaaaacaagtagaagaactaaaatgggaagttgcatattctacaatacatagtcgaattatattgaagaaaaccagggaatcatatgatacttacagactgcttctcaaatagattctcaagattgaaactttgtgatctagatataagctcaaaagcattcattgaaacaggtttctctttcttttctgttatcaatccttcctgcaatatcaacaagtatatatgattaagtcatttatgtaggtacgtactttgttttctcattcattcagctgcatgcctgaatttattgttaaatatatatatatatatnnatatatatatatacatatatagtgtt

SEQ ID NO: 115593 - DNA, 1288 bp, Cannabis sativa
  modified_base (1187)..(1189): a, c, t, g, unknown or other
aaaaaaacttgttggtaacctactctagcaagtcactaaattgctacttcatcaatttttttagtacccattaagaaatcatccatatatatatataaatattcatacactatggtagatatacatatatatgtttctatatattttttattaaattaataattttattgtataatattaattaaaatactttattttatatatttttctttttttttttaagcaatataattattatatataactgtgtatatatgtatgaaatctttcgatatctgtcagtgatgtatgaaatttttgttttccattcctctgtgtatattttgaatattttaagtatgatcacattcataaaaaagttatacatttaatctatgcatgctaaatacttttgaaaataataaaaatataagaaattgctttaggaacttgttcggacccaattatattttgtgaaattaaagtcttattttcacgtgttttcaatgtatgaaatttatgaatctctcaattttgaaatttaaatcattttggaactaatttcatttattttgattgtcagaattgcatttttgatcgggttttggggttgagtctgcatgacccggattcagaaaacgagtcgttgaatgtaaccccaaacgacttgtcgtttttcattgacagttttttattttattttaaaaaaaaaattcaaaaatttgtatttttcatttaatttggaattttattttctttccttatttttgttaataaattcaataaattgtatttaattaaattttccaatttgattttaacatacatttggtatttatatgttattttctaacaaagtaaatttcaaaaaatttcatttggtaattaattacatgatttatttagacatataataattgtgttaatttgaacaaattttgtgctttacaattaagtagtgtgtaattataatatttattatcaaaatgaagtgatttattgtctaaattaattaattattaagtaaaatgtcattagtacatattatggaatttgtatttaatttattatcatataatagttgtgcaattttatatttattttgtaaatttattattagtaaaatttaaattttgtatgaagtaaatactatatattatttccatagtgttaggtatattaagtatgcatctaagcccaaagcaaannnataggctcacacaggcacactgatttagatggatcatatcatgttactaggtttatacacagatgaaagaagatgacaaaatttaccagttacaaatta

SEQ ID NO: 115594 - DNA, 3029 bp, Cannabis sativa
ttctattgataacaaatcagattgtattggaatgagttttatttaaggcataaaatcccaatagatatttgggttagtttggaccagtgggagttaggattatccggttatggggattaggttttattcctgaaatttgattaaggtatttactgaattttgttgtcgtgacataggacccaggatcgtcaagttttgttaccactcaggtcagtccgcacacctaatttttggactgagataagaaaagcgatacgcaccacttacggttaaatgaatcacggttatgttatagtctcgattatgatcgaggtcctgtgtgtgtgtttgttatgcctcgattatgatcgagagttagaaacagtcattaccgttatgagtaattactcttgaaactgcagataggtttcttacttatcgttcgatgtatcgggcaacgatagtgacatacgtaacttgtggataacgagtggtaatggtgttttatgaagcaccaatattgtatgattataatgacgtgaagttgtgtaagcctattagtatgtgatatgttataattgtataattttgttatggtgtgattaaattgattttatattgcttatggaattagtcacttttcttgttgagtctctgtgactcacaggtgcttaatggtacaggtaaagagaagggcaaagttgaacaaccatgagtttgaggtctcaacagtagtgtacaatcagccccgatgccacggcccaatgaataggatttcccattttgaatggattttgaagcgtgaacctattttgtaaaatcacttgtggaactgaatgtaaatattttaaaaacaaggagtcctcgtaaataataacagtcatcttttataaaagtcgtgtgttgactacaaatttttaattaatcacacttttcgtataattatataattagtagtaaagtaattttgtaaaaatacacacgtagtctttgtgagacaggaggttacatcttctatcttttgaattttaaacaagttgcaataatattggacctgtgattaagagaagatttgttcaaagatttattttgagaggaagaatgcattaactgattcgttgaaaggatttcactgaaagcaatgatcaaagaaatcatattcgtagggacagattacaatgaaataaatgaactggattgggttggattagattagatgctacttacttagtatgattatctttacatatttttgcttataacacattgatagtttgcttgggtacacatatggagtattgagttggctgatttagtttatcttatcatcaaccctattttataagtagcatccaacaaacaacttataatatactctttatatgggaatgttaaaataaagattagaataaaaggcagctaatgtggtacctaacgccccaacttttatgattatagctggattaaattaaaatataacttcttaattattattagaaagtacattagaatttcttaatattttataatgtacacataactaagtataggctgcacttgagtcgacagaggagagtatgatatcttaacaatcacttgagcatatctaatttttaataaattttcatttttccattaccatatgtatatatacttttaattttaaaaattaagcaaactaaacaatactaagttttttgaaaatccaatgtttttttctataaataaagtgtaggtgtgcaacacaaagaattcttaagagctcactcattttaatactattctcgcaaaatcatacttaactgtaaaattctaataggatatagtgcatcttaatttactattatatattaaaacacaattataaaaagtgtgtcatatatataacatttacaaatttttgtctcaagtattttttttaccctattattggacatggtcttatccaaaggtttaattatttatttttcctaataaaatggaattatgaaaaatttattgaggacttttttttttttaaggagaagtttatttaggcttggtgggactcaacaataattacttattcggtatcaaataaaaaaaaaaacaattttctgataaattagtcaaaaatattgaaaaataaatttttgttaaataatattacgaaaaacaaaaaagcaaaaatattactgaacaagcattaatttatttattttttggatttaatagttttgtattgagagttattaaaaaatttactatgtccaataacaatgttcttttgtatttactttagaataaaaatataagtaaatattactttagatcatgtattttgtaaaagttactgattgtattctctattttttaaaatgataaataaatcttgtatttttcaaaataataaaaataagactatgagcttaatttttaatattttatttttcatataaccaatttgaagatatttcctaacacgaacatgtaactaattttatcataatatttctaaattgaattattattaaattttatttttgacaaaaaattagttcatggttctatttgtactattttaaaaaaatataaagtctattttatcatttaaaaaaacagataatcaaattggtaacctttaaaaaatataaaatcttttaaattcctcatttccttgagtggcatttggcaatactgactcactcaaatgaatatatattttttataatgaaaactcctgagtaaagaacggccaaatataatgttataatcccattgattatggcaataaaatataaattgtgattattgactaaactaaagatttgatatgatattattaaattcataaatcataatcatcagccacccttgtcttatatctattttactatagcaattgcctattagctagagttggaggatttagtgatggaatggaacactcaatttccaaagggaaatttcatttttaatgcttaaaaaaacaccctctaacaaaatttcattttccttctctctctctgtctctttctcttcctcattctctcttcttcttcctcgcacca

SEQ ID NO: 115595 - DNA, 2220 bp, Cannabis sativa
tttttttttttgaaaaggaacctcagttcgagatagattaactccaaaagagaatgggattcacaaagcataccaagcaagtcggcgatcccgccaatcttagctccaagttcatggccgaagagaaatcgaagatagccatgattccaactttttgaactgcgatacattaagtcggcgacacatgtcaaaccaggggctttgcctctaacattttcataacattccgaattcttcatagctaagccatgcatggtatccacggttgccaccaaatatctatgttctcgagccctgttacgatgatagcaagcaccattaattgctacacaaactagtctagcctttaaaatgcccttccaaacaaagctgtcagtatttttttccgaaacactccagaaggattcccttggaaagtatttgcaactttgtctcataataacattatgtttggtaagaagaaaaaaagtataaaagagagaaatagaaaaaaattaaaaaattaaaaaattaaaaaataagatgtttagtagctttctaaaagagaaaacgatataatagtgttgattgttttataaacaatttttgagttgtttggttgctgtttaagtattgttcagtaattgttggaatacaattttcttctcttgcttcaaaaaataaaaaaaattaaataaataagtgtttggtagtaaatctaggaaagaaaaataagtgaaaaaaaatgagtaattctatttatatttttttccctagaaaatgagatttttttttataaactcaaaattagtgaattattttcttttacacattttataattaatttaaggttaatattataattcataataaattaatttttctttaaacacaaagagtgttataatgaaaaatgagaaagaatactcatagtgcctcatacttttatgatgtattatagtatgttacaatttaatattgaatctcacttatttttctttaataataattattataatcatctaactatttataggacgctaacttatggtgcttaataacaatgctaagtatgagtttagtttgaactaggtttaaacaaaaaaattaaaaattaaaaactctaaattgtagattttaataataataatagaaaaaattatcatttcataacactattttcactataattagtatttatttgttaaacggtgtctatattattctttaaatatttttattaaataatctgcgaataaggcggctaattattagtttgtactgtttgtttcttttttaggtcgtcaatttagtagggagtttgtcccaactcatcttcatgctatattattagtgaatttgtacttttaattaataagattgcagagtaaatatttatttaaatgtgtgaaatatcatcaatgtattaagtaatgcttaaataatgtcaaaagtatgcataagaacttaaacaaagcataattgttattatttttaatctgaagacttgattgcctaacaaaaataaaaaatctcaaggattaaaacaaaaatcttatctttttttttttaaaaaaaacccttaatataaaagactaaaatgaatatatttttcatattctgttttcagttccacttaccataaaacaaaaaaaaaaaattaattcacacacatttttatttaatgtttcttaaacttgggtagattttttaatctttctctcttgaaatctggtgaatgatataacttgttttttaaataaaaagggtttttttgttggatggaagaaaataaaattgaacaaaaatcttttttttttttttaaatcaacaaaatcaaaattcaagaatgtgaaactttagtttttcctctaaaagttcttatatagagttgaggctagaaatcatcatacttgagtggtttatttatttgtaatactagagtttataattacataaaatactaatttttataattttttttatatatttttacggtattctagaaccacaagaaatcaacataaaaaataatgcataaataacaaaaaatcaacaacaaaataataataatttaacataaaaatacataaaaaaatctattttatgtaaataaaatctaattttgtaatttttttcaaattatgatttttttatttttatacttcaaaacaattttctttgcatttttacaaaattctacatagaaactcctattgcaactaacgctgcaacttaaat

SEQ ID NO: 115596 - DNA, 1565 bp, Cannabis sativa
gagagagagagagagatagaatcgtgagagagagtgtttgcttgtgtgaaacgatatggggcaggtgagatggaattaggttaagttggaatatatatatatatatataagtagagttttttaaagatgggccaaagcccataattgaatttttttaatgtctttttgcgtcggttgtgcaacgacgctaatagtgtatataatggctttttgcgtcggttgtagaccgacgctaatagtgtatacatattttttatatttcatcattttgtttcggtacttgttttagcgtcggatagataaccgacgctaattaattattatttgcgttagtggataactgaagcaaaaaagtgtaggttgacttttgcgtcggtcaacaagtttgaccaaacgcgttgaccgacacaaaaatccctttttgtagtagtgtgaattggttaatctaaatactgaccaaacatgagaatattagagtatttctatatttttacaaaatcattcaaattgatttacacatataaagattatgttaattctctctttgactatatttgatcacaatcaatatatgataagtgtgaatattttaaatattgtaagttttccatttattgaatcattcattttctgatttagtttcccaaattaatcgttaaaatatttagcaattaatgtagtgcagatacaaatgaagtatctcacccataaatataggtgattacatatatttaaaatattcatagatgtctaaacatggactcacatggtcaaaaatacttcatctccttcattgatgattactcacactacatgtatttttacttcataataaaagtgaagcattagatgtctttaagatatttatagctgaagtagagaaacaatgcaacaagaaaattaagatagttagattagatagaggtggagattattatggtagataaagagaagatggacaagcacatggccaatttgtgtagtttcttgaagaaaataggattattgcccattaaaccatgctcggtgcacccgagcgaaatggtgttgctaaaagaagaaactgatcgttaatggacatggtgcaaagtatgcttaacaacaactctaatcttcctaaatccttgtagatcgaagctctaaagatatccgtgcacatattaaattaagtttcaacaaagacagtctcaaaaataccttttgaattatgaaaaggttggaaacaaagtttaaacaatttacgcatttagggatttccatatgaagttagaatatataatccataagagaagaaattaggccataagcgaattctttatagggtacactgaaaagtctaaaggttgcaagttttattgtccatctcatagcacaagaattcaggaatcaaggaatgtaaaatttcttacaaatgccttgattaatgggagtcatcaatcaaaggacttaggtcccaagaaaaatgcttcaaaaccttcacttaagagcaagattgataatggtctacacccctaaagttcaaacggatgttgaacaaccactaccatgttgggttttatgcccta

SEQ ID NO: 115597 - DNA, 4220 bp, Cannabis sativa
acctttcagttttttttaatatactattgcacataaaaacgatatactattgtgcaaaataactataccaaacacttaattattcaaagttataattataatttcatcatcgaacttttaacagaatagacattttgttaattttttataaaaagaaatatttattaacttaattgttaaatttagggccattttacatattggcccttataatattaatactatcatcgtgtgagccacacttatttgggccattgttttccataaatcctactacatttcgctgttataatttttcatttttatatccacttgtcatattcaaaattattattattattattattttgagcaagcattcgagttttttttattttatttaacaagcatatgcgaaattattagtttcatgattttgtgtgtgtttccttccaataatatgttgacaattaaaatttaatagaacaaaacagagactaattaacatgttaaaataattgaaaataagaaagaaaaagaggaaaatcagggctttgaagaaagtagaaattcataaaaagccaaaatattagtgtaatgcaattttaaaatgtgtcaatctaatatgtcaactgttggttcaaaaataaaaaacaaaagaaaaagagatgtcaactgttatgccaatgccaacaactgccagcatgttagcatactatagaactattaatttgagctaaaacaatctgtaatggatattcaaataagataattttgtagatgaattagtcataaggcataagcatagctataaaacaaggcattatgttccttaccatatttgtgaataaacaaagcataacattacatatttgctataacaaacaatggagactgccaagctatccttacttgtctttcttcaacttctgcttgttgcctctatctttgaaagggccactgcacaaggcttgaaaattggcttctaccagcatacttgcccaacagcagaaaatgtcatcaagaagacaacatctaagtacatctctcgatttccaactcttgctgcagctctcttgaggatgcattttcatgattgttttgtcagggtacgattttcataaatagcatattttttgtttcaatactatttgacttcatggtcgttgcatggtttagtattaaaaagccataagccaacatgtcatgaatactactctctactaataagttgtatgtgcagggatgtgatggttctgttctattgaactcaacaagtaacaaccaagcagagaaagcagccattcccaatttgagcctaacagggttcaatatcattgattttgcaaaatcagaagtggagaagatatgccctggtgttgtatcatgtgctgatatcttgactttggtagcaagagatgctgtatccatggtaataattgcatcatttaacaaagagtacttttcaatttaatcaaacaaagtcttatttaacaaaagataatatcaagcaagcacaagtgctccatttttaacttatatctcctccctttcagatcaatggaccatattggaatgttccaacaggccgaagagacggaaaagtgtcagtagccttggaggctttaaccaacttacctcctccttttgctaacataacaactcttaaagccatgtttgccgtaaagggtttaaatgccaaagacttggttgttttgtcaggtactaagccccaagtttcatctatatatattgtgtgtacaaacatatttgtttccttatagtagtatctaactccaaatatctgtttctggattttaggaggacacaccattggaagggctgcatgtgctgccttcaacaatcggttgtacaatttcactggaagaggagatgcagacccctcattggatcctaactatgctgcaaacttaaggaaaaaatgtgggccaactgattttagcacaacagtggaaatggaccctggcagctacaaaacattcgatgaagattactacactcttgtagacaaaagaaggggcttatttcaatctgattcagctctccttaatgatcctaagactaaggcctatgtcaaattacaggcaaccacacaaggctctacttttgctaaggattttgctgaatctatggtaaagatgggcaacattggagttcttactggaaatgctggtcaaattaggaagcattgtgcttttgttaattgattgatgtatcatgtgtcaacaattttttaatttaataagcaagtttatatgagtgaaatattttggaatatttgatgtttcaaagtataattgctgcaacaatgggtggcaagatgtaaaaagtaagaataacatatggttaagaataagtaaatcttgtatgatttaatgtaaacaagtcatgaatgatttaatgtaaacggaagaaagattttgtgaaccataaaaaaaaatgagtggatgtaatatcttgaatgcgaatatgtatttctttactcattacatatatttgcaagtgaattagaatcattgggattttattttgcattttctttatcaaaatttgatgtgaaatgaataaaaaaaaaaaaggaaaaacgaggttcccattttttttaaagcaaatataaaacttttattaatttgttaaatcagccaaaagataagattatacctcaacaaaaatatcacctatgttgaacacttgatttggaaaagaataagatgctccaacaagacaataaaaaactatattagcatatcgtttaataaaaactaagaaaacattatttgaggacacaagaagtttacgataattttttataataactccaaaagaagaaaacataggtaatgaattttgaatagcttggaatgctaccaagcaatctaactacaactctactttcctctatgattgagttttaatccagcttagctcttcttttataccaattgcttcagccaaatataccagccaaactgtccgatttagccatcactagctatccttgagagtctcgagcgactatgccataaccaaatgcaactcgatcacggaaaatggcagcatcaataattaccttgattgtattctcctacggcttaacctaaaattcaactccatcactagcttcaaaaactgaaaaagaagcctctaaacctctagtttgggctaacttccattacacaagacaacttatagatgagataagagcaccatccaccgtagcaaacttttggttccaaaccaacttgtttcgagccttctgtaacccccaccacaacataatagccttcccacacttgtccttacaacatcttttaatcaaaccagctacaaaatcagcagcaacaattgacctaatcccggccaaaagcttctgccagcattgaccaacgaatgaacaagaaataaacgcatggaaaatagtttcctcacctctttgacaaaccagacacatgatttgaactgggaccctcttaccacttaatttagtcaagatgagaaaataatttgaagcagcccaccataccgaattgagagctttcggtggtaccttcaaatttcaaagctagcgccaaaacctagaagaatcatatgcaatccgatttcctttttgagcttgtaacaacttgtatgcactacgcacagagtagaaaccatgatgttccttagaccagaaaaaacgatcatcagctacattcaaactcaatggaatcgccaaaatatgttgttgatcacgctcgttgttttactgttacatatacacaggtgtatacagtggtcatccaattgatatttaacttgtgtgtcaaatttgcaaaaaaaaaaaaaaataaagggtttctgccaccaaaaaaagataaggggttaagtgtataaaaattaaaacttaagggggttttctacaaaaaaaattaaaataaaggggttaagtgtataaaaattaaaacataagagagttttgccacaaaaaaaaaaataacggggttaagtgtataaaaattaaaacataaggggagccgcaaattgctcaaaaaaaaaagagagttatgtgtatacaaattgaaacttaaagggatttgactgcaagtttctcaagtatcaaagatcaaagtataaggtaccagtagtgcttagtgttacgtgcagtctatgatggcacgttacaagctaagagatgcccacaatttggccaagtggtggtcaagtggtggcgcatgttgtgg

SEQ ID NO: 115598 - DNA, 4040 bp, Cannabis sativa
ataatattaattaacagaaaaaaattaatatgcacacgtacctcttctaatttaaaatgaccacgttaactttgtaacgatccttgctagtaaccaaaacactaataataacacaaataataaccaagtattggctcgttagttatatgaaagtaattggttatagtgtaaagtataaacaaaaataaaaactgatcatcgtaatagccattgtcgcactgcttgtgttcagacgaattcaatctactgatcacgcagaaaattcatctcatgtgagtacggattactcttaccctgcaaaacaaagaaaattacacatcttatcttaaaattaaattaattttctcaaataaattcctagaacccataatatatatgtaacatggtttacaaaatatcaattttggtgggcaggtgtgacttcttttcctaaatgagaaaactactaaatctttccacatctttactcgtactgtaaagaaaaccagctcattagtaaacagtaaacacactatcaaagaacccctaatttaatgaaagccaatacttgtataacttgtgttcttaaagaaagtcaatggcaccttcaattttccatcataacaccgaaaggtataataaatagcatatgcaattgaacacaacaaacaagcctatcgactactggtacctattatgagaaatcattttctaaccatactgtgaaagtattaggaagaaaattgtatttgatcacatataagttttttacagtggaagtcataattccatttttgtcagtaattaattggagatattattccacaaatcaaaaccacaaacagttcaagaattagaatgacagaaagctatacaaaaattaagacatcactacatagttcttcatgaagaaattacacagaaaacattcaatctaaacacaaaaccaagtaatggaaaaagatacattaaactaatttttaagagctacattttgggggaaaaagctaaaacagatgaaaagagctctctgggtgaatacaaagaaaatgaagatatagtcaagtcacaatacttgggtatttttcataaacaatgcaagcttagcttaatttaacaagtattggcacattgttgcattggaatgttacaacagaaaatccaattgtacatagctatgaatctactccaactcgggtctttaatgaaataacaaagataatagccaaaatcaaagaggaaatgaataaaaaaaaaagataaaagagatcaactccccaagagctacttctaaatcacaatacagttcttataacggttcctttcaatctttctacgccaagcatcaaacaaataaaaaaactcattggagaaatcaaaatcaagtctgccaacaaaaatatcaaaaataagatatattcttattgtaaatcaacagttgaaagtgctttaataagatgtaccaattcacaatggctgattattagaaactagaaccataaaaaatctactcacaatgttgtttctagtccaaaaaagtcagttattcaaaagaagattcaagaaactcaagatagaattcattatatcaccattctcatttcagctacacttattagtagtagtccatacaacaacaacccacatctctatttccacaaacactaccaaatagctcacagctacagccactatttcaccttctatataatctttttttttttctttttctgataacagaataataagggtcattatgtacctgtgaaagaacataattaaacaaacaaaaaaaacatataaataatctgaaattaaaaaaaaaaaattatatttagattaaagttttgaataatatatccaaattttaactaacaaaaacacaacctaaaaataactacactttctccatacaaaatcacattttcaaatcttcctccaacaatttttatcatatataatctaaaatggaaaaaaaaaaataaacgaaaaatgaaataaaaacttgttacctgatgcggccgtctgctgcgcctaaggagaagcaccgacctccgcctaagagggaggacctcgtgccggcctcagatggggaaaattttttgggtctggttggggtaatagcacgagagagctggggtagggtaatcgcacgagagagagagagagagagagagagaggtaggtgtactggggaaaaggatgaatattaactatggggctgatatattttttttttaaaaataaaatggctttagtgacgcgcagaaagcgtgggcaaacctgtttggtcacacgctttgcacgtcaccataggccatgtttttttttttaatttttataaaattatatattttgggttttatttttagtgacactccatatttttagtgacgcacattccgcataataaacaccgaacatttagagtctaatgttgtgtgtcactaaaaaccactcttaattttttagtgagacacacttttatgagtgtcactatatagtgtcactaaaggcctaatttgtagtagtggagatcctacgtcgcctttgcgttttgttcttggcatggaatacttatctcgaatactggtaaaagcagggaaaaaggaggagttcaaatactttgagagatgtaaagatcttaaacttaaccacctctgttttgcagatgatgtgattttattttaccatggagatttcagaagcatatactgtctattgcaagatttgaaattgttctcttgctcctctggattgggagcctagccctttcaaaatcagcgggtcttattgctgtggcatggaagatagggaaattcagcgagtggtggatatttcaagattttgcaagcaagaagttccattcaaatatcttggcatccctatatgtgataagaggatctcaagcaaggagtgtgaaatattggtggaaaagataacatctagaatcagagttcggagctcaaggaacctctcatatgttggtagagttgttttaatcaatttagttctactagctattcacttatattggagccaaatcatgattttgcctaagaaaataataaagcagatagaagccatatgtggggccttttatggaagggccaaagtacatcacaaggggctggtttggtagcttgggattcagtttgccagtccaagacaacaggagggattgggtttagaaaggtggaagaatggaatttggcagcaatgaaaaaatacatttcggcgatagcaaacaaagaagacaatatgtggattaaatgggtgcacaatttgtacttaaaagaagagaattggtggagttatcaagctccacttcaggcctgttggtactggaaaaagatagtggcagccaaggaaaaattgaagatcttagctgacttccagcagctaatgatagggaaaagcttccaaatctcgaaggcctacaatttgattaaaattgaaggagaaagaaagtagtgggcagcgattgtatggaatagattgaacatcccccggcatagttttttcttgtggttagttgtccaaaataagctaaaaacaagggaaagactatgtaagattaatgtcataccagatgatgattatttgctatgcaggaatgtcaaagagaagttggagcatctttttttctgctcaatattgtagcaggttgttggtagcagctcaaagaatggctgcaatggcaaatctgctcaagttcgcttcaacagatagtgagatggctgcaacgacataaagcaaacaactgcaagatgagagtgtatgttgctgctgtggcagctttagcatataatatttggcaagcccaaaatggagttctttgggaaggaaagagtgtgcaaactgctcaaatagtaagtaaaacaaaaatagacatcttgtatagaattaaaagtgtttcgcctaagaaagttagtgtcaaaaacaggtcatggtttgaaaaattaaaaagaaacacacatatgcatatttgttgatgtatagattatttttagatctcgcttgagatgctattaagctgtaaatggatgtttggagtaatg

SEQ ID NO: 115599 - DNA, 2180 bp, Cannabis sativa
acatacaccctgtgcacagatgcccactcttcttacctcagttgctaagaccacacttgctatctcgagcacctcaacgaatttccttgttgtgaacaagatcctcagaactgtccagaacgtggtcgccggcgttcacgtcggtttcgttgccgacaaagtgtaactttgtccccgattactattgatgtgtcctttccactggggaagctctccacggtgcttaggacctcaaaacgatcaagatcaaccaaagaaaagaggcccaagttggcagatcgatgttgtctccttcgttggcggtgtaccgtctttaatggagtcaaaatcttagtcctttgttttgaacgttaaagtttcgttttcttacatcaaaaacaatccttagggtcgcatacactcatatctaacctcccttgacccaagaacaagcttaaacacgttcgaatttgtgtccgtttcaagtcgtacgtaccttcgaagcttcaacaatggtgaaactcgaaatagtgacctctgacccttatacaacgttaaaaggcttcgttaggtcgtacataagttatctcaaacatccactttcacccatgttgcaatccacttgaagaacgaagaaaaactcgatatatcgtatcaaccgtatactctcaatgtttcactcttttggcgtacgaattttgaacccaataaccaatctctaacgtgtttaaatcgagcaaaaagatcgccttaaaccaaaaaagaacgtttttcattcctcataaatcagctccctcgtacgttaagttgttaatcaacttaagttatattatattatatatatacgcagattatataataataataataataccatttaacactataataatatttaccaatattaatacaaaatatttgaaaataaatgataaatatcaattttattatctcacacgtattactactattattatacccacactaataataatatgtaccaaaatcaaacaaataacacatttatttaatatctagatatatatatatatttattagacattatgcacatgcccataaaatcaactattatgtaaactcatacatattcaaatctataaatatgtaaaatgacaaaatactctcagtggtaaaatttacaaaaatatccttctgagttagcagatattacagttcctcagtatcttacttttcaaagattgattgatgaattaaagaaacgcggaatgactgagagggcacgaaaagtgtgtgacctgatgttgttgaagatgggaagcttgaattgccagttcaagttatccatgaaatgagatgcaggggattcgatatggacttggctacaagcacaatgctaattcatttgttctgtgatatgcaaaaattcgaagaggcgagtttggaattcgagaatatgattagaaggggaatagttcctcagtatcttactttccagagattgattgatgaattaaaaaaatgcaaaattactgagatggcacgaaaagtgcgtggtctgatgtcgtctgttccccattctatgaaattgccggatacttacaagaaagatggagatgaatctcgtgcgcggaaaacctttattattcgaaaagttgaagcaatgtcacctatattgaaaacttgtaatgatcctagagaattagttatgtatagaggttcatctgaaaatgttgttggaaaggcgaaccggttgatagagaacattaagaagaaagtataacaactctctctttactcaatagccttggggagtcctggacaattttgagaatcatggagatttacacttgtttcatgtttctagtaaagtagtttatctaatcgttcttgtcttctgttataatgaatgcacattcatttctttttagtcaaatactttgttattgaaatgtaaaacctagcatgaagcctctctatggtcattcttagtggtctttcgaatgctttggatatttcttgtgataatggatgatctttactgttttccacaacagctttaaggtgagtggttaatcgttgataaataggaatctgcgttatcaaaagatttcttgtgattatttcttgggttactctgaaatcttcctaacattccgacagaataagcaatgtcgggtcttgtgcacacctgagcatacattaggcttccgacagcagaa

SEQ ID NO: 115600 - DNA, 2098 bp, Cannabis sativa
tataacaatataaaatctaattattcatccaaactaaataaaaatactaattagtttgattagatattggatgtattgaatttttggacagcctatccaacatccgatttgatctaattggatatttaaaaataacatccaatctgatctgatcacaattgaatatccaatatttggcggtcaattgtaattgaatcggttggttgtcattagatttgatcaatttatgcacacccctaagcataagacggatggttgaatgggctttcgagacatgtttctaattaatcaatcttgttttgctaaacatgcagcccgttatataactgccctcattcttggctgccaaggttataaaaggattctattatgcgaatagctctttattagaggtggtagaaactaagcaagcctcctatttgtggaaaagtattctttgggatcatgacttatggatgaaaggagttcgttggttgattggaaagggggatatggttcgaattcgaaaagatgcttggatttgtaaagatcatgtgagtcgggcttactctttcaggggtggttcagagcttgaatatgttagtgatttgaaattggagaatgggatgtggaacgttcctttggtttgaaagcttttcgatgaaggtgaagctagagctatcttattaatttctgtttcgttgtttaattagaaggatacgttgattcagtattttactgatactggtatgtacacagttaaacattggtattagagcggggtcaagtgttggcttcctcgggtcaaccacgctagtaaaagttcatgtggtctctttcagtgtcccccaaagcaaaaaatggtttggaaagcaagtcttaatttcctgccttgttatgtcaatttgaaaagtcatggcctgaatactgcaaatgtttgccctatgtgtttctaaaataataagactactttgcacgctcattggttatgtccttcactcaaatgaatcagacaagggtaactgttgaaaggttgagacactcttaagttggcctccagcttttatgaattattagttggttgtatggatattctttcaacgtaggagattgaataatttgttgttctctgttggcagatttagcataggagtaatatatttgttcatgaccataaattactctcaaatgatgtggtgacccaatggtttttaagtttcctttggcactatcaagatgctcaaagttcttcttctaggacggtaataccagattgttcagcgtcggtcaacctatcgaatgctacatggactgtggagctagagttgggagatgccagcttatttgtggatcttggtgttaatgtcaaagggtggaagattagtcttggggctgtggtgatgagtcagtcaggtgaggttttctactcaggggcggtgttggtggcggtagcctatgaacctcatttagcagagatagtagctttgttacaagagatgattctttgtcgtcgtctggggtatataagtatgacgataatcttttattgtcttcacttatacaagctacattgaataaagaaacacgttccaatgaatttggtgctattattaagaacttataaatgtttggtcatctttctctagtatttctctttctcattgtaagtggtcttttaatgtattagcccactcactcgctcgtattattctttctttggatactgctaaagtttggagcctgagtcttccatctggtctttaacttttagattttgtattgattattttgttttgttagctttgtgccttttaatagaattattcttttatttaaaaaaatagttagaaaaaaaaaattgttccttgaagagaaaaaaattattaaaatagttaagacttaattatttgttctaaatacagattgcaagaaaaatcatcaaataacttttagggatatttgtaatatatatactttatattttcaaattaatacacttatatatatatatatatgttttttaacagattaaatataacaaacattccaatagaagaagaagaagaagaagaatgtaatatccagtttaaaatagtatttaatttttcgtttggatatt

SEQ ID NO: 115601 - DNA, 1524 bp, Cannabis sativa
tattatcacaacaaaaaatccactgatacttgtactgtgttgaatcatgcatggtagttgaaacactggatttgtaaataaattgcctaatatttggcacggtcgaatttgaacaagacataatgaaaaattatattatttatatatcttcttatacaaaattcagtgctacaaatatcttttaatatttgttcttggatagcaaaatagcaatactttaattccaaactcttgcgcactctattattaggtacttgaaaatatataaattatattatattttatgactcaaagtggtgttaagttattattttttaattaattaattaaaaacaaagttgtatagtttagttagaggttggtgtggttgtttggccaggtggcaattagtcatatgccaaaagtatacatatatcatttttcttagtaattggttgcttaccctcttaattatatactaataatattcataatttgataacaaaaggaattaattttatctccttttagcatgattttgatttgataaaatatactcattggcggccactatttttactcgaataatttttctcgatcattaaaaaacaaactttagttttatccttattccactgaaaaactaaaagccactttgtggagaccagagatgaagagatacttttctttttcttttctagttttgcatgatgggtttacaacttttataatcatcgcaaataaggctaattagtttaaatcccatatatttataactatatatataagcttataaattaaagctatagattccgaattcgttgtatagcacttgcatgtgggcctttccgagccaatgtgtatatatttatatatatgcatatttattattatccacattaatttgttctatttatataaactaatattttgaagctaattatactatacttgttgctgtatatttatatatatatgtttcgtactagtgtgtgttcattttggtggatatttttcaaaatttaaattatgtgtattacttacaatcatatgaagggaggtccacccttatgaaaggtctgtccacaaacaagtgacagaaaccttttaagctagcatatatatatgtattatcaatatcagccattcatatattataatttaactaaggtcttcactatatatttccataaaataaaataaaatgaaaagaggtcactatgtataagctattattactagtacaatcgttacaatatctgtaaaatctaatagggtcccggccatgtcaagtagttttctttaaaggacagtagctagggttttaaacatttagaacactaaataaatttatttctcatttcaatttttatttttcaaaaacaacaaatacaatatctctaaaattgttgatatgtcactaccaaatagttacaaaatctttatcttctccttaacgaaaaatctgtaatgatcaattatatatgcacgatcaatatatattgtcatattgttaaaaaaattgttttctcaaaaaaaaaaaaa

SEQ ID NO: 115602 - DNA, 2039 bp, Cannabis sativa
gatgatcattctttcccaccccctctaccgtacaaaattcctctaaaggctcctgctaagtccactttcaaaaggaacccttttgatttttccaactcttttcctatcgatgaagctattcctaaccaggataatgtggaccaatcccttgctgctgccgtgagccaatttcttactactgaagagataggcactgggttctgttgcctttggaaccatggctaagtttggttctttgggagctgatcataggcctgcttcctcctttactcctcaactttcctctccacccaatcaggctggtcttaatttaggtggtgaaaacccttctgttgttctctgtgatttgccttccacaattcctcagcaagctgctatagttgctagtgaatgcaaccacgaggccactcctgctgaaggttttttttcccagaatctctgaaaaagccaaaggcaaggcggttgttggtgctaagagagctgctttccttccccaaactgttgtggttggtgactctcttcaaaatatccttaaacgtgctcgagctggacccactattgctgaagtttcctctgccctcaacgaatcaatggaacgggcgggtgttgcggagcaacccccccagaaaaatgagtcttttgagttggaatgctcgtggattggggagttcccgagcattccgtaatctctccctttttgtgcaaaagtatagacccacttttctttttgtgatggagaccaaatgtgctgctggccgtggagatagtttatgccgcagtctctcttttgatcatgtttttgaggtccctagaataggcttaggtgggggtcttttagttttatggaattcggatgttgttgttaatattttgaactcctcttctaatcatgttgattgtattataacttttaatgataatataagcactcatgtttcttgttattatggttccctttacattcatgataaaactcaatcttggattctcttagataggctttatgataatgcacctttgctaccttggattattttaggcaattttaatgactatctatctcttagtgatcggtccagtaatactaatcctcctaattatgctatggttaattttcaacgtttcctttgtaaattctctctttttcctctaaacccgattggctccaagtacacttggaagcatggtactatctgtgaaaggttggattgggggattgtcaatcatggttggcagcaaacttttcctaagactactctttatcatttgggattttatggtttggaccatagagtccatagagtcgttcttgaggatgatagtatggccctcccgaaacaaaaaaaggttcatgtttgaaaatttatggctcactgagccctccttttttgatactgtcaagtcaagctggctttattcttcctcttcccgggctccaatttctctcaatgcttttcttgacaagcagcaggcctgtgttaatgacattcgaacttggaatgaaggctttaacagtttatcttctagaattcgtgctttagaaagatctatcaatactatcaattcaaatctgcccctttccagtgataatgttaaacaggtgactgctcttcaatcccagttggattcacttctctataagaatgaaattctttggaagcaaaggtttaaaattcactggcttcaggctgggaacaaaaatactcgttatttccataataaagctactgtgaggaagaaaaggaatcacatccgtaagcttaagtgtagtgatggcagaattgttacttcttttggggagatttgtaatgaagtttgtagttattttggggatttgtttcagacgcaacattctgatgtggaggccactaatctccttctctcagccctggacaaatctctggacactcagcaaattcactttcttgaatccccttttgaggccaatgaaataaaacaagctctttttcagctctcaggtgacaaagcccctgggcttgatggtcttaatccggctttttaccaaaagaattggcatg

SEQ ID NO: 115603 - DNA, 1049 bp, Cannabis sativa
gatggtggttagagttagttaaagacttgcaaaattctttatcaacctgggaagaccaatgtagtggcggataaccccgagtaagaaaggttcgaggcaggttttcagcacaactatggtatcttctaagttagcagtggatatggtcaaagcatttattgagtttgtagtcgtcaaagcaacaataacggaggtacaaataaaagcctcaccaatgggtacttaattaaaatatgcagctcgggccaagatgcatctcgtaaataattgtgtgccctcaatgatctcgactataaaatgtctataacaagcgaaagtatctggtcgatttaacctatcattatgtttctaatctttttatcattctctcaagtatcattttgaagttcttgaggctcagtttatggggaaaatagatagataattgattccgtgttctaaaaagtatgggtatttacattcaaattcagacagaggcattatttcttgaaaatgcctccaaattctgaaaaatttgaaaaattaaaatttaagaacaataaaaatcaccaaaaatcctaatatttacataacgatttaataaaccttatgaaccatccctaaaatagaaaataaacacgataattaagaagaaaaaacttgaaatacttactggtttctggaatgagcaacaatctgaaagaattcctcattgaaaattttcaataccaaaaatctagtatataacgtattctgggttacaaaaaaaatagtcgctgatactcagaggaaataaacaagagataataagggaatgcaagtttaagagagaacgaagaaagaaaattatttttctttgtaaaccttttactgagcgaaaatggtactgtaagagtggagaagatgtgtttttataaaaagccctcatgggaaccattggatcttagtaaggactaatcaatagtgatcaaaccatgggtcagttgagggtagagatggaaattgggcggttaatgtacggggaatgcaattcccgcccccatccgcgctacctatttatacccccatcc

SEQ ID NO: 115604 - DNA, 2793 bp, Cannabis sativa
  modified_base (53)..(63): a, c, t, g, unknown or other
  modified_base (113)..(134): a, c, t, g, unknown or other
atgttctggacttaatagaattcacacattaaacatataatcatgaaataaannnnnnnnnnnatgcaacataaaatgatttttgatgttttattaattagtaaatctaattnnnnnnnnnnnnnnnnnnnnnngggcacaaaacccaacagttcatcgtcatctgaaattccacagactgcttagtgataggaatgcgccttgctccaacaatcagttaatcgtttggctaagtgatgaacgtcaaagaaacacagcaacgaagtcaagaagaggggattaaattttagttcagagagataagtaggggcgagggtttgtaggtaaagagttcgtctgagataattctctgggtgaaggattgttgctaaagtggggaaggaaaaatgattccaatcgcctaagttttcatatacatatatggggtcaactattcgaacatttttgaaatacattgtccagattgaattaatcaaaggcaacaatatccaacggttggagatacaaaaggtttgcattaaatgcacctaaagaaaaagaataaagtatttattattcatcatttcgtggctacatcctcgacgtgctagaaacttggcatcttttcaagaccagccgtcattctctgcccacaacaaacgtgcttaaaactcgtagtgcgagcctcacagctccactaaacaagcaccacgcttcaacaaaatgaaaccaataccacagaacgtgctaaccgttaagatgcctgaggtaatgcagaagatttcttccatatcctaacacttggtcaactagttaaaaaaaataagacaaacattcgggagaaagctgcaagctccaaatacatatgagtcctaggagattagccgtaaatgtcatccatattctcggattaagtgtacgtggaaattacagaaggatgccacatcaaattatgcatgattagtatataccctctgtccctcagcatcacggaaggtgttatataccaaaagctacccagaggctcttcttgttagtaaaggcggaaaggactctaggattctcattaataaaattggtatgaataaggatcagaaggtatgagtgctctaggatggtagctggttagtctaatctaggagagccttagccaaatattcctagaacctattcgggtgtgtcctatccggagctgactacgacggttgcataccttctaacactaaattagattttgtcctctgtgtcagaccttggtagtgcgcgtacgtcctctgtagctcttttttctccaacgacttgcctagacaccaacttcttaaggtgaaacctttggacaacacgcgtccttagtcccacaaattggattgcatcagccgaacaccacacgatgaggaggctccatacctaccaatagttagattgccttgttgtaaataccagccattggaatgtgttgagtacgaaaccctaggttggtggagggtttgccttcaccaacacatgtgcctattaatacctctacttttcatgtgcaaaaggtgaacgatttttacttactgaacctctgctgaaaattcctatgagctttcttcttgtccaagagaaacgaaaggaatacaaagttaatatttatactataaacacttgtaatacttaaacactcgctggcaaggctaatacaatggactcgtagactaggaattataaatgcctgaatcacgtaagaaactacttgtttattatttatcattttatattttccttaagctctaattaatcagtttttgaaaatctcaataaacaggactcataattaaaaaattgtttcactttttaaaaatataatttttttaaaaaaataattttatgaaactaagttaaaaaaaccaaaaaaacatcaaaatattgttctaatgtatttcaaaataatttttatttttttttctaatatttattttcatattttctctcacatactcgggtccggggtctgggtcgagtttggggccgtaactgtggtcatgaccggggttgggcctaggtttaaggtcaaggtcgtggtcgaggttcagggtagggaccgaggttttgggtatggggtcatggatttgacactgggtttgaggtctgaggttagagctagggttgggtttaaggtcaaaggtctggggtttggtgctgcggtctaaggtctatggtcggggccaggttcgaggtttgggtcggggctaggtttggggttagggtggggttgggttcgtgtcgaggtgtgtaattttgaaatttgttttttaatctaaaaactatttttagaaaatattactcaaacacgttttgtattttggaaactacaaaaaaaatattttatgttctcctttttttaaaaaaacagattagaaaacagaaaataaataactatgttctccttagtttccaaattttctatgtttccaaaaaaataatataagataagtaaaaattactcaaaatatgagaaaattttaagagtttacttttttatggcataaataaataaagctaagtggttatgtgtttttttttgtttttttttacatttatatgggtttttttatgccatatttttgtaaaaaaagatggaaatcccatacttgtaaacaataataagtttttgccgaaaaagtcactggtgccggagaagtcgccgaaaaagtcactggtggcggagaagttgccgaaaaaactatcggcgctagaaaagtcatcgtcgccgaaaaaagttactagaagtatatgtctcaaatataaacaaaaatagaaccggttataatt

SEQ ID NO: 115605 - DNA, 1812 bp, Cannabis sativa
ctattttgttggtagtttcctatttcctagtctcctagctttgtatataaatatgtactattctatgaaatatacacataattcgattcactattttctacactaaacaaacaaaagaaaatgactaaaaccctattttttacatgtataaaaaccagtacaaacaggatttcaataaaagcatctatttttcttgaatttttggtatcgtttcaaacattcaaccacagtacaaacattttttcaaaaagaagaacaaaaaagaagacgaaaataaccaaggaagcttaccgtaaaaggagacatcgatccctaaacgatcattcctcggcctcaggtaccccctcttcttcctcgaggaagaaatccctttcttccccattcaaagttcttgcccaattgattttcacaaatttttccataagagtctttgacgaagattttttttataagaatttttgccttaactgtgagtgtttgttcttaatgaggagattttgaaaataaaattttttatttattttttggtttttatttaataacggtcaattctaattaatttctttcttttttatattttgttatttaaaaaaaaataaataaatatacaaaaagaaaaggagcccgttatttttcccttcaaatctttgtcaattacaattttaacctttacttttatgccacatcaacaaataaatgggtgtcagttaaaaaacttaacagaaggaatataataatatactagttacatattaaggagattttcttacagcccttatattttaagggacacaagttgatagtgacataaattcaagaagtaaatttactcattaatctatttattatttagttattcatatatataattttaaaaattttaaatatccaccacaaaaagcgaattatttactagttcttttaacatatgagatgttattttttttttaaatgaaatcgcacttttattcaattagtattccgaatacataagagtctaaagatcaaagggaatattaagcccaagaatgctacgatcacctaaatatcaagcatgcctagcaacatagtggacaattcgatttgttgatcgtctaactaaacgtaattacattaaaaaaagaggacaaaagtgctctacaatcgttaacaaccaaaccaaagatagaagatattaactgagtagaacaaataacttgaacaacgagcatactatcactctcaatctcaacacctttccattgcttagttttgatccaactaaaagcttttttgatgctcattgcttctaccacttcaaataagtccctccatggtacttggctttaatgtggatagggcaagtaagatggtcatgagccacaataccaaacccatatgaattttctttctcaaataagattgcatcgacattgattttgatgttgtctatagccagttttgcccaaagctaaatttgattatctatgtttccaaggatcataaataatagagaagattaaccttaaactttcctccaataaaagagttgtagatgccgatacaataacctcatcaactgagcaagtttgtagataaaagtagaaaacaacattactttcaataaaagtaaaaacaacatgattttttatttttctgacctattctctttttggaattcaagtctaagtcctaagatctaaggttcgttcgaggtcaagattccaaagctgagtgcaaagatcaagaccgaagactgaggtctcgagcccaagtcccaatccaaggtcggagtttaccattaaatttttaaaacaacaaaaaaaaaaaaaa

SEQ ID NO: 115606 - DNA, 2820 bp, Cannabis sativa
  modified_base (2708)..(2729): a, c, t, g, unknown or other
  modified_base (2787)..(2795): a, c, t, g, unknown or other
gtaaaataaatttccaacagaaattacaccaggcgacgtgtcgccgagaatcagccatcatgtcgcctgcagtagcgtaccttatatttcatcatgtcgttaattatttttaaccttagaatcatcacacttgacctttcccggcgatgtgggattgcacaacgtacatggtatttctcttaatggatcattagactactgattctaagactgtaagcatgggattacacatttgaagaaggcttaaatggatcgataggttctacctatatcaagaagatgcatcttattttcgattgcctgtcacttgagaactccaaagttaagcctgtttgacttgaagtaatcttgagatgggtgacctcctgggaggaagcatgcaagtgaggataaagcctgctaaaaataatcatgttagtttgcagggtcagtcgtcattctaggaagcaaccaaagtgacgtacccatgtataagagccataagtccatgggatgatgcccaataaaggcttgaagtagagatgttattgttatattttgatataatattttgattgattaaataaatattacaaagttacaagtttgttactaatgagattgttaaactcgcttttagtcaacgacgatgagtaaattacagtgattggaataataaaatttgaataataaatgagcaaaataagaacatggatttgttatagaggttcggccctgtgatggtggtaatagcctacttcctatttacttgtattaacttgtgagaaaagaagcaagaggttcttgatatcttttaaaagcttttacaaagattttagcagagtaagtctttaaaataagatttttgatccctaaataataaaatggttccactatttataggaaataattacattcatttggtttcctataagaaattaagaataaaaaagaaaactaaatactttcctaaattatattattcacgcgtggaaatcccataaaaatatgaatttaattaataaataaaggaggaaagtatatttaaggctttctctgtggcatttaccttgggcgatatatgcatagtggtcatgaaattggcgctggtcggatggtacgtttaacctacacgacacttttaccttattcttcaaataagtaatatctgatggataatccattctggattgtacattgatgatggttctctctatccatgtctaaaaatgatccacgtgtcacctagagaagcgtcgtgtcaccgtgtgtagatttcaggataacattttgttagaaatattttactagaatctagatttacaaacatgtatgttggattataattctataatctaacatcgtaaatatgaatttcttaaaataatgaattaaacacataaaggtataaaaaaaactttacattgatggcagtagaataatatgactcatttcgtttaaatctctaaccattgatcctttctgttgtctagatttttgtaagcttgacacgtggaaccaaggaagctgagataataatcagctgatgagtgccttcggccctagttcccgcgagaggcttctgcgaagggtatttccctgcggggctagcacgcgtagagcttctacgttccatgacttttcccagtcccgagagcaaaagcaaagcgccctacgaaggctaagggtttcctcgagtgcgcctatgtaggttgcgaaaggacttagaatgagttatatccccgtacggtgtcacgagagagctccgcctgtacctatcagactatagaggtgacaaccatgcttttgctggtacggcgccaggtcttttcccccacgttgggccatagtacagggcatgcacgccaacttgtacctgcccaaatgatccaatgacaatttataagagcaattccataaggagaagcccttaagcaacacgtataggatgaccgaacattgagagttgacatctctgcaaactatgtgatggaacggtcacctaccaaaataacagttagatctcttctagcaagattagcccaaaaagcacgtgaatgaagagatcgcctataaatactgctacattttgcaagatagtggatgactctttgaagtctacaaaaaccattgtttatttactaaaactagagaaactatgccaaaaaaatccccataagcttcatctcctatgagaggaatgaggggaataaaggtcttgagttcatgatgtaaattcttgcagcatgtaatatttgcctaaaaggctaataatatggactcatgggctaaggatagttaatgcccaaatcatgtaaaaactgtatacctatttctaattattttagtttctttcttaagctgtagatgatcgatttccaaaaatctcagtaaatagttttgtgctttcattgagagctaagaaaagattgaaacatgcatggtctttgccatcacaaatctcaagttgtaaaaaggagaacttgtccaagaaaaggaaaagagacacagcttgactatccattgagatccagccagaagtcaaaggctcgctgtccaaaggcattattaagaatgaaggcctacatccctgtctcggcaggaagagtagagaaggtggatgtaaatagccttagagttcgcacagtacccatgcatatttggaaaaacttagatccattcggtcgaccctctgagagcgcgataagcctgttgggttttgtgccctnnnnnnnnnnnnnnnnnnnnnnatcagatttattaattaataaaagttcagaaatcacattttatgttgtatggttcacnnnnnnnnnttcatgattatgtttaatgtataaa

SEQ ID NO: 115607 - DNA, 992 bp, Cannabis sativa
  modified_base (159)..(167): a, c, t, g, unknown or other
  modified_base (255)..(264): a, c, t, g, unknown or other
ctaaaaggtccatggctaaaagtagtcacaaaaattacaatttgttgtgactaaatgtatttttaatcacaatactaattgtgactaaaattaaattagtgacaacttgtgtttaaatatgttttagtcacaaacaattttttgttgtgactaaaagtnnnnnnnnntcacaaaaaatttatgttgtaactaaaaagttgtcactaaaagtgacagatttttgtagtgaagttacatttaatcacaaaaaatttnnnnnnnnnntaaaaaattgtcactaaaagtattctttttttagtgcacccatcttacacacaatttctcttttgtttgtaatctatcaagtataaccaaccaaaaaataaatcgatgtttttgaaagctaagcctttcccacatctccttcctccaaataacttttaatagacattattaaaagctagggagtatggaaattattaattttcctagctatagctatttgtaaattgctcaatattctatattaatatattttaatctctctttctctaaactatggatcatttatattaatacctcaaataatgtgacaaggtccattaattaatcagtcgacatgaaataatataataaattgggaaaaaggtacggatgttatgatgaaaccccaacttagacattaaaatattaaagtaaaatatacaacaatattactattatgcatatatataagtgttcattataatggagtagcaaataataactctacggtgggcaaaagtctaatttttaatattttttctttgcaaaattttagaattcccagtgcccaaattaacgtgtaaacaaataacaatggttataatttggtatgtaaattaattatcctgaatttcatacaaatttcttgctatgattatactgtcataaaaaagtatatttcaaatattgccttaattaactatatatatatatatcgggccggtcttgaaaatatatgggcccaagac

SEQ ID NO: 115608 - DNA, 1709 bp, Cannabis sativa
tgtaattaatggactaaatttgtacaaattaaggaagggtataaattttgatatggcttgtattattaaggccaaaaattaaaatttccctattagaatagcagtgttacattataaggaaaattataaagactagtgttttcaaatcactacactattatatattatattgttattaaaataattaagtattatattacatattttaattcaataattattatataaaattattaactatttacactattaataattttagactatgatgataaatgtgtgccactcagacttaatagtgatgcttatatattaataatgtgacataatgccatattatatacataaatatatggtataaaacaaattattacacacaataaacaattgaataatgtgcctatttaatttcataggaaacatctcaattcaatcttgtttatttacttgcatttgttaacatgggtgaactgggaaggaagaaaagaagagggtgtgatttgagggcagatcagaaagtaagaccaatctgaaaaacacagcctcttacgttggattacgacgtatgacaagcccactcttagcctatccattattattgtacgtaattatgtatctaagacgatataatagggccgtatagggcctaaatgttagttcagtgagcccatattttaaagacctaataaaggtttgattctcttttatcaaatccactacttttgaaattcctttctccacttgatgtactacaaaatcaactagaacatacttaggtagcccatgcatgctatctctcaggggctttcttgttgagatttattataggttattactcaaaatcacttatcagtaattgatggcatttatatatatgtacgaaattcataaaaaataataaattaaataaacatataaagtgggtggacgatgacatatatagagtcataattcataaaactacattgggaagaagagtataatctcacaaaatattattattattgaaagaacaactaattaattattattattatcacagctacaatataatttttgtgttcaaataagatatataatcccttatatatgtatataaatataaaaataccatacatcatgatacatgtgggcaagagcaggcaatttttgagcaatactaaaagggtactatacttaaaatatggtgcagatgaagaacaatctatatatctttttctgataaagcaaaagtgctcaatttcatactcaatctaatagctcatcaagaaaacaaggaaaggtgtaaggaaggagtaagactaattaagtatgaaaaaaaaaagttataaaaatacttataaagcacttaaaggacgaccacagactgtaaggagtaagcttaagtatttcttgaaaaatttacaaaaatatgtttaacacagagaaattatcattttactcgttgaaattttttatttacaaaaatatgtttttattaaaaataataaatcgtttttttggttgttttatttatagttgttatgaagtcatttttctggttgtttttttttttttttgttttataatttatttacagttgatttatagttatattgaggtttttttttgaaataattataaggcactattttttataaaatatttacatttttacgttcaaagaatgttgtttttacatttttatgattttccaaaaaataacacga

SEQ ID NO: 115609 - DNA, 1113 bp, Cannabis sativa
aatcacaattaactgataatttccaaattaactaagcgggctttacagatatatttcatagtatttaatatttagcaagaaaaatggcttgaatcttcatctatgaaaaaaaaaaatcaatagttttcataaaagacaaatcgatcctaatcttttttttttaagaaaaataatattattattactgttcttatttagttggtttttccggtttctttttctttcgttattttgagctacaaattatagtgaattgtttaatcagagtatctcaaatcactaataaagtggacctgtttgtgagccaagtgggagtgtgtgtctttacaatgcaagtggattctgatgcaaaaggaccttaggctggctttagatgctatgctatacatatcttttctccttatccttacttttaagtaccatgaactcacttttacaccaattaaaaaagattcacacttttgttttttcaaaaaagtagaattaaagaaatcattccaagcaaagaatccaaaaaactttactgatctaaaataaaattcaatgcttgtattatctgtttctctattatataaaaagcagaacacatcatatatatatgcctttatttttgaagtttgagcccttctgtctttctgtttctcagaagtagaatcaagatagaaagaaaaaaatataattagtgatgtactatttcctccattattatatatccagtagagcacgaatagtactagttagtagttactagtaaaaagcttgtttcaaatagaataattgttataattaattgcaagtataaataaatatatatgtataaagaagaacaagcaaaatttgcaaatgtagcaaagctatagtatatgtgggcattagagcatcaccaacgacacggcatgctttgtttagtgatgaattcttattcaaggagactgcatatatatatatcttgaatttgcagtggatactacagtctactgtatataccgtacagtgtaacacacgatatatatatatatatgactaattaacatttttgcctttgaattttgacatgtatcaaatcatgccccctgaacttttaaggttgttaaaaatgtcccctgaactatt

SEQ ID NO: 115610 - DNA, 2331 bp, Cannabis sativa
  modified_base (50)..(53): a, c, t, g, unknown or other
tctcttaattttgctacaaaatcaacaaatcattagtaacaaataataannnnatatttgttaatcatcaaaacaaggagacctataagttttagttaacagaggtttctatggagatcacacttccgaaccaagcctataaaaaaagattctttgttaagggtatttttggccaatggtgaagaaagattgtgttgagaacgtccagaagtgtgaacagtgtcagagatatgcaaaggttccacgtgcaccgtcaactgagatcactttgatgagtagcccttggccttttgcggtatgggaattgacctagtgggattattgccaaccagaaaaggaggagtgaaatacgcaatagtttttgttgattacttcaccaaatgggtagaggctgaaccaatgaacattgtcacctccgagaaagccttggactttgttatcaagaacatcgtatgtgatttttggactccacacaaaattgtatctgctagtgagaagcaatttgatagtgtacattttagggatttctgtgtccaacacagaatcatcaaaagcttctcaactgtggcaagaacacacgctaacagacaagtggaggccattaacaaaattctaaaaaccacgttggagaagaaagttcaagcttgtaaagcccattggccaaaggagcttctacgaatcctttgggcatacagaaccacagattgaacttcaatggggcacacaccatacttgatgacttacagatgtgaggtagtcatcccagtagaaaacactatcatttctcataggcgagatacttatatctaacccaaaatcacactatgcttcaagaatctctagatttgatcgaagttcttcgggaacaattgcatgtccaacttaaaatgcaccaagtcaagatccccagccactttaattacaaagtgaaaagctgaacgtttgaggttagagatctcgtctgaagaagagtgttcccagctttgcaagaactgagactagggatgttaggaaaaatggggggaccttatgaaatccaacaacagtgggaaacaaaacttatcaactaaaaatgatggacggattagaaatcccacgtgcttggaatgcggaccacctatgtcaatattaccaatgagctaggggtgtccgtgtctagatgctcatttggttaaattgtactttttgtaattttctcttcttattgtacgcctaaaggcataatgaaatgaaaatagaagaaatttacaaaagattacatttttgtttgcagctttaggctgtattttaaacaagtgactaggaatttagagacgtctaaaattcccagctcacttgggggtagtatatccagctacgtgttctcaaaaatgtatagtgcccttttatcattttgactttggctatttaaattttttagtttctttaaaattataggaaggaagacatcacctaaattttaatgcatttttagtctgaatctcgtagcattttcagcccattttcttaccatgtttaaagtgaaccttttaaagtcctttggagaaagggagagtagaaagctttgcctggaatctttaacgttttcagctgatttcttaccatattctaaaaaagacaaatttatttgtgcaccaagtcaacttgaatttcgacgcactttcagccttttttcttctcaaaaaacattgcctgaatttcgttgcatattcaacttttttgcttaaatagtttaaattaacaaaccttggtgtgtgcaaatctatattcgtttgagtgcaaaaaaaaaaaaaagatatgactggaacatggaagcttagtatttcgtgagaatttcactttattaaggtatgtaaatttaatagtttgcttaagcaattattctaaaaagtattaaaaaggagttaagcttcgcgatccttcaacaatttgggaacaaacttaaagtccttttgcgttacttaaaaattgaatggcttaagtttatatgtgccatgaaaatgtctttaatgattcaaaacattgatgtctagaagtaggactcgcttccaaaaatttccaaagctcaacagacgactttgaattggccctaaggaaaagtttaaggctcaaagttctggccattggaacgagaaactctaagcaacctaaaaatgacctaccaaatggcctaataaactagcaaaaaagtgaaggctaacatagaatataagtaaaggcagaatggaaatgtcttaagctattacgtacaggcctaactgccccgacatgtacaatcctcatctgctctctctcacggctgctcaaccttagccttgcctttacctacac

SEQ ID NO: 115611 - DNA, 1637 bp, Cannabis sativa
tttccaaaacaagatgtgttgtgttgattgatgcattttaacttctcaattaggtcccacaataagacatgacccattaaccacataggctatgaatttctctatgtctgtctgcgtatataatgtatatatataataatatatatacgtggcaggcagagtagtaatttgaatatcataatgtaaaaaaaaaaaagctttattctttaattggcacaacagaagcaattcacggcacccaaaaactattcttgcactccaacagcatcttcttctccaagcattaccaacataaaatccaaattacaattgttccatggggacccctttccttttttccttttctttcctctatttttgtgattttataatatcaaaaaggctttaaatttaaaataataaaataaataaaaggattgctatccaaggaaaaaggtgacaaaggcatgcatgtatagtaccatttttttatgtgcatgaaaaaaattagagactctgactggtgtgtgtgtgtagtgactggtgaagtgagagaaaaccaacaatctggtctgagagaagggacatagacatagtaacatatatgtgtatatatataacaccacctctcatcaacattgccccattttaacctttatctctcttaatggtttttctctcttcaaagagaaaataataaagaagcaaggcatctctttctctcataagctaccacttcttctggtatagacccttttctttgcttggacttggggttaatctgcttcttttttattagttttcaaacatttattgagacataataaaaatgtttatttattttagtatacatgtataatattttttttttgttctgtctgtgtgtgaaaatagaccctctaaagtttggaatccatgcttggcttcttcaatggaatgaaataagtcatgttgggttttgttgttttcagcttttcattcagatccatatcttttctgaaactcttttatatcaactttgaaagatatgaaaaaccccattactcattagaccttctttttcaacctcctcttaaataatgttggcttgtttttacatcataagtagatttggtggcactttgttcagattgtattaactgggttttgaaaaatttatgaatatcagattatagttttggttgttggtttaagcatttagagctttacttttgcaaacaagttaatctttacaactttattcttataatttctgctctgttgggtcattttcatgttcatggacttttaaagctgtactattttttttatttattttcaaaatctattctgccttaattttcccttcttttttggttaatcagatttttttaaaaggattttaattttcatattgaaaaggcttcattataattatttcatgtttctgggttttctaattgtcatttatttcttatactgataatataaactaatcatcttttctcagggaaaaaagaaactcaaaacatttgtgcattgttttctattctttcattctttaagcttaaatttcttcattttttattctcctttgaaacttctgagcaaagtgccaatcaaatttatcacagattgtagaactgaaagaacaacaattaaaaggagttaaaaagaaa

SEQ ID NO: 115612 - DNA, 1791 bp, Cannabis sativa
  modified_base (60)..(68): a, c, t, g, unknown or other
  modified_base (115)..(119): a, c, t, g, unknown or other
aaatttcactatatgtcataaaaatgcattcagaattcaaatataacaacataaataatnnnnnnnnnatctataaataattttcataactaaatcttaattaactgctaatttnnnnnttaaactaagcggtctttacatacgttgtcttcaggattatctctatcacggccaccagttttgttttgggttagtacaaaagttgtagtatacaacttttgatggtagcactgctttttctagctctcaatgaaagtactaaaatatttaccgagatttttaaaccgatttattatatgtcaaagctaaaaaaattaatcaaagataaagaatataataacaaggatttttacattggttgaggcgttaatgagccttagtacacgagtcaatattattactttagagctagaaaaccttaaggtttacaataatgaacgaactcgatattttgccaaagcaattgaggagtgagtttctaacccttttcatgaagggttcttcgtgtatttatagtgtgtagggttcatactcgttactcttttcccactaatctaatatttacaaataacatattgactttaggcttatttgaggcgcttagtgtatactgatgtggatgccacatcacgttgacagttgcctaaaaccgtgtcttatcttcatggagaataaaaacacattaaatgcttgattgctaattaccatctttctatatttaggaagatatgatcatcgggcaaaattcttgggagttaatctctaataccttgggatttcgtaatcaataagagtacttttgagttggtcatatagatactcactgtttgcttctcccgaatgcgttgtctaatatcttccaaaaatatgccatgttggatgggtctttcacctaggtgagccttttacttattcggaaggactaattgcctgcgggtcaagcccaacatttcatttgggtctggtgttaggcctagagtatttaaactatgtttgttgtaggatttccatgtgtccctatccagaaaaatggataacaattataaataaaattaaccttgatattttgctaacaaaatgaacactatgtctgctttgtctatgtttttgatgaaaaaattaaactcataagaagttatagaaattattttaccaagctaatgaactagtataataagattatgcaagttatgcatcaaaagagtttactcggtcactaaaaatattataagaattcaaaccgtgtccaataaactcgaccccaacacagactccaagtcgggttcgagtgcggggtccgggattcggggttcaagtccgggatctcgactctgagattcggggtccagggtctagtctgggtcctgagtcccagtctcgggtcgggttctaggtctgggttaggtttcaaggttgggtcttgagatcgggtccggggttcagtccaggatccgagtctggagttcggtccgggtcgggtctcaggtctaggtcgggtcccggtcccggtccctggatccgagttagaaattggagttaactacgtatcttttgtaagtattataatataagctaatacagaccatttgttatgtgttaaataatacaacttacatcatattaaaaaattttgtcatacccaaacataatattatttattattttatataatacgactcttataccaacttatcaaacgaatccttaataatttatagggttatttgcggcataacctccttaagtggtcagggttttgcaattaatccccaattctaaaatttttgcggt

SEQ ID NO: 115613 - DNA, 1793 bp, Cannabis sativa
agaaaaggtaaaaaagttgctttaaccgtgtgtaggtttatatgtaataaagtgtgtaatttgtatttttggtgtaaaaatttcaaaaaaaaaatcaaaaaatccattttttttcttcttataatatattaatatttaatagtagcatctataaatagttggccaaaacacacgctagaaaataagaaaataaaaatcaaatcaaagaaccaaactaaaaataaaaaaaaaaatatttttttattggatatgtgttatgtgatgtgattgattatatgagttagactttttttccttcttaaaaaagtttggtaatcactcaatataatttgatatttatttatgattattttatatcaaactacttaaaataaagtgtacataaattcatattgatttgataaacaactaattagaattttcattttggtatcttaaattattcaattttatctttctatacatttacaataaattactttatgactatgaattagagtaatttacagtataaatatttaagtttaattctcagttacagataaatacttaaatttaatttttgacgataataatacttaaattagaacttctgttagtacctagctaatgtcaaatcattattcacgtgtcatttttattagtatatttaaatattttttttaaaataaaaataaaaatttaatgacttggaccaatcaaggactgacaagcaacaatttacttaatacttaacggttaattacctgcagaagttttaaaattataacttatgtattattaccgtaaatattaaacttagttattaatttgcaaccaaagttaaacttaagtatttatgcagcaaatttattttagacattatactatttctgttttttttttttttaaaaaaaaacactaaattccacatttatccctagtgattaagagagaggtggccaagggtagaaaaactcccaaagggtagtttggtcatttaaggcataaatgccttcaatggagacgagccaagcacaacgagtctcacatcgactccggtctcttccgaaagaataagcatcaaactcataactcctcactctttcccatcccaaaacgcagaaatataatgtcgtttcccaaacattgggcgagaactcccacttaaacgactcgtcgtttgatatgctatgctctcccaaatcatcatcttttgattggcaatgcacacttaaattcttaccaatccccaatttattatctatgcttgcctccacttttttggctgagactacccaataataagttgggctccataacatcatcatcatcaacaacaatttttttaccatttttttttatttatataccataaatgaatgatatagtagaagtagtgcttgtaaatagtaatatatgtagtatttaaagaagacaactcattattgttgtgattaaattaatgtttcggaataatcttacattttgtacatttgttacaattaaacatagtaatatattccatgtatatgctatttgcattgtattaatctacaattagtccaatgtccattgagttgttttggcattttttcttgtcatggtcttctttcctatttattattattaattcaattatatagactagatcatatcgataaatcaagagcataaattagtattttttttttagatacagaaaacataagggaaattttattatttgcccttaataatataacctatatcaaaatttatacccttttataatttgtacaaatttattcctctaattttaaaagattcctaaa

SEQ ID NO: 115614 - DNA, 6199 bp, Cannabis sativa
agtttcttgtattttctgttaattagttgtaaagtttgttttaatgtgtaacaactttttctcttttttgtactgtttcattggtatataaataaaacattggtgccctgttttcgggtaagccattacagatatttttcattctgctggctctctctttttacagctcatagcttttctctctcactggtctttaccactcttcatggtcattaccttcttcatggtatcatcgtctttgactagcgtcaatggaatcttccacctccgatcctcgggcaacaatggctcccgctgctcctcctgctttcgccgttcactggaatccgttctctaattcgttgacgtcttccctcaccatcaaacttgaccgaatcaactatctctcatggaaatcacaagttgtccccactgttataggacatgatcttgatcagatcttgttctcagatgtaacaccaaccccaactctcatcaatggagctcccaatcccgagtacctgcactggaaaaagaaggaccacctcctcctttcttggattcgatcctctatgtctgaaccgatcctcgcttctgtagccacattcaccacttcatcttcggtttggagggctcttgaaaaaagattttcaagccaaaccaaggctcgactcctacaactcaaaggtaatttctcaagacttcaaaaaggaaatttacctattgctgaatatgtgaaaaaggctcaagctactgccgatgcactagcaatcgctggctcacccgtttctactcaagatttggttctccaactcttgaatggtcttggacctaattttgacccagtggtttcgggcatcacttctcgaagtgacaatctttcatttgaggaagtccaagccttgttactttctcatgaaacaaggttagaacatcatagcactttcacagatttttcactcaagatgcaggccaatctgagtgtaaaccagtcaagaaatggtgggaatcacagttctggtgcctcttcttttcgtcctcacaacaatgaaactggtcgttctcaagggcgcttctatggacgtggaaatggctccaaactgctgtgtcaagtgtgccttcgcattggtcatacagcggctgtttgtcactaccgctttgataagaatttcatcacccccaagtatggtagttcctcttcttcccaagcttttttaactgaaattgactctacctatgatccacaggctttaaccacaactatgcttcctgacatgggagacgatgacctttggtatgtggatactggtgccactaatcatgtcagccatggcaatgttcatcttgacactgctattccatactagggcactgagaccctagccgtgggcaatggtaagcaattactcatatcccatattggtcagttatctatcccctctagtccttcctcttccttacatttgcaaaatattttacatgtccctgctattaagaagaacctagttagtgtttctcaactcaccactgacaatgatgtctttcttgaattccataaatcttgttgttttgttaatgacaagctaacagggacagtgcttcttaaaggaagggctaaagatggtttataccaacttggagagtcatcaaactcggccattcaatgtcatcttgctacaagctctaggttagatacttcttgttgtacttgttcttgtatgtgtcattcaaatgtacaaaataattcttgtaactctcaagaaattaataaaagtacacaagatatttttgatgtttctcctcaagcttattctgtgtccaaatttaatgatgttaatagttggcatttaaaattgggacaccctgctgataataccttggccaaacttttacctcacatttctcatacagggtctattaaagcattacaattttgcaatgcttgtcatcaaggcaagagccataaattgcctttttctttatccaccagtagggtcacccaacctctagctcttatacacactgatttgtggggtccttcccatgttgtgtccaaagatggtttcaaatactatgtttattttcttgatgattatagtagatactgttggatttttcccttaactcaaaaaaatcatgcctttgatgtctttatcaagtttaaaagtcttgtggaaaaacaatttaatctacctattaaaagtgtccaagctgactggggtggtgaatatagaccatttgctcgtttcctatctgaccaaaggatccattttcaacatccttgtcctagaacaagtgaacaaaatggccgtgccgagcgtaaacacagacacatcactgaaaccgggcttacattgttagctcatgcagggttgagtatggaatattggtggtttgccatggcatgtgcggttttcaccattaatagacttcccacaccagttattggtaatataagtccttatgattgtctttttggtgctaaaccagattacactattttaaagtcttttgagtgcagctgctttcctcacttaagaccatataatactcacaagcttgaattgaggtctcaggagtgcatctttttgggttattcatctcatcacaaagggtatttatgtgaacacccatctggcagggtatatatctcacgaaatgtcaccttcaatgaaggccatttcccagctttatcccactcaccaaaggcaacatccaatcaggtatgtcctttgactccacatcctacttttacttttcaaacaactaatattggttcatatgctaataatggtattgtttcctctctctcatctcatcaacacacggcaaatgagggaaatgacaacaccataccacaaggaccaactattaccactattccacctgcccctcccatacaccttaccccacggcctataacacctactgtcccacaaaatgccaacctagacactactcccaatgttatacttttatcccatacatctatcaatccattaaataattccataaacccggcccctttgtcctcatttcctgcacacagtacccttaacccaattcaacactcctctccaacagctagtactgttccattgcaggaaacataacacacatcagccccattacccaacatgcctcatattgtccatactgatacccctctcactgagaccacaactttaaggactcaccctatgcaaacaagatctctaagtggcataagaaaacccaaagctttcaatgctaccaaataccctctacccgagtccctcattccatctgagccaaagaacactacagctgctatcaacaatccaaagtggtttaaagctatgaatcaagagtttgatgctctcaaaaaggcaggtacatggtctttggttccttattcaccacatatgacagtgattgggaacaaatggattcacaaagtgaaacttgatgcatatggaaaccttgatagactaaaatcaaggcttgttgctaagggatatttgcaaactcaagggatagattatgaggacacattctctccggttgtcaaaccagccactgtgagaattattctcactctagctgtgtctcttcattggcatgtcaagcaattggatgtctccaatgcatttttaaatggtgaacttcatgaggttgtttatatgagtcaacctgaaggctttgttgatcctaacaaacctactcatgtgtgtcaacttcacaaggcactctatggattaaagcaagcacctcgtgcatggaatcaaacacttcgagataagcttctggaatggggttttagtgcatccaaatccgacacctccttgttcatctatggttcgggtaacaccactatcattctccttgtctatgttgatgactttttagtgactggccctaatgtttctctcatctccaagctaatttctgatctcaacaagtccttctctttaaaggacttaggaccggttcattatttccttggtgtagagattcatcgagaccatccaggaatgtatttgtcacaaacaaagtacatcacggatttacttgttcgtctcaacatggaaggagctaaaccttgctctaaccctacaagttcatctctaaagctctctcttactgaaggagaaccttttagtgatcatacactttacagaagtacattgggtgccttacaatacctcactctcacaagacctgatgtagcattcatcattaataaacttagccagtttattcatgctcttacaactctccattgggaagcctgcaagcggcttatgcgatatctcaaaggcaccattcatcatggtctgcatctcacaccagccccctccttaactctggaaggatattcggatgctgattgggcatcatgtattgatgacagaagaagtactgagggttatgtgatgttttttgggggtaatcttgtgtcttggtctgccaagaaacaacaggttgtggctcggtccagtagtgaaagtgagtttagagctttagccaatgccgctgctgaaatcaagtggttagtttcacttctttcagagttacacattacttcttctcaatgtctgatattatgggttgacaaccagagtgcagccgctattgtagcaaatcctgttttccatgcacgttccaaacacattgagatagacttacactttgttagagacctcatactctctaaacagctatccgttcggtatgtcccagctatagaccaagttgcagatgccttaacaaagccactgtcaacagatcggtttctctatcttcggtccaaactcaagatgtgtgacactccttttcgtttgaggggggatgttaaccaattaataatttcttagcagttgtctttttctgttaattagtttcttgtattttctgttaattggttgtaaagtttgttttactgtgtaacaactttttcccttttttgtactgtttcattggtctataaataaaacattggtgccctgttttcgggtaagccattacagatatttttcattctactggctctctctttttacagctcatagcttttctctctcactggtctttaccactcttcatggtcattaccttcttcaatatataattaaatcaaatgtatatagacctacaaatattaaatgtagtataataaatactttgaagttaaattttaataaaatattttaaaaaataacaatacactatatttataactgtcgagtgattttgtgaaaaagaaattcttctattttacaatgttaatataaataacttttgcattagtattttttttccttacaatatttatatttttgaacgaccaaattagttagtaaagaaagtcaaatttaaattaaagttgtatcacaagttattttacaatatttaaccccatgggtgaatttgttattcttgaatagtaagacaagtaatttaatttgatttattgtatagaaagttttgttatgaccgtataaaacataattagtcaacaaaaaagttaggccatataacaacttcacctaaatcctaaaactcactccaatcaaaaaattgcatctcatttcttttttaaaccccaaatctgacagttctcaatacttagacacaccaccaacaccaaataaaaaaattcttaacaaatatgttattaattttcattcaattttgtaagacaagcaacaagaactaaactacaataaaagaaaaataaaagtttaagatcaaagtcaaagtaagacagataaatggtgacggaaccgctggcgcacggaaatagtatagagcgcgaagtagagaatcgatcacaccaaacaagcttagctaaagaaaagaaagcgttgtagttgaagcgtttggtccaagatggtggtggttaggtaggtactaccgcatgtgtccagtcagctaaatgcatttatgtcccgtttaacaatatatttcatacttgtccatttttcccacacaaattataaaattatttttatagttttattttagaatagttaagatttttgctcaattcttcgaaaattatttagatagttggatttaattttttttttttgtctaatttcattcaattgtattaatatgacgattgtttatatactaaatcgtgaccttaaattttgatatttacaatattatctccttgaattttaacatgcatcaaattatgttctttaaattttcatttacatcatattttttt

SEQ ID NO: 115615 - DNA, 1945 bp, Cannabis sativa
atgatttaaatattagtaaatatgttattaaaatgtatgagtttttataattaaatttttttgcacattttttgtaatatattaatttttgttgtacattaatgaaaaaaccccttaaagaattttaggggcgtaacttttgcccctactattgggatgttttttattttcggcatctaaaaaaattttatttagttattgtcatatgatgatgcaaattatatagttatagtaggtttttatattcgttttttaaaaaattctaaataatttacgataatatttgaataaaacaaatacgcgtgcaactaattatttaaattgtatttttagtatcttaaattatttaaaatttctcgaaaaaatagacaaaatacttactataactataatatataatatatttcatcatataaaatataattcataatttccctaaaaaatttccaatttattattccaataataaatgcataggagtcttacatattattaagtaattaatttgtttatatatattttaagtgtagattatgtcaaacaagtgtgttagaattagataagcatgtgatgtggaatgaatatcctcctcatcatatcatacatataaatataaatatattcatgcatattccactttgattcattcaacaaattttaacattaatcatcactatacacacatacttaactcaaaatgtaaaacttcttttttaaaaaataaaataaaataaaaatacactaatttaattattatcaaattcaattttatacctaaaacgaattgccacaaatttgttgcccgacctttaaatgttaggaaatcttaattttagcttttccacctttgaaacactataaagctacactattaatttaagccccttcaattttattttataacttaaacttgtaatttggtcgtttctttaatataatacttattattttatttgtttaaaacgtcacaattttttttaaaatatatttttcttcataaatagtaaatagtgatagaagatttgaaatagtgtatatttttagtttaatttagtgtacgtgtcaattttttccccaactatactctcttgacctttgggttggagtaatcgtttttcttttctaaaaaaatagttttatgtattaataaattatacttaattaatacaattgtatgtgttaagattagattgttcttcatttatactagtaataaatatcattttagatcaaatttaaaaaaaaaaatatttagtatttctctttttataaatgacaatatggattctgtattcataaaaaacaacctaacacttagaattccatagcattgttaaactattttgtatcctattcctataactttatagtttttttttattatatataaatttttgtagtaatttaacatttaatctagttataaaacaaaatatttgaattgttatttaaaaagatagattgttaaattataatttatagtatcatttaataaattaaaaaatacactctctcaaaaaaaaaattacattatttaatttttataattgttttcttctttggtgatctaaacatattactaattgtggcttccacaatccagttgaatttttatatataaataaataaacaaaagtaaattataggggaccacacaaaaataagactatgacaaaaatccctacaattgggaatatgaacccaaaaacccaattttatatttaattattatattttgaacaaagcaaagctacttattaaatttggtaaagtctcatcatacgtgtgttttgatacattatatttagactttcatacaacatttatttttttaatttttttttttttgaaagaaattttattaagaaatagcctcagccattacaatgttcttcagaaaagaaggagcattcagctcatcaaacaaacaacctgacaaagaaca

SEQ ID NO: 115616 - DNA, 1832 bp, Cannabis sativa
gacccgttttgccggtcttagtataaatacagtggtttaaagttttgatttttgtgttaattggagtatgaaaataactattgtattttatgtgagcattacgctctttctgggctcataaaccatttcataatacttttatttgactaagatcgatattgtatgttgggtataaagtttgatgcttttttggagctcaaaatttagtttttttgggtttctaacctaggagtcatggcattgttcttggaagtcgcgacccgatactttcagcaaagccagaattatataaaaacttgttttggtcataaattttgactctaattctattttggacgttcttcatactattagaaagctgttgaagagctctatcattggtccagtttatgagcctgaattatttctaaatactttatgtgattgtggattaatcctatcgtattcgtacctagatttctattaagactaccgccacttgattgagattgtctgtgtctgtgagtttgaattcttcacttatactaaaattttggtaagaaagtgtaccctcagttagaacttagcgttgttgcgcctttatatgctatgtaattagcttgatagaagcatgtatcagagttaatactttaaagtttctattctatatattttaatatactaaattgtgtaaatatatattaagagttatgtcaacaaaaacataattagattatgcctgataaataatatcagaataaaccgttatacttaagagtataatgtataaattatatatgtaaaaagttgtgtataaaaccataactaagttacactcgctttctagaaccgaggtagaccatgtaatataaatatttataaaagtgaaaacaagataaaatgatatcattgacatgaaacaagcaaactagctatatttaaatcaagtacatagtaaaccattacatgttcttgctacagctagctaggtaggtaataaaaatgacaaaatattaataataaataaagctttattacctttgataatgttgtaatacatgatttgttgatttgaagtcattttggaaaaagaatgtggaatgtagtgtatcacgaaggacaggaaagataagatagaaaaacaaagctattggaagaagttgaagagaagagtatataattggtagccttaatgaagcattgtgtaaaaaagaggaaaaacaaaatgagagcatcatggaagtgacagagatgaaaagcaaagagagtccaactacaaatgtccatggcaatctcctaaccaattctttctcagtgaaacgtgatatcattatggacaagaatagcaatatggctgttgatgaaaatgacatggctatggcatttgttatagttagaagtgtcatagagatcattgtatggtggtcactactatgactaataatactcttgctatgtctaatactattataactaccttgatctaggatatcgaaagccgttggaaatgtaaccgttagaataattgttgcgacaattagacaagtatttgaatttttcttcatccatttttcggtatcattcatcatttcggtatgttcttcgatgaaaatatctttcggtgtttgatgaaatatgtttcttttgtttcttagcgaaggcgctaagatcttttccacctcctatatcaaaagatatttgagtgtgtaacatgatcatatattatataactacaagtaataaatcattatgtatagaaatgttataaacaaaacacaaacattttttgtaaaatatttatatttttacgttcaaagaatatttttttacatttttacggttttccaaaaaat

SEQ ID NO: 115617 - DNA, 821 bp, Cannabis sativa
  modified_base (764)..(774): a, c, t, g, unknown or other
gggcataaaacccaacagtcctttggccaatagtgtttactctatctttggttttagcctccatttctttcagttttttgtcatgattggcctggagggacttgagaaaatccttaagttctttgaccttctttttgtcagccaaatgctgcttttctactcctcctttgtgtgagaaatctcggccaccgagtcattccacttcttggcttaggtatccctaagctccctgatttggcgaagcttagtctcgagcatttcaactcgctgagacaaccgttgatgggtaacattggagagaagagaagcctgcaaggagatggccactcaaagttagtaaaaatgataaaatgataaaatgtgggaactagaagaaaaggaaattaaattgctgcaaaagttcgcccaacccaagagtcataatgttgcaccaaccattggcagcatgcttcgagtagagttgcgagccttcagtcccaaccttgtggataggcgataggagggttccagaagaaccatctctagatttgaaccacatagtttcacctagtgtactgatccggttggttgctccttggcattctccacagcagagacctcattcctcttctctggggactttactagctccatggtaagctaatttgaggacttcttcttgttgttagtatttttggtccttttgggttctttggtagaacccgaggcctcaccagcttgagcaacttgttggcttttgcgccctaaataaaattcatttcaannnnnnnnnnnttacttattaataaagatcagatttaacattttatgttgcatggttc

SEQ ID NO: 115618 - DNA, 3687 bp, Cannabis sativa
ttgtattttttttttgttatttttgtgtatgtgaaataataccaaaaaaaattctaattggtttagggtcttggtacctaaaacttcggggctttaaaatgttgggccagaaaaaaaaaagaagtttctagcccaagcatgatactgggccgggctgggcccagagctcagagagcataattagggtcaacccggataacagaaatcgggtttagctccgaataaaaaagagctgaaccaaaacggggaaggaaaatctgaccagtgagatcgccggagtacgaaacaggcaagaaacccactcgattccaagtattatccacttcaatccactccatagattcaggtattttcttcgaaattcttaatcgcttctttttccaagtttttcattacatttcgttcgctgttttttattatttttttttttagaatttttagggctagggtaagggaatttagtgttcttgcaaatgattagtaggtggtgaaaattgatggtgttttgggattagataacactgtggatttgaagatttttaattttttagaatttggaatttggaatttgaattggattttgtgtgaaatgcagagtgagatttaagaagaaatgggattgagggcggtgaactgatgtcattgttctggattgtgattcgtcaacttgcagagatcgaagaaatggtaaattttaattaggttctgtttgttttaattttggacttgattttcttgtttaagattattaaaccaaactaagaaaaataagaagaagaatgatgtaatgataccctcattttggtttgattgagtttgagtgtcaaactttgactttcaaacttagaatttccatggcaaggaattgaagtagtttgagttcagttactgatgattagtttagttctattgaggctctctacctatgtgtttgttgaaccgagcaatgatatgtgaacacataaatcagtaatttactaattttaaccgatcatctttatttaagatgagtctcactcgttaaaagtgacttgcttatacacatacatgtgtgtgtttgattgagtatgtttcttttctttcaaattacttgtttataggctacgtcgaagaaagtgattactagggaagagtgggagaagaagctcaatgatgtaaggattaggaaagaagacatgaataggttggtgatgaattttcttgtcactgaagggtatgttgatgctgctgagaaatttcgggcagaatctggaactgaacgtatcctttattttatgtctttgtttttgttgtgaaatgtaatcattgggagggaactagaaattttgctttgattatatggtatttggatggaatggattttgtgtttctccttatgaagaaatagcagatatagatcttgcaacgattactgatcgaatggctgttaagaaggctgtacaatgtggcaatgttgaggatgctattgagaaagtgaatgatctaaatccagaggtaataagattgttcttgtttttgcaacctttcaaactcttcttctttttttgtatttgtctcaggttgatgattgtaacataaagataactatatttttcactccttacttcaaattcttgttctctttgcaaaaaggttacactgagagcaaccattgttttcatatttcactaaatttttggatatctccaaaattttgtgtgcagatattggatacaaatccccagttgtttttccatcttcaacagcaaaggttaatcgaactaatcagaaatggaaaagtcgaagaggctctcgagtttgctcaggaagagttagcaccaaggggggaagaaaatgtaagatttcacattctataaaatatgttaagtgaataccaatgtcattctttttcaataggaagttctatctggatttggtggtcttcagccgtatttactcacctgaagctcagtgccaataaaaaataactgtgcaagaatagttttgttttcatgagaagcttttatgattgtattcctatgtatccgccattagtcttaagacatggcgaaagtaacatccgatttttatctattgtctttaacagcaaagctttttagaagagttggagaaaacggtcgctcttctagcttttgaagatgtctcaaactgtcccgttggtgagcttttgaacatatcgcagcgcctcaagacagcaagcgaagtaaatgcagccatcctaactagccagagtcatgaaaaaggttggtatctctgttcttctaattatctttgacatcgcaaattaattggagaatgtatgtatttggttgcatgagatgttaagttgattatcattatatataaaaactaaaaaggaagtaacatttagtcaccaagatgtaatgaatatccttaagtgtaaatatgtattatatttcacataaagtttgtcattgtgactaaaagtactttattacagatctcaaggactctaatgcgcatgcacatacacacacacaaaaaaagcaaaacccaaataaataaagagattattagccctattgacattagagatataatttcataatttaattgtattggaagttggtctcttgtgttttataatataggcttgccatgcctatggtagagtaattttcacttaagtgaaacttaaaagtctttagatctcgctaacagtaacaccacctcatccgttccacgtaatttagtttagtatagaatatcagtaaccaaccacaagcgccaccactggtacctaataagaatgctattaaattttgtgtgtttgatatgtgattatgataaaactttatttcttctgataagagttttctttttcttttcgaaacaaacagatcctaagcttccaagtttgttgaagatgcttatatgggcacagaatcagcttgatgagaaagcagcatatcctaggataaacgatttatccaaagccacattagaagacccttcagtttgattaaaaagaaagaactcaacttgttgttgttatgatgatgatgatgatgatgattgattgaattgatatgagatacttttgagtttccaaattcatgtatgtaccttaattgatgaaaatgaaaatgaaaaagaaaaaaaagtgactcttgtctctgattttcctcttgaatgtaacatcactattttcatgtcatttctcttctttatctattttcattaacaataaatagaaaagaaaagaaatattagagagaaaacattggaaggaagagaagaaaatcataactaaactaactacaaaagagaatcttcaacttaatttcttcccatatatatatatcactctttcacttactcacactcacatttgatccaaagaacataaacccattgaatgtttttgatatcagaagatgaagaagaaccatcatcaaagttaagagcatagctagaagggtcatactgaaatgagaaatgtcttttggagccattattcttggtagctttcttcaatgcagctttcagtctaaaaaagaggctcttcaaactcaactgctgaagcttcttcttcttcttactgtttacattattaaaccagaacaaatttccaacataacccattttttcatatgagagctttagaagctaaaatccccaactgagttgacaaatgggtgttgactgagagagagagagagagag

SEQ ID NO: 115619 - DNA, 4591 bp, Cannabis sativa
  modified_base (4545)..(4548): a, c, t, g, unknown or other
gatacaagagttagagatctgagtagaaggagtcatttaattctgctacaaccaatgtaaggtgtctcataccttttatgtgttgaattttatatcgtattagaagttcatatttaggatgttaaaaacatactttttagtaaatctaggtcctggtaaaataaattccaacacaactatcatatttttaatttgtacttcaacgaccatgggattgttgtgagaatagatgatgtggtcagagtcttcttcactgaatgaaatgattggttcttgtttgtgtggctactttggttttctttcttccacaactagtatttcatctttcttcttgtagtattgggtcttagcatacctttctctaggttttttcaagtctccagcaatatgaggacctccaatgataacttgtatatgtatgtccactagtggaggcattaactgttttgattattatctagttggggggcccgttggtcctagtcagccttaatgtacattcgtatgtacgagttgtttttcctgatgagtaattatatttcttcttttaggttattgcactcattggtatcatggccgtagtgtgcatgaaagcaacaacatttggtggtatccctctttctcatatctttcttgattggagggagtcttttgtacgacaccacagattgagttgtcgtgaagataatttctatttcttcagtaaggacagtaaagtaagtgaacttcagaactttctcttgaggatgttgttgctcaaagttattattgaatttgcctttattcccattgccttgatgatttccattaatcgacctttttccactttgacacaaattgttattgttttgaggttgggagtttagattgtgctggatagacatattgacagcagtggtgtgaccttggttctttttctaaccaactgtgtctacacgccaaactatttcttgaagctttataaatccatctactcagtctaaaactctcccattgaccccacagcgagccttttaaaagctttccataattctctcaaaggatcaattcctcctaggatggcaggcagtcttccttcctcggtttgtcttttcacttttatagcatcgatcataaacctactgatgtagtctctcaaaggcttccctagtatttgtttcacttcaaccagatcctctaagtgagctatgagtttccttgaagaggaaaaatataaatgaaacttcgccatgaaaggattccatgaacttaactatcctggggctaacttgaagtaccactgctgggcggcctccgccaaggtaattggaaagattctacactatacattacctttcaccgcctccaagtccattttcatttcaaagtacttgatgtgggatagaggatcttctttgcccgtatacatcttccatgtgagcattttaaacttgggcagcagatcaagggcattgatgtgcagtgaaaagtaggggtgtacatcggttggtttggtccggttataatatatttttaccaacccaatataaatctcggattgcaaatatctaattgtaacctgtccagtgaaaaaaataaaaaaaagtgtaacccgcccaatgatttttgtcggtttggtcaggttaacccttttaaaccaatctttattttttatttttttcattgttgttagtttttagtgctcaaataattgatttcagaaaacaaatgtatagtatatgtctttcaaaattaaaatagttataatttaaattaatgttaaaaaataaatatgaattgaataaatattaaagtattaaataatatttttcaaaaaatagaataaaaacatatactcatgtaaattctaaatttaaacttcaatatttaaatacaatcaaaattatcaattataaatactaaatttcaaagtaaacactataaaatacaaactaatgtaaaatagttaactattaaacgtaagttatataatatgttataaatcattttagtaaaaatatgtaaatcattttattcgggttatttgggcgagttagaataatattcaaaccgcccaatatattcattgggcaatttgaatttttcgtaaaattattcgggttgtattttttgtagatttattcggtttggtttgggcgatttatttgggttgggcagtttgttaatattttttgaatagccctagtgaaaagggtgatcccctagtctggttaagttctaggtcggtcaagctttgcacacggtttgtaagttgatttatttgggcttgcaccattggatcgacttgatatgcccgtgaagcgacctgtgtcacttgtggaccccctagaacattactgtgcacgtagttttctacattgattggttgagtattaagggggatgaatttttcatcttgtccccttctataatttagattgtctcttaaatcatgtgcatgtcccaacttgttaaagactgattcccctggaggtcttcttgttcaactgttattagtagttgattggtttggtatattcgtctaagaatagaaattatattgaccattcccctaagataataggctggtaaaacgtgctcatttatcgcatggcccacaattttatcctgttgccttggattggacggtccattaccttgggtctactgagtgtagttggccaaacattcttttggcccatactacgatatgtttgggatatagggctctttccctctgtttggatcctttatgagggtgttatcaactggaatatgcccagttagcttataagcttttgttattaactcagttgcctgtttggagcagttgtcaattgggctctcatgatttccacctgttgattcatcaactcctagaactggcatttttattgttcagatgccatattcacagttggtcgggtgtccttctggtcatggtgaagggtgtttgtatgatgtttcatctgtcttagggccacttgcatattttgtaattcagtatcatcaccaatgagtacccgaggtccaccagtggatggacccccagtacttgctccaatttccccatgatgtgtactgatagttctagtctcttgtgtgctcagagagaatctagtctgaggggttgacactcttagtcttgctagttggggacccttggaggctgagcccagtctcgtgaaaagtttcgatgtgtagccagtcttcgcaggattcacgaacacgattccaaaagaagaagtatggccacagcaaccagtgtaattagagagaatgatcagcctaccttacacaatgtgaacttgcgagaagatacgactgagacagggtctagttgcatgttatgctccgcataatcaaagaataagcaggattgagagaagttaatatcggtcgcgcatataccaattatatgcgatgatcaagtatatctctcctgggatgagtaaagattgtctctttacctaggtttggtctgaatgaccaatgtgtttgaccactcattaggaactcgcatgttccaagttttcaatgcatagaatgttagatatggcaatcaagggtgaacgcagacattcaatgaaataggcccaaaggctcatcttgcgagacaacaccgtagagtttgtgagctcgtgtgtttgcaatatgaataggtatgctgcgacttatcaagttgcatacgttactgaaattaatacaagaacagacaaaattgttcttcatttattctttaacgtttattttgattttatactctcatttattataaaatgattttaattgatcagttatgtaatcctaaaggacacttgctttctatataaattcaaattaaataaactaagctaaaatcattacaaaaagtggactaagaagatcaagctctgagtgaaccactataattctcttgtcttttctttataatttgcttttgtttttgtctatttagtagcctatactttaagtactcgctattctaagtgaatactcacatatttgttagtgaatattctaactttgtttgaatactcgcacaaatttggtgtggtctaatttcctctgacaacatttggcagtttttgtgggaaagacaagtatttttgagattttggaggagaatcgaaatgactacagatcaaataaacacgaacaacaacaatggaatcttcaatgttggcactatcaatgttcctatttttgcaggaggaacgacccccgttgatgttgtcataggaggagtaggatgtaccaatgtgactcccccaacatatttcctcaattcttaggaaatgttggagaaacctcgacaccagtagctatcgtgcgacagtttccaccaatcacgcccattgtcgcatccaatggtatcatgcaactgacaaactcgcagtgcgcgactatgcaggaacaaatgcgagcattacaggtagagatcacaggaaaatattacattcaagcccaacgtccaccacgagtcccaaactaatgttgcactaataattaagtaagtaatgatactaggtgttatccccaaattggcactctgacgtggcatcnnnngaatggtgacacgtggcatctacttagagcacctggtcggatc

SEQ ID NO: 115620 - DNA, 3015 bp, Cannabis sativa
  modified_base (49)..(73): a, c, t, g, unknown or other
tttatttcatcgtcttagaaagtttatatttagggtgttaataaacatnnnnnnnnnnnnnnnnnnnnnnnnngtaaaataatttccaacaataggttgaggtggaaaataaccatgaaactcaacaaccctaaccacctacaacaagtgttcaagaaactcaagactcaccaagtgagacacaagctgaccttgacgactataaacttgccagagataggtctaggagaacaactagacctccaaacagaatgagatatcatgacttcgtagcatatggcttttctatagctgaggaagaaataagctcagattcagcaacttacatcgaagccataaccagacatgacatcaagaaatgaaacaaagaaatggatgaagaaaaatgtactctttgaggaagaataagacctagatcacagttaaaagaccatttggcaagaggctgatcagttgcaagtgggtttacaagaaaaagaaaggcatactaggtgttgaagaagagaaatacaagggaaggcttgtagctaaaggcttcactcaaaaggaaggccttgattgcaataaatttttccaccaatggttaagcgaacctcaattagaatcattcttgttagagcagccagagacaagcttgaggtagaccaaatggatgtgacaacaaccttcctacatggagaactagaagaagaaatctacatggttcaacctgagggctatgatgatggaaatttagatgagttttcttgctaaataggtctctgtatggactaaaggaagcaaccaaacaatggaatatcagatttgacaacttcatcactcaaattggcttcaacaaaagtaagtttgatccctgtgtatactttaatcaacttgtgtttttactattgtatgtggatgatataatcattgttggtaaggataaaaccgagatatcaaaaataaaaatacaattatgtaatgaatttgagatcaaggatcttggaaaggccaagaaaatcttaggtattgagattaatcaaagtactctagggataatattgctaagtcagagggattatttgtaaagaatcctagagaaatttggaatgaatgattctaaaattgtgtcaacacccctagattcacccaatcttaatgtctcaagaaaatgcagaaaggaaattgatggaaaggttccctacaccaatgtggttggaagcctcatgtatgctatgattttcactaggcctaatctaactcatttactagcatcgttagtaggtatatggttgatctaggtgatgctcactggacagcagtcaattggattctcaggtatgttaaaggatcggttgacttggctttgcaaagaatcctagagaaatttggaatgaatgattctaaaattgtgtcaacacccctagattcacactttaaactgtcccaatctcaatgtctcaagaaaaatgcagaaaggaaattgatggaaacggttccctacacagtgtggttggaagcctcatgtatgctatgatttgcactaggcctaatctagctcattcactagcattgtcagtaggtatatggttgatctaggtgatgctcactggacaacaatcaagtggattctcaggtatgttaaaggatcacttgacttggctttaatctacaatgggaacccaagatctaaaggagaagtggtaggatatgtagacagtgattatgcaaccaacattgacacaagaagatcccttacatgtctagtttttactggacttagaggagctataagccatcgaaaccaaacctacaaaaggtggttgctctttcgaccacagaagctaatttcatggttgcaacataagcatttcatgaaactttatggctcaagggtatcactcatgagttaggattaaactctaaaaatttaactatgtattgtgataatcaaaatgccttacacctaataaataattctatgctacatgaaaggtccaaacacataaatattaagtatcatttcataagggacatagtagcacaagaaaaggtccaaacaaagaaaatcaacacataagaaaattttgctgacatgctaaaattggtgctagcttacagaagtttaggcactgcctaaatctactcaacataagcaaatgctgatttgttttaatcggactgcattttttttcaatttttttgtgtgtgtttcaagtgactgaatcaaggtagatttattgtctggtccaactaggggtgagcatccgctcggccgaccaaatcagccaatcgaacccaaatttaggctgaaatagccttatttttcttaggtcgaaattaaatgggtcaaaagtttcttaacccgtgttcattgggttgataacgggttgcatacattgtaaccaaacaacctaacccgggccgacccagtaagattttttttaaaaaaaatcagttcaaaccctaaataaacattgctgcctcccctccctaatattcatatttcatacatacataaaaaatcctagcacactcccgcctccctcttcttttcttacaaaaaactagttgtgaatgtgattccatttctaaacagccagactcacgaagccacagcaactttcttgttcgtggccagacatctccggtcctcattcatttgccatctctagtggccctgttcgctcacacaaagaccacatcgttcttttccttgctggagataacaacaagtaagttctcttttgtgttctcttctccaatccttttcttttctttctttttttttctgtgctgaaggagctgaagcccattttttttttctgttttgtaagtatcttggcagttggctaggcgctggattgttctcaggtgtcggagtttgttgttctcaggtcaccacaaatgcaggtcttgatctttcttcacttgaccttatttttattttttgataaataatataacatgatttgaatcttgattaggtatgtgatgtttgtttgtttgtttgtttgtttgttatttttttttttt

SEQ ID NO: 115621 - DNA, 804 bp, Cannabis sativa
  modified_base (705)..(712): a, c, t, g, unknown or other
tagggcataaaacctaacagttggggacctttggattacagctagcatcgcacacgtgtctttatcctttaggcacgtgacttccacgaccattggaaagaagtgtaatgcttgggatatcgtgatgatggctgattgatgtcaatgcaaatatcgaggaaagtatttatgatgaaaaagcctcaattccaacaaagtgtactagatgcggaccttctagctccccgaatgttagatcataggtgtgttttctaggatcggttttgagccaattatcgtggggcactcggattgccaatcttcacgtataaatagaggtgaaggggaacatttcaccagttttacacacttagcatttgaattcaaacttgagagagagagagagataaaactagagcccccattctcaactctagtgaaagtttgatccctttgacaccattcttaaccaccttcgttgaatttgaaccaaagaatacccaagagcaccaccccgagatttaatagtaacacaaccaaaattgttggagtcgttggacattcaagcgggcgttgacaagattcttgcttgggtgtacaacttttaggtcagccaccgccgtgctttaccaccacacattcttcttcaagtaacttttccctatttttgagccatttaatttctctaatttttggaaatgcatgttcgtgttgggttttgtgccnnnnnnnnaacccatttcaatataatttgatttactagttaataaggatcagaaataacattttatgtaacatggttcacatgatttatttcacgattat

SEQ ID NO: 115622 - DNA, 1221 bp, Cannabis sativa
actatttataacctatatggataacaactaaaatgtctctaagcaatgtgggactttttagcttgtagtgtagtttatttttcaaataaaataagaaaaatgtgtcacaaaatagaaaaaaaaaataaaaagccacctaaactctcttatgcattcctttatatatatacatacatacataagatttttcattaaataaatcattcttgctttttatcgtttcaaaatattaatgtggtttaaacatatttgccattttatatttttatgaccttttgtatgttttattgttgttttaagagttgtcatttgagggatatctaacccattcaatctaatatttttatactgattaaattattattattttctgtttttttagaacatgattcaattataattagcttggattgattggattcgaaagcatcttaatttgtaaaatgaattttaatattaacttaaacatattaaaaaaaaattacatgacaactaaacattattactaatttgaattaaatattatacaaaattattaactttacaattctttttacgtaattaactttacaattttaatacaactaaaatcttaaaatatcttttatacaaaagtaaaaataaaaaatttaaagcacttaacaaatagtcacaataattaaaatatttcaaaatattcaacataacaaataataataagatgtatattttcttaaaaattttctttaattaagtgtggaaaagtacgcaatactaaattttttctttttgaataaaatgcgtaaatatattaaaattaaataaaactagacatcatagtcattacataataagttatatggtatggaggacggatcaaccataccaattacattactggcaaaaactcattcagccacattatggaccgtaaaattacacagtctagaaataaacaaaaagttacaactaattaaaaggtttgagagatttttatattgaagaacatagttaccaataccccaaatagaacaagttccagtcattattttgatcaccgtctcagaatcactctcaattatcacaaacgaatgcttccaaaggatcgatgattctagggctaacaaataggccgcaacttctccaatgacactactacaatctaagcctttagcttcccttttttcaatccaatttataaaaagggaagctaaagggggtgaaaatatctgcattgacatt

SEQ ID NO: 115623 - DNA, 1992 bp, Cannabis sativa
gagagagagagagagagatttctactgagctcagaaacttcaagtgcattaaagcctcgtgggcttcaagtaggagacaaggaagaaaacttgtgcgggcagaatcatcaaatcaatataattacaagaacgatagttaaataacaggatacatattacttctctgactctattcaacaatattaaaataatatgagaattaaaacctctgaagcaatataagtccaagcaccaacctgaggaacccaaaccctcagacctcgatcccatttataggtagtcccgtcatcgtctgtgaattcttcttcaccctctggtggggttgaaggtctgtcatcattatccatcgaggctccgccgaaatcagtagagccattttttgcctctgcttctgcctcagcctcagcctcttgaatctccttctgccatttcaaaaactcttcatcattggagggcactgcataccacaacacatgtatgttagataccataaacatgaaaacactagcagcactgcctctaaatattccaagagaaagaggaaaatactccacccttactagaatcatcggctccttgttgaggtatgtatgtcatcaactcggggattgaggataatggctgccattcagtccttccttcagaccacacgagtgtactcggggtgagatacccattcaagaaatgctctgtccaggcgaagttagtaaagcaaaggagatgagatggttcaatagctcattaaaccaattgaacatgatacagatggaacaagtcctgaaatcgtgctattgattactggtagaagtagaactgaaattcaaaaagggcaccaataaatttcaggaactaattatttaacctactatatcaaaggtcaaagtctaagaacttaggtggattcaactcaagtttttgtttaaataatttgcaaaatgaaaaaggtttattatttcactatttgtttttgtttttgacttactaatgtgtacaataacacacacacacacatatttatatatatcctaggcctaacaaggtttaaaaacaaacaatgaaataataagactttcaaacaaactcccaaagaaagcattcaacttgtaatatctttatacttcaattatgtcttctcagactaatacttgatattcagaacctgaatcattgctcacaaaatgaaccaattttgttctttagaccaattagaagctcatagaaaactcaccaagcaattcagaagaaacatagggaccaacatgctcttgattatcaccgagaatataccatcctacttcaatactggattgagagttcccatcaacaacgttgtgtagttccacacctatacaaaaaattataaaagaacagctatcatatatactatgaaataaatccctaaaacccaatatcatatgccttaaacacaatgctaacatacagtacgtaaatgtatcagacaaaaccctagaaacccaatcatgtttactagtttccgcttactttatcgcaaatcaatcagttcattattttccagactcaacgcgaaaaaaaaaaaaaaaacaattcgaagctctcgtccaccatttttaatttatcagaaaataaatattcaaaaaatactatgaaagttagggaaaaaaagaggatggtaaggaggcacaaaccagtggattggtgttgttggtcggtgttgtcctgagacgacatcgattggtggttcaactggtttgggtttcttcttcttttttcttctccgaatggaatggaatggaagagaatggagtgtggagaatatgaacctcagttggggtctgtttgggcacaggattctactatactccagctctgatagtcatatccttgggccgttattggtgttgggcttacccttttcatatgtgggcctttttttttttgaaaagatcatatgtgggccttttggaatctattaataaggggtaagttgaaaaatgcctcttttattcatca

SEQ ID NO: 115624 - DNA, 2546 bp, Cannabis sativa
tttccggttaaaataaaaaataaaagcgccgatgtgaggagcggtatgcatgcatgcatatgaatctgatggatgatgatgtgtcatccactctgttcatctttgcaaatcgggtcccaaccccctctctctctctctcagtacactcctctgtcccttcccctccttttcgacatttctagggttttcagtaccttaccaagccaaaaaaaataaaggcactattgtctctccagagcttgagggctcaatccctaaacccagaaaaacccaattacttgcgcagcaaatttactcattagagtttaaaattagagctgctgcttcttcttccctggaacccctctccttgttcatccctagactcttactatccattgccctaccactcggggtagttcaatccattcatggccaagaccaaaccaggaaaaaaggaccttgactcttacactatcaagggcaccaacaaagtcgtccgacgtattttctatctctcattctctctttcaaaattttacccaatattcttatccatataacttttccattcaggttttacattttctgcacttacaatgtttattttttaacacccaaccgaaaccagttttttcatttatcgttttttgtttttggctatcggttccgccccaaaatttgggactgaaaaacctgaattttcattagtttttgttacagtttagtgttggtttgtgtcgcattgattgggattttattgaactttggttgcttcagctggggattgtgtgttgatgcgaccatcagactctgataagcctccatacgtagctcgtgtagagaagatcgaagctgatcaccgcaacaacgttaaggtccgagttcgttggtattaccgacccgaggagtcgatcggtgggaggagacagtttcatggggcgaaggagcttttcttgtcagaccactatgatgtgcagagcgctcacaccatagaagggaagtgtacagtccacacattcaagaactatacaaagcttgagaatgtaggaactgaagattatttttgtaggtttgagtacaaggctgccactggcggcttcacaccagatcgtgttgccgtgtaagtttcctggtttcaacacataattcaatgtctttccgttagaatttgtatattcttatatggatttattgaattttgaagtcctttcattggtttgttattgaaggtattgtaaatgcgagatgccttataatccggatgaccttatggtacagtgtgagggatgcaaggactggtaattctaagtactctgtttataaattcgatatataatgtatatatatttaataaccaatgataactttctcaaagttgggtgatagagctcatttgagtaaatatttagatccaattaattgtgtttttatttgcttcgacctatcaccattacgttttgcttttttaagaagtaaagcatagcaaattgtcagagaatttgaagctaacgtaaattgtattcaatgcagaccatctttgatgtgtcacttttatagtataaataatttgcccttaatgaatactgaatacttgcattgttatgggactgttattcatttagttttcttaagtttttcatttccccgtcatcataaattgtttctgcattgataatgtccctcgctcgtaattgtttggaaggctttgccatgcgaaggtgaagctgttatcatttactagcgtgtctttggcagctatatgagacattaattatgttattccgagttaacatatccaaacttgaattgaagagtgtgctgaaagttagtgccaagatttagtacggtggattcttttctgtttacttggaatattgagtaaacttaaaccagcaccaaattctttaaatataatgctgaaacatggctgattagggtgaaacacaggaggcttttcttcttcttcgcgacctggatttaagagcataaagtaccaaataccaacttgtttccccctttttaggtatagataggataattatgaactttatcataatttgagtaatctgatcttgctctgttgatgtttgtggtccaattcttctcaggacttctcttacaatttgctagaatttcatctctcaaagtcttaacgattttaggactgggtaagaggatatgatataaaagtagtagaaggaagatccatccaagagggtcatgtttcctagtttggaaatttgagcttgatagatatttagtgatttataatagttaaaattttagccacgaggttggtctagtggtaggaggaatggggcgagagctaggtttgaacttgggatctcttggtattgaggttcttttgaactgtttcttagcctcaattaggcacaaagtgtgccaatgataaaaataataataataaattagttagaaacttaaaaataaattgcatttatgtcattagataggttgctagataaggtggtgataatatattcaagtagcagtagtagtaaggtgacttttgaattatccaactttggtgtacctttgttatt

SEQ ID NO: 115625 - DNA, 2683 bp, Cannabis sativa
aacaacaaaaaaataacatacaaataacaaaaaatcatcaataaatgaacaaaagtacaacataaaaatattgtattttttgtaaataaaatcataaaaatcgtaaagtattcaatatttctggataactatatttttataattttgttgttgttgtgatgtatttgtgaaataatctcgtatatatattttaggtatgaaaacctcatatgccatgtacgtcatttctatatattattttttttctttgaaaatcattccaatatatactaattagaaagaaaaaaagattgcatgttgggattctaatatctaaatactacgattatttatgaaaaaagtttaaaatggtgctggtcttacaacgtacaaattatatatacaaaataagataaaatttccctgtgtttaataaaaaatgctttgagaaaaaaagtacaaacctaaaataccaaaacatgaaagataatcaaataaatgataaaataaatccatgtttaatgttaagccacgaacagccatttctatatttattactgtaaaatctaatttaggaattcatggcaattgttatcaagctaagcctcacaaaatatacaaccacaacaaactataacaaaaatagaccaaattaaaacaaattaactgaatcaacactcacaaatttctttatataaaaatttcattaaaatttgtattaaaccccaaacccaaccaccctctccttaatctcatcacatattacagagagacctgagaaagaataaccaaatatatatattttttcaaaattataataataaaaaaaaaattccaaatattattattgtttggagttagtatagattttttttttttctagaaagaaaatttattattttttattattatataaaatatggctttcaacgtgtgtaaatctttctcaatggtctttctgggaatggctattttattagttttagccggcccagcccacggccgtcggctcagccgtaaaggtcgtagctcaggcggcgatatttgccgtggagccgactacccagccgtatgccgagccgccgttaagggccagaagaacccgttcgtggccacacaagtggcgttaaagcaattgatttcgtcgactcagggtgcgaaaaaatcggcgtcaaaagggggaaaagggtcacaggttcttgggatctgtaaagaaaattacgatgatgcccttgataatctacagtcaagtttgaacaagatgagggcccacgataagggcagttttaatagctacgtgtcagcgtcactgaccgattttgtcacgtgcgacgatgcgttttcggaaatgggtattacttcaccgctctccaaaaacaacgcaaggctccgccgaatggcaagtaatatcttgtatttagccactttgtggcgctaaaacacctaatgggcttaggatattgggcttgggcctcaatttgggctttcattttttttttctttttttttttaaattgaatttcttttatttaaatgtttttttttttggaaaaagaaaaagtgtttatataatgaaagaagaagaagaagaagtggtgctacatttgtttgttgtgttattggggtgggttttaattaagacttaaaagtggggtgatcgtgtctataattaattatatttattatctatttttgtttactaatattaaatttttggctttgtgtatatagtactagtttatatacattttttactttattattttaaaacttttaggaggaaagtgggacttggttggttggtagaattttttttgtattagtattccccatagagttactcttgtctaatctaacagtaataatcatgtattttttttttttaggtatttacttgttttcttttacaaaagtttaattaaacaccgtaaaaaaaggaaccgaaaggaaaaagttgaagaaagcacccatttgcgtgttgtatgcatataagaattttataaagaaaactgaaatttgaatttatttgaatatttgttcttgattaattgggaaatgcttgtctaaaaatttgtagcataaacaaagttgcatgaaacacttttaccttttaaaaaaaccgtagggagagacagcaaatcttacgtagtaatatttggctcatgttataattcatttattaaaatcgtgtacatcttgttgctaacatttcttgttatatttttccattagaagttacacatgccatttagattcattaaatggcttagttcaattaatttttttttttatatttgactcaaaatataattttataatgtgtattgttattggtcactagtagtatttagtactattactatgtcgtcttataattagctagtgatactttctaaaaattattacattaaattatatggtactcgatacttagattaatagcaatattgacatgtagaagagtggtaggtaccactaatacttttttagcaatacataattctaaatttgatgtaaaagtgtttgataataaaaaaaaaatgtaaatgatttataacttataacactaaatataacaataaaatgagataaatgtcaaaaaataaaagaaaaatttgcggcaaaagtccccaaaaggttcacgttgatgctgattagtccccaaggtccaaaaatagcagcaatagtcctcaaggtcacactt

SEQ ID NO: 115626 - DNA, 1511 bp, Cannabis sativa
  modified_base (1013)..(1025): a, c, t, g, unknown or other
accaaaagtttgggagatcaaaatagttttataattcaattatggtcaacatatttgtatcctaatgtttcatgtataaggttaaattaaaatgtgtaaactttagtaattttaacccaaatagattcttaggatattttgttctagtttacaaaatgtataaagtctaaaaaaataaatataggaaaaatagagtaaaaaatgaattatatatatatatattaaaaaaaatggatataatatttttttagagcattaattagctttaattttgatcgtggatatgtatgtaaagttaccaaattgaattatcttcagtattttattataatccttgtacactccttacaaaaaaataaaaaataaaaaataaataatctttgtacgctaacttttgtccgaaacttatgaaaatttatataaagctttttttaaaaaataataataatagtgaaacaatttaaatttagttagaattttaaaatataatacctttataaaaaaaattgcatttataccctaataaacttagctatttaggtccatgctatataactttaataattatcattctagctcataaaccaaaaaattgtgatctaacatcctctttttattaaaatgtgttaaaataattacacacttatagaaaacctagacacacttaaaattataaattaaagtcatattgaggaccacatgcaaataggcttacaactaccaagttttggtagaaaatataaatgagaatgaaaaaataaaaacatcatttgaaatttactctaagttggattttggaaaggaaataaaagttagagtatctgatttttatttattttatcttaaaaaaactagttagagctaaaaatagagtaattgcagcgtaaatacttaaatatttgagtttaatttttgacggtttaatactgaagttatatttttaaaacttccgtagatactgggagtcaagtgtcaagtcattatccacttgttatttttttattggtatattnnnnnnnnnnnnnaaataaaaaataaaaatttaattatttgaaccaatcaagaactgctacgtggcgattaatgtgacacttaacaactagatacttgtagaaattctataaatataacttaggtttattatcgtcaaaaattatatttaaatatttatctgcaactggaaattaaacttaaatatttatgtcgcaacctacttgaaaattttaagaatacaattttcattttttaaaaagaaaaattaaaaataaaaattaagttatatgtctactatataatatgaaatatgaaataaaaaaaaatacatagcaaaatggcttattttttttttaaaaaaaaaaaaagaaagaaaatgttgcatgtggaaatatttcactcaataacaaaagaggagcgttactctaagttcttattaaacatcttagtttatttttcgtgttcgaaaatacatgttgaaatattttttttacaattttttttcatggcggtgtttg

SEQ ID NO: 115627 - DNA, 4106 bp, Cannabis sativa
tgtcccttgttgaaaacacagataacatttaccccaaccttctaaaatctttcgtatggtggaagcttgctccattccattagtgttgacatgtggaggttcaaaagtaattttacattactttccaaatgttaatcaatcatggaaggtgaacttccatcttcaatcgtggtaggttaacttggcagtcatctgttggtggaggagcacatttactgaggagttgctttttagggaagcctttatttcgacgactgttcactttttggtgcgagaactaaggaaagcatcttcatcattaatttgtgcctcgattccagaatatattaattgtttttcatgcttgattgttggattccccaactattagatgtatttgttcttttagagatacaatcatggattatccattccttttcacgcggatatccacctcgggtataaatacccttagaagactctatttaccacttttcccccaattttagttttttagaaattagaattcaaatttttctgcaacattaaatgcagaaaccaaacccagaatcaaaatgacccaaaccaatctggatcgtgtcattgagttttctatacaacttcttttaagaattatgactcgagaatttccaagcattcaacccctagtgaccacgcattttacactagaaaacattgtgactttggatttcgacatagacattaatttgttgataactttcgccatttgtctttgcaaaaggtgtgctcaactacctcaaccaaacccaatgataattagtttggtgccttcgctcccattatcagttatgtatttatttaccctttcgtcttttaactgtgtttttagatttactgtggcacgtaggattcgcatggccttttttgaatgaaattgggatttttagagcttttgattgatattgttggaaattttaggcataatagactatggcctttaggttttatctttagaattttctaggaatggctattttgctgtagaattgtttgaaaaaaattttgtgggcagaatccttttggttttggataccttgtagatttcttcttcatttgtcctcttgttgttcttgatttcctattaagaacgaatgatccttgaaggtttttgagtctagatagtaaatctagtagggacctctccaagctatttatgggagagacttccctgctctctctctatattaggtcgtttgggtagctaactacttggttttctttctttttataaaatctatgtgtaagaatattgaacaggaagaggttgaattggaagaagaagttctggagtaggagaacactccaaaattgatattgaatgatagagcatgggagatggactagtatataaaaaaaatttaggatttagaataaccttaggaagtatgacactttgtgagggctcgagcatgttagagacaatattggaaaatgtttttcattcacggagagcagccaagaaagtgttcggaaggggggttcgacatctggagctaagcccttgtggagatgggcacacaccttttcctaaagttttactttgcctacttctgtgcaggatttggagtggtacctttctagttcattactcaggtatattgccttttatatgggtggtatatcctttttgctcaacataataaagttgcattaacactgaaggaaatcttgtacttctacaagattaaatatcagcccatgagggaccacaaggagaagataggcttttacaagctagaatgctactcaaagaaagtggcctgcccaattatctgcgtgaagtacacatgacttttgggaatattggttctacacctctgccttcccctgaagagagtccatatgcttagtttggacttcaacacacctaataagtgtttcttcctcttcttgatttctcttctcatcttcttccgatttcttatgtcttaatctatattgtttcttccagattgccttctccaatagccattgactatatcatcatgatatttgcacctcttgctttgatctgaattttgtcttcttgtatattggcagatgcttgtagtaatgaaccatgttacaagttgccttataaatattttctcgagtatcgacaaggcttgtgtaatcggagtatcttgactcttgattcttccctttctttgtagaattgttctaacttggacccttggaacttgttttgctccatcattggcttacattggcctctagagcttctactttttggttcatttgtctaggagtggcactatatccggtttgtactgcttggaacctaaaaaaactatcctgtgtagttggctgcgtagaagcactcaattcataaatagtaggagttgtaaaggaagttttcagagggaaacttgatggagcagttatttatgaagtctgggtagtttttgtgttgatggaaggtgatggaagtactcaacaagcttaggcgtagcatattctaagttgatgaatccttgggctcttgttaagaactcaatcaaagtctttgctcttttgcattggagatctttccacagaaaagatacaatagttagtcctgatgtcaaagcaactatcttcatatcatctaataacatttgtttttgctacaacgtccatcatacgtttgatgtacttttttacgccttctcttggtttttgtttgacactagtcaagtaactagcttccagatcaaagtcctttgctgccacaaattattttttgaacactccctgtagttccctccatttgttgattgatcccagggatagccctttccactaatctttcgcagacatagtcagagttagtgaaaagcgaaaacatttggcatcaatgctggcctttggaacttgaatcatgctattgtctttggacaagtggcccttggggtccagcctaccttcataaaattccatttagagaattttgaagtgctccggcagtggtgcatctataattcttttcatgtacggttttgtgtctcttcttctaaatcaaacatggatccattttgctttctagaaatctttcatgttagcttcatcaactcttcaaattttcattccaaacgttgagttttatcacttaaagattcccttccacgagcacaatcattgatatgacttcttaaatcctccccacggggtttggtttttttaattctagctttttctttctttacatttaatcttttgcgaagatcatttgtcgagggacttccagtattgccgtctgaaactgaatatacctaatcgacatcatcacttttagtattagagtcattacgatgatttttgtccttccaagaactagactttttgacttcggcatcagtcttatctttctattcagctctgcctctagaattagtttggttaccctgccctgaagtagggttttatctagatttactaacatgtatgttgattaacaccctaaataagaattttctaatacaatgaaataaacgcatataaagttgaagaaaccttacattgatgggagcaaaataatatgagtccttccattcaaatctctagcccttgattcatttttgtagcagagcattgtaagatcttaacatggatcttctctcctttagtctggttaaccactgtcttttccactatgattgagtacttgacttgctatttatgggcatgctactctatcactgaaggctcaaatttgataaagaacaacaagaagggtcgaaatgactatgaaagaagtttttcatctactagttgtctgacaaagttagaaaactaggtttagtttgattaacataggttggatgagaatgagagcatcttattctttttatagtattcaactagggtttaggattttagttatatggattaaaaaagataatacaatggcaaaaaaaaaatacactaagtggtcgaacacacatgtgggctcactagttataattttgccactttatttcaagcatctatcttttctttcaataataccatattttctaattagaatcctataaatgtcaagactatgtatttaataattataattaattatgaaataaaaatgtcatttatcttatttattaatt

SEQ ID NO: 115628 - DNA, 2117 bp, Cannabis sativa
  modified_base (516)..(520): a, c, t, g, unknown or other
  modified_base (2052)..(2081): a, c, t, g, unknown or other
aaaaaaaaattatatgtataatctgaaaaatgaaggtacaattacaaggatgatacagatatacatgttcttttttggccaaccaaattggatagatttaaattttatgttgataggagggtttggcaaggtaccatcgttggaagaaattgagaagatattgttcgatttcttcaagattccctaagatgaatttataagcatgtgattatacaaattaaacaacctttgttttttcaatcaccaaattaaattatactattatattataccaaggaaggatctatctgaacgaaacagctgcatgtgtctatgaatttggtgtgtccacgtagttgaatagatctttttcgaatattattatttaatggccaacgcattggtagtagtaatgtttttagtaaaaagcacacctaaagatagaatattagttagttcattaaatataggttgattgaggttatgaataagagactagtgttatttagtatttgtaattaagtattaaattttatnnnnnttaatataataatttttagagagttttattaatttattgtaaaggaacacgttttaaagatactaagtgctattggtacccaatagtaatactatataaataaaaaatattactattaaacaccagtaatacctagcatattctagaggtggcactctgcgattaatacatgaattccctaaaaattattatattaaattatatgggacttaatacttaattgtatcatgacaacgaggagggtgctaggcaccattagtgtcttttagcattactcataaataaaagatgagcattgctattaggcattagacactactattagagagcatctataataaagtgttataaatgtaatgtatatgtatcttttagcccgtgttcacaaaattgaactccaatgatagtgtataatatggtataaatttggcacttactaaaagttgtaccaaatttaccacaaaatacagcatgagctaaattttacaccacagtaaataatacttttttatttattgacacttgctgacgaagtttttcatcaacagatcgtaaaagcaagatgaagacaagtgaatatcgataaaagtaaatcggtttatggaaagaaatttgacaatgatgaacaacgaatttttatagtggttcactccttttaatggcaataggctagttcacttgtagttttattgatctaaatgttcaacaagagttctccaaggttatatttttgaagagttcaattctctagtgagattttagaatgagagagcgtgagtccctttacaactggtgttatgacctttttataggtttatatcatacaacgtagggttttctatccagacacatctttttcttagtttgggttaaatcaagtttgaaatacataaataataaaaaataaaggtcttcacaaattatcatcttttcgagatatctctagagtagcttttggtggcacatgtcctagcccgagaatgtattttgcttagaatacgagtgcctaaagtcctgattgtaatattctaaaatgagaaattatttagcaatcctaattaacttaattaaatattaatgtgggcttatattactatataatcaattatgcgatattatatgataatatttgagtttaagtccctatttatgttatatgggtatttttgtaattttaacccaataagggaaaaattgtaaattttttaatattatgtgctaatagactacattattatgaaaatttaatgcggtatagtcacaattggatattttgactcagattaggttcacgatcccaattatgagtaaaatatgttgatactgaaaagtgatcaaccgaaagcggggtcgacagatctgatgcttaccacgtgtatgcacagataggaataagaaataatagacaacaagatttgttatagaggttcgacccccttgtgataacgggtaatgatttttagttgattgataccgagggaatcactatccatattgctataggtgggatctgtgttgggttttatgccctnnnnnnnnnnnnnnnnnnnnnnnnnnnnnntcaatttagaagtgaattatgattacatgtatgtta

SEQ ID NO: 115629 - DNA, 1098 bp, Cannabis sativa
aaatgcttcctttataattaaaaatcatgtctttgttttgttgttatagggatagaaattgatgaggatgaactagctaggtttgtggagcgtatggataaggataacaatggggttattacatttgaggaatggagggattttctcttgctttatcctcatgaagcaactattgagaatatatatcatcattgggaaagggtttgtcttgttgatattggtgaacatacagttattccagaaggtataagtaaacatgttcatgctactagatatcttgtagctggagctgttgctggtgctacttcacgtactgctacagcacctttagatagacttaaggttgttttacaagttcaaacaactcaggctcgtattatgcctgccattaatgagatatggaagaatggtaagttcttgggattctttagagggaatggtcttaatgttcttaaggttgctcctgaaagtgctatcaagttctacacttatgagaccattaaaggcattatagctaaagctcatgggggtgaagaggacaaagctcagttaagcactgtcgaccgccttttcgctgggggtgttgctggtgctgttgctcagactgctatatatcccatggaccttgtcaaaactaggcttcaaacttttgtgggtgaagctggaaaagttcctaggttgacaactctatcaagagatatttgggtacatgaaggaacaagagcattctacagaggtcttgttccttctcttctgggtattatcccttatgctgggatcgaccttgctgcatatgaaaaatttaaagacatgtccaagaaatacattgtggaagatggtaaatatttctaggtaaatctacagtacacccctaaatatgtcgttttggtatacccctatttttttcgacattcaaaagaaatatttagtctaaactcacttgtaaatttttaaaaaattccgaatagtttacagtgacaaaagtaaggttcaaatattttgttgcacgcgtgtctgttctatcctatacacgtgtttagcaactgtttgaactttattttcggcactgtaaactatttgaaatttcttaaaaattta

SEQ ID NO: 115630 - DNA, 2862 bp, Cannabis sativa
ctagatttcttgtaatcttgatgaaatacttttatttgtattttgagtattttgattgtaatcttcctattctctcttgtaatgagaatttttccaacttatagtaaagaaaaagcacattgagggacacatggcaccatgcaaataatacaagaaatgaatattaattcttttatggtttaatatcccccctcagactcacgggctgggaaggaccgtgaatttggttcgtaactcctgaaaatgagaggcaacaagagatttggtgaggcaatcagtaacttaatcttcagaaggagtgaatcgaagtattaggaataaattatataatgaatggggtggctttatataattatggaatgcaacaatagtcactctttattttaaacttataacaaaacaaaaataatttgagaatatactaataaagaagagttcattgatcttgttaaaaaaatgtgcattattaaaaagaaaaagaaaaaaaaaagagtgttatatgtgctttcaaaaaataaagtaaaatataaagagcattatgtaatatatttagaaataataatatttgaatgtcattcaaatttagtgaaaatattaaacttaacaaattaattcattaaaatatgaaatatatattctagtaaaatatatattaaataataatattattttaaatgttgtgaggtttgtcaaatattattattacataatttattaaatattatttttataaattttatgtatatatgtgttaaaaatattattatataattaattcttcttaattacagtatagtactcttaatttttttaagagaaaaactatagtaaaatactataatgtccttaaaaaattattaatttgagattaatttttttaatatataatgttaaaatgggtgtaaaacaatattaagtttagcaggagcaaaacaatactatgtcaaatattgttctttgtttatttattttgaacaaattgagatgtttaatagtgaaacgacattgtaagaccaaaacgacatatgacaataccaacgaaccacaacgacttgtagtaaatgaaaaccgatgataatcatggtgaacaaccaatgctctgacatatatagtagacaatgatatatattactcagaatctcagatttcagatgtataatcatgaggaggtattcattcgaaatcaaacatagaatttttgagttggaaaggtgataataattatgcttatatttatggtcttcttttaatgatttgttgtttttgttcctatatatatgcaattcttttacaaaacaatgtctctgaattcattccatcaactctacagatatgcttatgattaagtatacagtggtgaaatgagttgctaccttgtttggtagcggatgtgagagtttaacttttcaataaaagatgaaattttcattcaaaaaaaaaaaaaaaaagtatacagtggtgaaaaatcagtactaatttagtcaattcaattggtatatatgtactatatatgtataatcaagtaataatcaacttgtgtaatggattatggcaagtttattttttttaaatgatatagtttttggattttttaattactgtaatgaagattgccaattactaaagatattatacaagcattttggaaccttaatagtctatctaactaagattacaaggtaatatattgactccttattttctatagaaatttagtttaattaatttgtaaattttattggtatataatgtggtgtttttcttaatattagaaagaatttatttatgtagatgatcataactgaaagaaattcaaaatttgaatttttttacaagtttcactaggtttagtcttaaaatttagattttgaataagtgaagtatcaaaagttatattttatgcatttttttcaaaaaaaataaaaagttataattttatgcattatttgagtaaaagggactttgaaacattctaaatatgttaattacctaaatgctttgaccatagatggagttcaaaccaaaatctaagaggttttgtctttaaatatcgatttgttttatattcgtatgattttaattctcttactacaaaatcatacattttctatgttaatatgaaatttttagatatttatcaattatattttaataattaatatatatttatttatcttatatttttatttcatatattttataatatattatggaaacttataaaaatattgaaatttgggttaatttttacaaaaatactatcacacggaaatcttttcaaaaatactgtgtttttataaaacaccagtagaatacaaaattgaacaactcaaaacaatagtaaaacaactaaaaaataccagtagaaaaccagtgaaaacttaacacagtatactgcagtatgaaatttataaaaaaaatacaataaaaaaataaaaaataccccctaacagtatttttgtaaaaaaaatgataaaagttaatataccatgtaaatttctcatatattattcattaaatacttactttttaggacatagactttaaaagatagttagattgtgcctagctaattaaggaaatgggggccgagaacattgaagtctacaatgagtcttaactcttggtgaaccaaatatcgggagaataccaaactaaaagagaaagaatagtcgcatatactgtacagacaagagagctgctaaaatatttcaaaaggtacactataagatcaaaatgcatttcatggacatgctaagaaaattggggggtaagttgaaaaatgcctcttttattcatcaattaatcaaatttacctctaattttatgtttatttgaaacatacctctttttatatgtatt

SEQ ID NO: 115631 - DNA, 3689 bp, Cannabis sativa
gcagaagacgaaaaaaccctcctagaaaactctaagatgacatctaggaagtataaaggctgctcattctaaggcattgtataaaccatatgaaacaaaaacaccttcccagaaaactattacaactacaagtaccaatcacttgtagggcccgaggagacaatataattctggcaagttatttagttgagacttcagagacagcaatatagctcacaaactacacttagaaaggatcccagaaatataattttattgaagtaccttgcgagatattttctttatgacagactcactaaaatgtggtagctgcaggaatggtgcaattccttcactcgatcctccaatagatttccttgcactaagaggaacagcctgcataacagttattgtataaaatagtgttttaaaattattaagaaaatgaataagagcaaaaaaaccaagtttgaaagcaatatcaactggagcaagaatatcgtgttcaccaatttttaggatgtaaaataaaagctttaacacatccaactcttaacttaaatgcatatgcattaatcgagcacttaaaattaaaatttgcataacctgaatgatacactgagaaagctcgacaactccgattgcaggccttagccacccatgcccctgagtggtgcgtggtatgattgccatctagacgagttacagacaatattagaggaatgacttagaaacatgaatcacggtagatgatagacaaaacatgcaacaagtaaaacaacatccaaacagcaaagaaaattcactgaacattgatgaataaccatgcctaaaagaaagctgacaagaaatgagatatcatggacaatcacaataaacaatcttaaagcaaatatggatttaataagtgactttgtagaaactgtttagaaatcaagcagttacatttgtgaagtactggattaaaagcatgctagaatgaattgagactcgattcagaatgccaattacaagcataaaatacttcattctatttctacaacatcaacaacagatgtagagatcaaaaataagaatgcataaaatcatagagatcaccttcattagctcttcaagaaggcgaggtgcaagttctagcacatgtctgaaatcagcatgcaaagatggagataaagaagctgattcccgagtcagatgagcttgaatcaacaattccgtctgaattacaaaagcacaagataattgtcacgaaggaaaattgcaatgatttaatcaaaatcacaagataaactaccttaacaagagctgggtgttgcttccaaaactttgcctgctcttgcttgatgttcttcaggtccaaatttaactcacttcgaactagcataaaaatcttctgaaggggctcattatcagttctacgaactggaatttccatatattcagcagcctttatgaatacatccataactttgctgaatgggcaatatctcaacagtatcagaaaacaattaaaacaaagacagcttatgcgtgataaaaaggatatctaagaactgaataccttggagccaatgaaggtttcatgaagtaataataagtagataatgtatgatgcatcacataattgccagtatattttgacgattgtgaaagatacacaactgctaccaccaaaggcaagagaatacaaagaccaacgatccagagtaaaagtattccaccagaagatccatctatgtctagcaggaattgtgggagagctatgcccatttgaaaaccctgtacgaaaaataaaacaaccatagtttacacaacacgagtggccaatatagtttacggactttcccactacataaaaaacatcaagaacatgtatggagctacttcctcctcattctgagcattgtacattacctgtctgccatctggatgatggccatatttttcatagttttctcgagacgttggatcagttagagcctgataagctttggatatgtactccacaaaatatttgtgagcctctacaatattaaaaacaatggaagagcattagaaaacgcatattatcgataaaggccacagatagaagctgcaaaaactagaaaaaaaaaaccttcaacctggatctggatttttatcaggatggtattgaatagagagtctcctataagccttctttatttctgaatctgtaaccccaggttccaatccaagaatactgaatggctcaaaaacttgaatctgatacaatagtcattataagctcgctataaggtttcaacaaaaatattcacatagcaagtaaatatgatcatttaacattcaaaatattgcaaaatgagcacaaatttcaacaattattgagctgaaaattcaattattcctaaactattatgaatttcgacaacaagaattgtgactattataaaatctcattgtaaggtttcacaaaataagcttcacaaagcaagtaaatatgatcattaacattcaaaactactgcaaaatgccacaaatttcgacaattacaagctgaaaattcaactatttctaaactattatgaatttcaacaacaagaattgtgactattataaaatctcattgtaaggtttcacaaaaaaaaaaaaaaaaacaagcttcacaaagcaagttaatatgatcatttaaaaatcaaaactactgcaaaatgccacaaatttcgactattatcaagctgaaaattcaactatattctaaactattacgaatttcaacaacaagaactatgactactttaaacaacttgttaaaagtcagctaaaaatatcttacctcactgctcatatttttgatataataaatcaacataatcataacaatccaaagcaggagcagagtcaagttactccaagttgagaaatttgagatctgcaaatatgaaatcaaaaacaaaccatacatattcagaacaaaatataacttatggatcaaaaaaaaactgaatttatcatataattacacaaattcaaacaagaaacaaatctcaatctcatcaccttcttaaatatggacttgcggtacttgcctgaatgagagcattcagaacattgacaatggatagttttagctttcttagaggcagcactacacaacttcattatcgtataaggcaccaaaggcaaagccatgattgttaaaataaatattgggaacaaagcactgttttcctcagagaccgccatgtctaaacttcaatctcccccctacacaaaaagaacacaaatttacacactttgaaggtagagaaagcaaccctgtagagagaagaagaaagaaattcaatggattgttaatctcatcttcatgcattaaagaaaaagcacagccattgaaaaatgatacataatcgaaattgaggaaattggaatattgtaggggttattggatttgaccttgaatttggatctgattgttgaatggattttcggaaatcgtagtttgaaatctgggttacccagaacaagaagaagaagaaaacgaatcgggagagttagggaagaagaaatacacaagatttttattttattttatttatttatttattattatttgtttggggaagagagaaagagagttttattttttttttattttttttttcaaatagttaatgaaaaaaaagatttttgtgctggttaagttttgtgtttaattttcagcaaaaaaa

SEQ ID NO: 115632 - DNA, 1288 bp, Cannabis sativa
  modified_base (1217)..(1220): a, c, t, g, unknown or other
atatgttgtaactaattaaaatacatatacatttttctctcgattttttttttatatattattccaattatgaatattatttttggacaagaatttccaacacgtggatttgatttcaacgtttttccaaccttagaactgtgaccaaaacctacttttctgctctttgttattaatttagactgagttgactcaatagactagctagcagcccacaaaaccacacaattaacttatctttttttaacaactataagttataatcactatattcctatatgttgatcatgactttggccttgctaattatatgtactttattctttgtataaatagtacgtacctagctagcttcttctctcataattatgttttcatgattaaatatcactacacctatatataattctctctctatatatatatattgaagagagaaactgattcagttatggatgctcacacttctcacaagaacaaggtaaaaatacttattattactgtataaattgatcatagttttttcttttcatctccatcttatagagtttattattaattattaatatggtatcatcatgttattaggtggaatcgctggaaacagaattggaaagtttgagaaaagagaacaaaagattgagaatgatggttgaagtaacgagcagcaaatacaaaatgttggaagaccatttctacaaaagatcaagctttgattattctatcaagagggcaaggacgatgatcagtagtaataataatagccatcatcatcatcaatatcatgatgatcagttgaataatattaatagtactactactaataataataataataagactactacgacaaaggtatcagtcaaaacagatcacaactcatcgtgtgataaagacaatactagccccgtaagtaatacatacatttacattacattaatattatattatataggcttaattatgtatatgtattattttataatttggatatatattttcatgtagacggtgaaagatggttatcaatggaggaaatatggtcaaaaagttaccaaggacaatccattccctcgagcttactttaggtgttccatggctccaggatgcccagtcaagaagaaggtatatatatatataaatatatatatagaacactttttaatggtaataatgggtattacccatgaatggttactaaacaaatttaactatannnnttaattttaaaaatatcaaactatcgaattttgatctaagaacgaataatgaaatcacaaatttgaat

SEQ ID NO: 115633 - DNA, 942 bp, Cannabis sativa
tctcgctttcttacagctcattattataatcctattttactagttgccgaaaacctcggtcaacacttaccatatagctccgccctgcataaacccctaaaaacaaacccaacctgaaattcacacaaaccccatataattaattttcaagattcttagacaatttagaaatttaaagcctcataaacacatacacatactagtgaagaggcatgtgctcccttgtattgttaataaaaatatatactagttaagcctgacatttattacggtattaggtataatttgtttgcaacaaagttaaatagagttagcaaaatgtatagtagttttcctgtacaaaataatctgctataataacatattcctaaattacatcagctaaccaaaacggtacatacattagaaaaatatacaaaagaactgttacagcttgttagttgttgcaatatatacattctaaaagtatattaaaggaatgcaacatatttgaaagtcagagagacatgaaacaccttgtgaagtagtcagggacggacccaccttgattgatgtggaggctatagtcctcattaacaaaaatactgtcttttaaaaaattctgagtccatcactaaaagtaatttattaaatgttatcaagcagttgtttaacatcgtacttctctgctttaattcttgacagaattcatatttgaaaatttttatatgaataatgtatttctttgcagtggatatgttgatgagatctttaacactcaatattcaatccacacaaatgttaatgtaatttaaatatgtttatttgagaattgctcttgaacctggcaatatttttttttttgaaaataaagtgatagattaatcggaaaactagacctcacggtcattacaaatgatagtctttggtatcgaggaaacctccacgaaacctgaaatgttt

SEQ ID NO: 115634 - DNA, 1588 bp, Cannabis sativa
gttgagaattaaactaagaactccatatacactatattctactagcccacactagtacttgtgtgtggtgaaagaactggaagactacagtgtgacttcttcgtcatcatccaagaatacaacttacgaagaaaaaaacaaggataccctaataggctttaagaggtaaattttttttttttcaaatttaacgtatatagttattgtgatcctaaagatgtgatacgatgataatcaaaaaatattattccgctgcgtaactgatttagtactacaaaactaacaacaatattgctgaaaatttaaaagtacaatttttgagcaattcctctgctttcatttaatttgtatatgtgccttgaggcatgcatgaaaagggaaaggtaaaaaatgcatttaaaggaaaggaaggttggatcttgacactcccattttactgataatatcggtgcaggtggtttacattccaagcttgtggaatctttaatccctccagtcttttcatttgataggttctgttacccactttatgctggatttcataaggtccttcccagttgggtcctaggactcccactcccagatcttgagatgctggaaacactcttctcaagacgagatcaccaacttcaaatgtccaacttttgactttagaattgaagtgcaaggaaattttgcctttatgcattttcaattggacttgagacttctcgtggagctcttcaattaaatctaaggattcctgaagtagagcgtggatccaggtagggtcgtaagtttcttgcctatgagaaaggatagtattttgaattgggatggctacttcatatccatatgccatcgagtaaggattgtgcaccgttgaagttttcttggtggtccagcatgcctaaagaactttgggaagttcttccagccaatgagctttgcaggcttgcaatttcttcttcaatgtggtcttcaagattttgttgacggattccacttgtctgtttgcctgtggtctagccacgactaagaaacttttgatgatcccatgcttgacacaaaagccagtgaagtggtcgctattaaattatttcctgttgtcaaatacaatgcatactatgttcttgatgataaagtccagagccttcttggaggtgagcatattcatgggttttgcttccatccacttggtgaaataatcaaaagccactatggtgtatttgacccctccttttctggttggaagagaacctagcaagtcgattctccacatagcaaatggccaaggactattcatcaacgtgatttgcattggtggaactcgcaaaattttggcataacgccgtcattattcatatttccagacgtattcgatgcaatcctttttcatggttggccaaggactattcatcaacgtgatttccatagatatatatatataattttctttttattcttaacatatatatagtagatatatgattgatgattaaagatattttgattatcatccataataaaaattatatatcatatgcttaaattatgaagatctaatgacgatagtgaactgatgatcattgtggattacatgtgtaaa

SEQ ID NO: 115635 - DNA, 1496 bp, Cannabis sativa
acagtataaataaatggtctcaagctaaccactttggttaagcttttcttggtaatctgttgtgttcaaaggctatgccaattgctctcctatacactctgtattttctttcatcttcaccattgttgaagcttacatccacacataatataaagataattacaagttttgtaacccaaaacataagttaagttgaccaattaaatgttaaaaaagaagaatattgtgatttattttgattggtcctcccaacgtttacttgactagatttcatttactcatgatcatcgatgacatatacgtatattgtagctactcttatttctcattaattatatgacatgtactcgtagctagctacatattccactatctatgatgataataaaataaaagagacagaaaaggaaatctcaacaatattattaattggtcacctaatttatgttttgggctatatatatttctggttaatatctttgtccagtcgttctatatatagtgtgtggtacgtaatagaagtaatgaatagttaattgaaggatttcaaagtcaagtcaacgtagcaagtcataaaccatcatatcttttgaacataatatttcctatatatttttttttttttcctaaatcatcagtatgagttgtataagaacttgaatcttcctagttaaataaaagtataagaacttgaataatgacaaattatttctaaacgttaaaatttgagataagataatgaagttttaactcattcattttgtatataataatttattaataatgtgtgactaactctaataaaaatattaaaattttagaaatcttcatcatatcttttcaacataatatttcctttttttttttctttctaaatcatctcagtgtaagttgtattgcatcaaaacattcattcataaattactagtgcctttaaaaataaagcttgaacatttctaaatgcaaacatacaacaaggaattcactacaactattcccaccatactctatcctattttttgatttctttggcaaaattattgacaatgtatttctgatatcttgctttatatagtatgtaaatattggtatatttaattagggatgtttataaaataccgaatttaatccacatatatttatatatcatctaaaaatttatatgtacaactaatattttaatgtaaaacataataatttaaaaatctaatattaaatatattttagaacttaatatgctatagttatataaatatatgttatatattggacgagaatactcttatgacttgtgtagcaaatagggttttcattcttaatgtcttttatattgaaatttatcacgaatttaaagacgtaaaaaatttacatatagattaagatcttatattgttacatgaaaagttatagggactagttagcaattgttaatactagtataaatatgtaatactattacacaaatggaaatcaatgaatgaaatgagaaaaattag

SEQ ID NO: 115636 - DNA, 1650 bp, Cannabis sativa
  modified_base (1617)..(1621): a, c, t, g, unknown or other
gaagaagagagcttgaagaaaccctaatactagatgcggctgtaaagaagaagaagagaaagaaatataaaaccctaaccctagatatttttgtgctgctgctgtgagaaagaaagagaagtatctttgaaatgctttgaattctttgaaagggaaagagtgtggctgccgaagtagctttagggtttgagataatatacctttatatacttagggttatatacacattagggtttcattaggttcggctgatatatattcttgttgggtcgaatattaagtgaaaatggtgagtcttgtttgagtcgactcttgttgctttgaccgaaggtatctatatataagagaaggagaggcttgattggagagagaagagtcttggactcttgattgaattggttcttcttggtgttgggcttattgacattgtgctagaaataatatagcacaaatagtgatttacaataataacacttttattatggatgcataataaagtgtagaaatttgaaaaataccacttttggattttgtatttattttgtttctttaaagtgtgttggacaaaaaaaaagctgcagattttggtttaaaattccaacaaatacatatatagatcactttaacacattttatttgcctacatcattatcattaagcaactttctttattttttttacatacacataaaaaaaataacactagcaaaacccttcttgtatctctttacatacgcattagaaaacacttacacaaatatctaataactaaaacactgaataaaaatgataacattaaaagtgatcacgcggcagctgtatccgagaagcctttgcaggcggtgtggctccccaagtccctacctaataacactgttcaggcagttgcttcttctggtaacgggagagaggagggtcatttgataggagaaaagacttctgcttgcttagctgttttggcaattgaaggaaataaccgtgcctcgattgtgcctatgaatttgaatttgggaaatgaagtggactgtgcttcgggtcatgggctgattgttatacctaatgggcctttgactaactccaatggttaggtggggcccaatcgtttaagtaaaaaggttgatagcattggttgtgttaagaaaggcccactacaagtatataatgaccttttgaaacatggagataatactaaggcccattctaatttcaggaaaagtagttttatgggtactgagggaactattaaggactttgctggtgggcctgaggccgagactactcaagatgaagagagggatttgtctcaattttttaaagcctaagaaactttgttacaagatcttaaacactttgggaaaatagatttaattgagataaggcagttgggggtgatattagtgtgatgcctacgtccgaaacaaatgaaagaactacgtcgtttaagaaaagaaaattgtatgaatcctcttcttcggtttgctccaaaccacagaaaattctttgaatgcacccgagtgttgttcgtgacttcccgtgggacactaaggagcaagactttgaatctaaggtagcttatgaagaaccctctgatgatatctgttatagtgagatttctcnnnnntagaaactcgagaccagactcctctttaa

SEQ ID NO: 115637 - DNA, 1908 bp, Cannabis sativa
  modified_base (547)..(547): a, c, t, g, unknown or other
taaaaaagtaaaaaataccgctggcagtatttttgtaaaaaaatagcaaaaattaatatactatgtaaatttccctttaaaaaaattataaaaataaaactgacataagtattgaaataaatacaaaataatgtgagaaaaaattcttaaaaaatataaaaagtatttttttaaaaattattaaacttatctatatatgttttaaaaatattaagatgtatttatcattttgtagagtagaaatgaaactctacttaaacaattatatgttaaaattaattagttgaaatgacaaaaatgcacaaaaaacgaagtaataattaaaatataacattataatttaaacaaccatataagtaaagatttttataccacctactgaaattttcaattttttaacttttttactgtagggtggaatgttttttaaaattactgtgtactgtattaagttttcacggttgttccacaattattttctcagttgttctactgttgtttcaattgttctgttttgttgttttatgattgttttataaaaagacantatttttgtaaaaaaaatccgtgtgacaggaaaattataaatttttgaccaaaatttaatatttttgtaaaaatccctataattagcttattatagaaaaagccatatgcaaaatcaataaaagtccatatttatgaaaagaattagaaaagagtcatactctcatataatttcctcaaaaatcttagtcaattgcaatttttcgaaaagataaattggatgatctacattgggcttcatctacattctactctgggccaagtttgggcctgtcgatattgttgtaaaatgtttcaagaggccctcctttgtgaggccatttccacccaaaataaaaagtttgtagaggaatttacaaaaatatgacaaaagtaagttagttttaattttttagaagcctaaaaatacaataaaatatagtaatgttagtaaaaaaaatatggaaatcgtaagggacggtttttcttcttcttcttcttggatcgtctttagttattttagatctatcccatttattttttagatttttttttaattctcagagcatagtaccaaactggccttttcaaacacttgatcaatgagttttgtttgcttatcctattgataaagtttaacatggttttgtcttttataataataataattaatttcaacttgttttcaaaacagatattattgtattggaacggactatatgtcgttttgaattgagatgtgtcgtttaattaattaagctgctaagctactattttttttaggaacaaaaagcatttcattaaataataaaaaaaattaaattttacggtcattacgtttgaaggcacagtaaccccaaccattcttgttaagtttttagtaaacacccatttagcaacattataaacagtaaagttatatgttctcataataataagaaaattacaactccaaaaactacaatctattacaattcacaacatagttatcaagccgctacttatattcttttttttgcaatacattgataataacttccgagtcactctcaactaaaacaaaatggtgctccttcaaagaaactgtctgaagagccaactaacaagcttcagcttctccaatcagcgcatcaaaaaactctatctcttggaaccaatccacagaatggtctctaagcacgagctagggctaccacacacagtgctagggctaccacacacattgctccacttcccaagttgttgagctagtattatttgcctcttgtattgtacttttgtatacattactctaaatgaaaaaatagtttattgtttttactaatatttttgtaacgtttttcaaatttttagtccatatctaaaaatttcaaaaaaaaaaaa

SEQ ID NO: 115638 - DNA, 1456 bp, Cannabis sativa
gagagagagagagagaaatgaatgtgatgttttttggttttgataaaaatgtattttgagatttaaaaaaattaaaaatataattaaaaaatatgtagtgagaaaaaatattttaaaatcatctctaacattttaacaaaaaaaatgttaaattttccttatcaattatcacaacataaaaaatcgtccataaacaaaaattgatcatccttgaagcaattgcttactatagtatttttagaaacaaacaaagaagataataattaatcaaaatatattttagtaaaacaaaaagtgctacgtttatattagttgtgacttgtgagagcactttttattaaataatttcacataattcatgttagttttagtgttaagagttttatatgttgcttggaagtttggagaattaatatttcagcctctaacctgataggcttagtgatttaaattaagattgacatactttataattcatatgtatttattatccaattataattttgtaccatgaatctgagtagccacgtttcgctgtacactaattaaaggggtacactacacgcacacatgccgtccagccctgtcttcacttaatccgaagataaaatttcgtgctcttcacattttcttttttatatattgtacttttttaatacgcaaaattaggaaagattaattagatttctataataatgtatcattataattagagatgtacattttttttttcatgggatggttctaggggaatccatttttaatagagaagagattctccgtctaaataaagaacaaggtgggcggacacgtgaattattttttgttccagaatgttaaaagcggtggggatgagaatcacactccccacttcgacgggacccattttatattttattttatatttttaataatattttataatttgtaatttatatttgtattttttagtatattagtattctttttatgatttttaaattgtgttttgaataatgattagtttattgaaaaatagttaatatttaatattttaatttttatgtagtttaatatttttatatatttaaatttttattataaaactttattatattattaggagattctctatcccgtcccccgtgtgcatccttaatcataatcatcatcatcattatcattattatgctaaatagaattttcatcctccaaaatttgatatgtacccaattatgtctcctaaattttcctcaaatcattgagattattggatgtgaggatttataaaaatataaataattatagatctaatcatatcattaaatgtattttaatatagaaaaccataaatcatatttctatagagcatttgataaattattgaaaaaggaaagggaaatttcactatttggctttaataatacaacacatatcaaattttataccccttactaatttatacaaaacaattcca

SEQ ID NO: 115639 - DNA, 2031 bp, Cannabis sativa
tcgttaaaacaagaattgccgttaaacaagaattgccgttaaatagacactaattgccgttaaatagacacttttgccgttaaatagacacttttaatatataaagatatatacatatatttttaaataaaacacttcattcaaccaatatatcattcacagagcacttaggtaactccaatcatgaagccaaattttgaatttaatcaacaccaaaaaatacaattttagcagtagatttttttttaaaaaaaaattccaactacaatactataaattacattaaaaaatatttctttattattatattattttagtactatttttttttcaaattccaacccaaaatatattatcaaattattaaaaagtaaaaaaaaaaatattgtaatttacaatgtctaccattattagtgggacagtgtagactctcatgaaaatatgatagattttctagtttggctagagcattttgtgaaaaaaaaaatcacattatatataatattttaacgttgaattggagatgaccttatgttgtcggagaaatttagacaacactaaatttgtgcgagtattcaagcaaacttagaacactcaacaacaattatgcgagtatactcccttaaaattgcgagtactcaatagtttgggctacgaaatagacaaagcaataatagaaatataaaagagactagagaattacatggtatagttagagctcggtatgcttagtctactttttgataattgctttcagcctagtttattagatttgaatcacccgtttatatagaaagcaagtatccattaagattacataatcgattagacaagaccgttatcacgataattacacattttaattaatagaaatatttcaaaaaataaatgcaagaataattttgcccgttcttatcttaattggagcaatgtatgcgacttactaagtcgcagtttgtccattcttattccaagcgcacgagcctttgggctcaatattgttctctcataatagacctttgagcccaagtttaatttatgaatgtctacgatcatctttgatcgcatattcgaacatttcatgtgctaacgacttagagcatgcaagtttttgacgagtcattgaacacatttattcattcagactatacttatacaaaagaaacagtttttatttgtcgcgtgagagatttacttgctcattgcatacaatcgatatgcgcgatcagttattaaattctcttggtccccacttatctttcggccatgccaggtatggttatgcgattaatggtgaaaatacacaattatcggtcataaagtttaaaataaattaagttcgaattaatattttcataaaattaatgaaatatattttatattaaaaatatttatttggattaaatttactgtaattttgtaggaattaaagtgttgttaatgaaggaaatggaaaaaaaaatgagaaaacaagtgacaaaattgaaaagaaagaaagagaataaagtaaaaaaaaaataaacagagaagaagaagcccatttccaaaagaaagaaaaagaaaagggcccaagagaagagcccaaattagggctgccttctcttccatcagcccaacttaatgggtcccacctaccaagtcagcgccagttggcactccataattcgtcactggcggtcccgtcagcgccaaagaggcgcttcttctttccagccccgtagccacatggcatgtcctcattcgctgcattcttccatcaacctatctcattgtccacgcgtgcggcacatgtcaggctcccattggtcccttctcttcttttcctttccagctgccataatgtgtcttttcccatgagcttctacactttgggcttgaggacactcaacccaattcgagcccaacttcctacaataaaagtacattttatggaccattaaattaccaccaaaacactcaatttatcttaaataccactaggcagtgacgaagccagaaatttagttgagtgagggcttgaataaatattaa

SEQ ID NO: 115640 - DNA, 4342 bp, Cannabis sativa
aaaaaaaaaaaaaaactctaaatcataaatctatagaacctttgctaaattaaagaacaagataataaaagatgagcaaaaatactgacctgaagccattggaaattgtagagaaggttatgatattctaaaaatacaccatctttttaaagtattttctctgatggggaagaagataatactaataatagcatattcattaggctaattatattagtgtggtttgtttcggtctttttttttttttgaaaggtagtttgtttcggtcttaaataatataaaatatacaaaaaaatgatattcattaattgaaaaaccatgtaataagaaaaatgcatataaaactttacaatgcattaatagaggtgaggagaggttgtttgaaacgaaagataagataacagtttttcatatctatcaatcaaattgcttaaagagtcaaaaactaataccaaaactaaaacaaatatactacaaatttggctaactcaatgatatacaaaaagctcacataacatacaattgagaattttcaacaatcatcatcatcatcatgaagacggattcgtttgttactttgttttggatcacaatcatgactactttgagtagatttgtgcttgttgaatgggggagaggacgatgcagagtcggttttagagtctagttgttggcttgatgatacagcagcacaaggggaaggctgttggtgagactcttcacagctcgggctactcaatgatgacaaagcttgagaggaaaccaaggcactaccagctttctgctgttcttctaagatcttttgcaagtatctcgcgtgctcctctatgcgcaattgaagagccctttgaacctcaagctgctcatgtaattgtttctgaacttccatttgcattcgaagagcctcggtgatttgaatactcctgtaaaaaaaaaggaagagagcttggattttcattcttaatagaagacaatgatttgtttaatataaaacacaggaaggacaatgctgacccttttctcttgctatcgatttcgaagctacttaatggtgttttcttttcttcaaggccagcagaatccttcttctctgtggtgacaaagtttatgttaaactcattcatttgagacatttttagtaatgaccaaaaaccatcatgtcttccttaccttcctttttctctgggatatacttggcaagtcggtatttctacaataataaaaaggattagctgttaattccatcaccaaccatactcaaccaagtaaagtaagaatcaaatttcattacctgtaagtgacttttaacatggtaaattgttaagccttcaactttcataacctttaatacaccctttggagtagcctctacattcaaaaagcaaggtaaagtaagaagttttaacatccccatcgccatgtcaatacaaaaaggagaatttggttacttactttcagctccatcaagcttgttaacagcctctacaaatcgctcgtggagttcaggcgtccatcgcattcggggtttatgtagagcagcaggtccaggagatgggacgtttaaaagggcgtctacaggtggagccgttgagcgaaaactgtcatcagacatcaatcctatggatggttttggtgaagtctcatatatttcctgaatgaacagaagaaatcaatattcaaaaggttacagcaagtaaaggcaatgcagcttgaacccctaatagaaataatagtatcataatgaacttacatcaactctgggagtttctgcgtggtcagagataccaaagtcaagttcatcagtcaaatattgcaattccaagttatcagtgaatgctacactatcacttgcacagctcagaccatgaaagttactgtgagaatgatgagatgcatccccagataaattaagaaagtctttcatgagagcttctgctgaatcagattggtcctcatcaaattgattgcttaaatctccactgaaaagcaatggagaacttgttgatgcaacagcagaaaccgactggttacacgatggaggtggaagaaaaggcaaattcccaagatgcctttgtgtttctgagctcattgaagactggtataaactagtgcagaagacagaagaccgcgaaaaggaactcttagtatgctcaacatgagaaccaggagacataggagtactactagaactagatccaaaactgtacttaggaggatgtataggagaactaagagactgtgtgcgtatgaacggcgatgaaagtgaagatgaacattcaccacccaataaactctgccctggacataaaggaatgcaatatgagcttgagacttctttggaagcctctccttgtgtcattgaaacaatactttgatgactcatggcggtagatgaaacccgagctgaataatatcctctcctgatttagtttcaatccatactcttttttctcctaaaagaaacaaaaattcacattttgacaaatcaaattggctgcagttgcttctctggtgtggccatattggtgtacttcaacaacttttgcttagtttaaaggaactctgcctaataatccaatccatcaaatgaagtagtatttcctgcaaacagaaaatgacaatagtttataattattcaatgttaatatgaaagaaaatatatatgattatagacccttattgttcctactcaattgattaatttttcttaaactaggagtgcaccaccacactgcagaaaatgatcctacagtcatcattaaatcaaaataattaagttctaatccgaaatgacattgactttttctgctcataagagccacaattatctcatagaaaaacaaaccaaattgcctcaaaagtccaatcaccaaaagaagaaatagtgtcttcaagatcactatgtcaaaaacaaacatcatcaatcagcaaattgagatcacaatcacatttaggccttgtttaagtaaatgcagtattaattaaaaagataagataatattatatatctccaattggaggtggcaacctaggaaattccaaggactcaaacttgttctgagatcacatatagaaggcaacaccagcacctatttgggcactatttcacatatcaaaagattgaaacaaatttggatacatgagtttttaacaaaaatcagagaacactagcaccataaagttgtcaagaaatcaatctaatctgcttagtaatattcaataaatacaaagttcatcttacattttatccctcaagaatgcaaaaatgggacaaaatcattggccatggaaatcctagatttaaacaagccaaacaaaactcaaaatatatgctgaaaataacaaacttaacataacaagtgtagaatgcccaactctccaaaaataaaatattaaaaaaaaaatcacatcaaatcaccaaaaacaaaaactgaagacttttctaaaaaagaaaaaaacaaattgaagacaaaaccaaaaaaccataaagtatgaaacttttttattatttgcttcattacattaaaccaaccaaaaacaaaagaaggaaagaaaaagaaaatacccagttgcagaagaaccccaatcaggaacaagaaggtagatttagataaagaagaagataagagttgtagagaaatgtaaaaagaaaaaaaagaattgagatttggtatttggttattttgggttgcggctaatgattgagttagtgagaaattaaggatgatgtgatgaggtaagccatgtaaaaatggaaagctttcaactttcattgaagggcaagcaagtgagtatagttaaaataaaatttggtatcccacgcgctctgttagaggaagttaatagacgctccaatggtgtgttacattttgaaagtagctggtttgtcatttgtcagatgccaatgtcatctcctttcttcttcatctttggacttttctcttacttattttattcaacaaacaaatatcaattcattttctttctttgtattgatcattacattacaaattggcaaaataatgcaacgagaatataccattttagtccatgtagaccaaccctcattagtggtttttttgaggaccaaaattgaccatttttgtgcttttgttttgtctagtgtatataaatattacgccataaaacccaactccgtaaaattctaatttttttttatatatataaagaatcacttgagaggaagaaatctataacattaaaatgtgaatgggtcccacttggttgaatggtaaccacgcatttcatttgacaacaaatggcggggtctctatccgtacgcatttatactaaagaaaattaattaattaattttgtatat

SEQ ID NO: 115641 - DNA, 1856 bp, Cannabis sativa
gattcatgatattaaacataaaaacatgaccaagaaaattgcaaaccgtttacctgatgagcttgttatactctggaggacaggtgcttaagagtgcaaaagaggtggattgagtgaggagagaagttccctgttcccaccaccactacttctctacttctaccacaaaagctctactttcttgctcacattcaagtacataataatactgattcctgaccaggctggcatgaatcaaatgaatgataatgctactaactcaaaccaagaaaaagaaaaagaatatgaaatcccactcggcggatatataagcctaagctcatacatgcccacattacattctaattctttaattaggtcatctacattcttctatactttcccagatgacctattttgtgtaaaatatcatctgtttttcttattgatcttgcttgcaattcttttttccttttcctttttttgttcaagatgaaaatgattgcagctgtgaaactctcaaatgtatcatcttttcatccctataatgaaaccacagtgttttatttttatttttattttagaactatgattagaaaagagaaccaatgcgttcattcttctttatccccttgtttttcaccacacatctctgaagttgctaattctatagagctatgaaaaggtgtagatgtcacaattcagcaattacctctttagttttctcttatataaatagattgattgccagttggttatacttcacatttaattgggcataataaaaatcaacagaccatctctttataaatagattgatcactcccatgtaaattgttactctctccttgtgcatgatgatataccattataatttcttgaagtgatacatacactgttattagttgaaaacaaaaactacaataaagaataaagacaatcactgtttcaaatcacgccttttactgaaagtcagtctatcaaggaatatatcaagtcatatgcatgatgttgatgtttgtgaactcaattagtaaagggtttgcttcaaccaaaaaagaaaaaaaaaatgagtaaaggatttgcagatcaacccttaaaaaaatagtaagaagaaaaaaagtcaacacaagaatatcatgtaaagagtccaaacaaataaattattagttggcttgagttttggatcactaaaaaaaaaaaaatgataatggcattgagtttgctggtgaaggttcctgggtagagagaaggagaaagaaaagtgtaatacggctaaggacaattttcttcgaatgtgaactttggagaattttgtaataaatagcgaatttgacaactaccctatgctaagccactaaggctagcttagtggtgagggagggatgagaaaaaaaagaaagttataaatttgaactcaagacttttaagctattaattgataccttatgctaagctactaagactagcttagtggtgagagagggacgggaaaaaagaaaaagttatgaattcgaactcaagacttttaagctattaattgattgtaataccattacgttataccaaaaaaaaaaaaaaagacaactaccctatgcttggttaggtgaaaaaatacaatgaaaaaaaaaaacaagagaaaaaaaaaaaaagagagagcttgtttggcatgagaaaaatgagcctatttgacatgggaatgcaagttgtttggctttgagtgggtgcaatttaagatagattgtcagagtgtggttccttgttgaaaatcatggggttccatatcaagactaattgatgatgaatggagtagcccatgttcttatatatggctcaatatttttacatttgatccatgtgggacaatattgtccaat

SEQ ID NO: 115642 - DNA, 1262 bp, Cannabis sativa
aatctgctgatgtatgctcggagtggctcgcctggtcgttgctttacttcgaccaaatctcccaaattcaataggagctgacacgatcttgatatgatcttctagccgagatttaaggagagttaattccttattctgtgcaatttgataaaaagggaaactgtactaggcttccaagaacacgttgtctggcttcctagaaatgcggtactgggaccactttcgggtacatgatgtccttggcaaaagctcgtctgagtgagaaacgaagatgctttccaggaaggtcttgctacacttgggtttggcccaagttatcttctttgggcctactggtggtatttggatgttgaaatggagtccacatgtcccttgccataaatgtagatagcatacctgccaagtttttacaatgttgtgtattgtggaagcttgtcccaatccatatgagtggacatgtgtaggttaaaactaatattcttattgctttacaagtgctagttgattgtggaaggtggacttctgtcttcggctttcggaagcaggtgtagcagtcattttgacggctatttattattggtgcaaaaattaagaaaaaaactttcatcattgatttttgcctccatttcaggggcattaaatgcttgacatgcgtggctgcttgacttccaagctgtaggatgtgtttttgcttttagagaaacgatctggattgttcattttttcttcattttgataaccattttgagtgtaaatactccttaaaactaccatttatcacttttttcctgctttaaattttcattcgcccaagttcaagctttcttgagagcaaagtttagtgagagattctagtagtgaatgaaccaaggatttgacgatctcctccaaatcactcttcatttttgaaatcatctcctaccaaaccatccaccccagtgatcgagtgttttcaaaggagtgaactagtgaatcttgattttaactctgaaatcgattcattgatttccttagacaatcgtcttcgtgaaaggtgtgctcgcttgcacaatccagattcggcgaagatcagttaggagccttcatcttcactaccaggtatgggtctgtttggtttctcgcctttgattgtgtttctgaatccactatagaagttagggtttgcatgttttcctttaagtgaaattatggtttattaggcctgtgaccaatactgctggtagttttaaatgtgatgaactttatgttggaaatattttacc

SEQ ID NO: 115643 - DNA, 1726 bp, Cannabis sativa
taattatttgtttttgttgtacatttatgaaaaaaccccttacttaattatcaaaacaaattgaattacataagccaaaaaaaaaaaaaacaaataacatacataaacttaatcatatagaataaatctaggggggccatggcctctgtatgcaaccttctagtaccgtacgttcatggtgattatggtccacccaaatctgtattgtggtggttcttttcctcatttgagatccattaatcgatccctctaccatcttcattacaatctttctctatctcacctcagtatttattgctctaaggatcttgataatttcctatcccatcccaaattaattttgcagagcattaaatgcatatctctctatcatcatctctcttactatttaaggagtgattaagtaattttttacttcagtatcttgatgcatagcagaaaccttttcctgctaatggtgttcaagtccaggatcctccagctttattacaggttctcctgctattgtagaagcaaagactttctagttagcagtaaattaggctcaaatgatcaagctgcctctatcggtggtcaagactgattgtaaaactttagtggatgaacttaattcttgtaatttgaacaatagtatacttgatgatttgctatgtaatattaaaaactctttatcttttagtcttgccattaagatagatgatgttagaagagatttaatttagctaaattaggtataggattagatattttaaaacttgttagctttgtaactttcttttatcaatgaagcttcaagtttttcaaaaaaaaaaaaaaaatatgtggaggtatagtattacttatcaactctattattttttttcaagatatccttttcattatattttattttgtactatacggagagtgataaagttttctcacaattttttttattagatgatagtactagtttgctttccgatttttatgagatatccgtcgttcatgttcatcgtatagctaataaggttgttcatgaattagttgcacgtagtgtggatggtgaattaggatggattgagagttgactgtccataagagatgtctgattgtgcaaccaagagcagtgaagtgcttatctggttgccctgaccgacctaagagcacgatttgttctatatctgtgaaatcagcatgaatgcctaaagccccagtcattacagtctccctagagactcagaatttagagaataattagcattcattgtatgttgtgtaattaaagaatttatttactcttagcctattaatactagcctatttcgtagaaatggtgatctgaattttcaatcaaagagcttttatgctgcaaaaataattgtgtactcttataagaattattgaaaaactcatttggcacatattcaagtgattctaattattcttaaagaaataccaatcaaaagggagtaatttattatcaataattgggaccgaacatttataaatctcttgtataaattattattcatcaaattcattcttattattttatattatattaaatatattattgtaaaacttgactccacgtcgtgactaaaaatgagtcaatattttagtactttcattgatagctaaaaatatagggattttttcaattatatacttaaaatacaaattaatcacgaaaatcccttaataaatctcaattacaataataccttgacacatcatcaaaaaa

SEQ ID NO: 115644 - DNA, 956 bp, Cannabis sativa
actgttccgtaaacaaattactatacagttttactagagaattaaaattggaatgtagatgctgttattatttgcactaacttggttttgttgctgttttcaggatgatgaatctgttgagcatctaagtgcagaggatctgttaaaaggacatgtgaaacgtgctaaacgggttcgagcaaggtatgttttaattgcattatatctttgtgatcagttgtcctgtagttttacatttctctttcaataggttaagagttaacaaactgttgaatatacggttatggcatcggtgatgtaaatttgttgttgtggaactttttctctacgaagtaaactatcactctaatgctctttattctattatctaatatattggtttataggctacgagaactacggttaaaacgaattgcaaggtacaaatctaggcttgctcttttacttcccccactagcggagcagtttaaaagtgatgcttctgctggaacttgatttaggctctcttcattcaaaatcatttctttgacagctgaactagaagataactatgtagttcttttttttttctttttctaaatactttctttttttgtttcggtgtttttagagtgataattcgagcgttgagaatttttttaggaagagtgttgatagtctccagagttttgtagcattatatgtatgtataataataatcatttatttatgctgatttcattattagaaattacaagtctaccagcaaaaacagagcatggcatgcatgtacaacataaacataaaatcatggcatgcatgtacaacataaaatgactctcgtcccgaagattatatatagggtccctttctttctaccctatcacatggggaagtttttttggccaatagaatgaaatgaatgaatggtacatgttatggtagtatatgtgattttttttagttttttttttttt

SEQ ID NO: 115645 - DNA, 2551 bp, Cannabis sativa
caacagttatattagtattcccaatagttataaactgtcggcatttattattttttatatatattttatttagtattggccacagttttccaccgttggcattaattttttccaacggtttatttgcttcagttctaaaccgttggaaaaaaattttgctgaccttttccaacggttcttataattgactctcttattaaccgttggaaaaagcctattttgtaatagtgagggttatataattgagaatctaattcaatcatgatttcaatattctcataatcatatttgattactaaaattatatgttgttacagattcacttacataccctaaagttgtataacactactcacagggtttgacaaatatacccttacatcaaatacaacaaagatcaagactaaagaagataaaatcagttacaactgaaacagttacaagacagttacaaatatatcactagggctctgcgctagatcagaatcacagatcatatatataaaaggatattttctctcttttgaaagagagagccagagagaacaacacagaaagtaagagacaaccagaagtgaacaacagagaaaaagagagcctttggctgagagttgtcccctcctagtgagctcctcctagagaatcacttgtgtgttcatgtaaaataaaaagagagttttgttagtatcagaagagaaaatcataaaagttgtaaatcaaagattgtaacctgttgatgattaatggattcaagctttgagggcttgacggagacgtagccggttgttttggacgaactccgagatcaaatgtggtatctccatctttaccatttctgtttgtattctctcatctcactcttattattatttctggtatttgtatttgtgtgtgtttgtgttcttgtgactttcgggtttggtatgattcagccgtgagttagtagtattttttggggttgattatttcgggtagaagaagcttgaaaagattagaaccatagaaaccctaaccctaggtgtgcggctgtagcaagaagaagagaagaatataaccccataaccctagctgccattatagtgagaagaagaagaagaagagagcttgaagaaaccctaatactaggtgtggctgtaaagaaggaaaagagaagataaatcttagaaaccctaaccctagaatattattttgtgttactgccatttttgtgttaaagagagaaaagagtttgaaagtttttaaatatttaaaccaaaatctgtagattttgtttttgtccaacattataattaggaattttttttttactattttaataattagaggatcttgttaaatatttgttaaatatttacgagaactgatcaggatctaaagtaatatttagataaatgacaacccactaattcttattataaaataataaaaaaaaaaacctatatttaattaggagcgatactattcataacttcaaatatgtgcagatatagaaaatgatgatttagtaacacttcatatctcgatgttttatatgagtatagtactaaaatattttctgctttagttcgtaactaatatttgccgtgtaaagaaagtgccaaataacaataaagacaaagtgtattagtattcagtaatgtatttactatttagtttcggaagtatatctatatttttttattcgcaaagtatatttattttataagataattgttaaaaaatattattagtgtgcagtactctttttaatatacatttctattagtataattaagtaacgagtgttatataatttaattttaaataaatttttaaaaatatttttaacaaatcataaaataatacttataaaaagtactcggtacaaataatatcgaataacaatgctgatttaataataataagaataataatgaagtattgaattgaaaggtaaggtatatgcgcattactccaaaatcaatatccaacttcgtagtttgagattcaaaatggaatcaaacaattgaaaaaacagaaggtatatatttttggaacattggagttaatgattttgagaaatcattgggccaaagattttgaaggttcacgtggatatgtttctatttgtttcctcagtctgtgagagagagagagagaaaggggccattcattgatcatgagatgacagatgatgatgaggaggaggagcccatgacagcccacgtgatagcatagaaggatatgagatgacacgttcatctctttccattggttattatactcaagcccaaaacacaacaaaccagtggcccaatattcccttttaactttattatggactgggccctactcttttaataatatctttttcgaatttttacaaaagtattaaatgttgggtaaatttacagttttactgtgacactgaattttttataaaaatactctttttatccgtaaaataacaaaacaggttaattaaaacaacagtagaacaattaaaaaatagagaaaattatattctataccatttttatattgtcatcttttatttttaccctctttttta

SEQ ID NO: 115646 - DNA, 2101 bp, Cannabis sativa
  modified_base (115)..(121): a, c, t, g, unknown or other
  modified_base (1956)..(1964): a, c, t, g, unknown or other
atattttttcaaatattaactttaaatggaatattttcaaacatgtcaaagttgagcatggtttagtacataaacaatcactgaaatagtacaattgaatgaaattagacaaaannnnnnnaatttaacaatctcaatagtttggaggaaatttttaacggccaaaaaagttcaaggggcacaatttagtacatgtcaaagttcagaaaaaaattactaattagctaaaaataaaaaaaatactttctcacttatatttaatcataaatatataaaaaaaaaatatgaaatattgctctcatgtcaccctttcatgacttttctttatataaatataaagataaataaatagttatttttagtggatcagttattttttgtatagtaatcattgatggataagaggtattgaaaagtgttttataaatatatatatttatttttttggagagggatacaaactagctttttttaattttatcttttctatgaataatcttgtaaacgtatattattgtcgacgtttttttgttatttcttattgaactcattcctatttccattaacaaaaacaattagtactttaatcatcaacttgaacaatatcaccattcatgtcttcagttatagaattatgatattttgtcaagtttggcacaagagcaagtaaggaaagaaaaggcaacaaactttgaccttcaaagtagtgaaaaaagtttgaaacacacataagctattttgtttgactaacgcgtattgctacatgttaatttaatttgacctttttccatagtactaatttccacaaatgttacaaaaaaccattagctgattttaaattatacacatgacacaactcactataataaattatatctttttttattattatatagtcacaccactcactttcatcacagatatcatcttcaacatgatttcgatttttttttaaaaaaagtaattgttgtcaatacttctattaaaaataaaaggagaataatattatcgaatgaaatttatgagttaaaccgtagattataacactttctttaaaatatttgcgacactcctaagaatatgcaagcagtcaaaagaaatattattgctaaaaaataattccaatcacaccaactaactcaggtcattggacagcagcctgggtacggtgttcaagtaaatgtttgtgtgactcttctccctttcataaaaagtgagtagctattggggaccaatttaattactcacattagctatgtatatttatatatacttgcaagcaagtgtttcaaaataattagaaactaatcttctaaatccataaaaatcacatttgatcattttttaataattcataaaccaaacaataattatcatagggtagagatacagagattcaggatggtggaaaagaacattaattgccttcaaatttgacttttggtaaatttgtgggttttatatataattaatcttttaattaagaaaactattaaaagatattattttttctcactattataatgttattagtgtaattaagtacgtattccatataacttaaaaaaataatttttaagaaatatcgctaatcaatagtaagactgcagctataaattgtactaagtaccaataatactcaatagcaatattccataattcaataggctgctaattaattctcttactaataggttgaccataaaccatgtgaataacttctaaaaagttgtaattttaaaagccaaatccaactatactacttcaattttataagttagttataatataaattttttcatgaccccatcttttaatataattcaagtcaaaacttgggttagcatcactctcgaaggagagcatatatatctattttatataaaatgtagctatacaacataatttttggtttatgtgagaaattattgggtgattttttttaaataaaaaaannnnnnnnntattagatgttgccacgtaaagagtcagcatcaatttagttaattaaatctaaatataattaatccacctaaagttttacaattaataataaatttgttcatattgtttattcttttattaaaaattattttcaaat

SEQ ID NO: 115647 - DNA, 2065 bp, Cannabis sativa
  modified_base (185)..(192): a, c, t, g, unknown or other
atatattaaattaatgagatatcactcagaattctccaaactctctttctgccaccatttcagtagttagaaatccttccagtaaatctctcttttttgaaaagatctgctgtagtatttttttttctttgcgttatgtataaatatataaaaatcagaaattaccacacaataaatattttatnnnnnnnntaaatactgctatatttatcatgctaatactcatcatttattgaagtgatttattttcactttcttagaaaattattttctaaatttctatgattttaatttaattataaattaaataatataaaattatgtatacgtgccttgcaattaactactttttttctagtactttttttttctagtatatatatacattgatattaaaatttagaagtataagaaaagacttttttttagacttttcagactcacaaaagatggtaaaaaaatgttgaattattcaaaaaaaaaaaaaattagaagtaatcctacataactagaacgtgtaagataaagtaaaaaagacttaaaaaaaaactttagtaaatactgaaattgatgaaacaaacgtactaattaaataagtaaatatttttcatatattgatttacttaactaacttttctaaaatttattttaaaacaagaaataaaacttcaactaaacataaatcatattagattaatatatattttaaccactagtgagctttgtaataagataaaccagagcacatatataacattaattaaactgctaccataacatattatattcgtgtattggtgtgctagctagctagctagctaggaaagttggcctgaatcagcgacgatgacgggtttagaggtgttgccagtgggagacccaacgagctcaatggctttaaccacattcattccttcaacaaccttaccaaacaccacgtgtttcccgtcgagccatggtgtttctgccgtacatataaagaactgggactcattggtgccagccccagagtttgccatagacagtatcccaggcccagtgtgcttcttcacgaagttctcgtccgcaaactttgagccatagatggactctcccccggtcccattacctgccacgaaatcacctccctggcacatgaacccagggatcactcggtggaaacttgaccctttgtagtgtaaagctttaccgctctttccaattcccttttcccccgtacaaagagctcggaagttctccgccgtgcgcggcgtcgtgtccgcgtacagctctatcacgatccgaccagctggtgaaccacccacctccatgtccaagtacaccttagggtttaccattattattttgtataataaattaataattaattaattatctacaacaaaataatatatattaggttctttttctttaaagctatatatataattatagggtatttcctcaccgttggattaatttacacgtgtaggtaggcaatcgcaatttcggtgaatattttgacgcgattcatctgataagacacgagtattggcaaatgtcacacgagtgggggatgatgatgctatccacgtccacgtggcagctgcttctgaagttactgttctctctgcaataaaaacacacgagtaagaacaaaatagtaatagaataaaatgaaatttaaaatttatataaaaaaatagttattaacataggtcttaattcgaattttcctttctcaaaatcaaaatataattaaaaaagaaaatagaaaagttaacgagtatctacagtgtctaatatttttaggggtcttaattattttttctgaaagctcgggtattaattattttactttaggacatgtttagtacagtgtaattaaaattaattatacaatttgatatatttgttgaccacgtaatataattgtataattcaaagtaagtgggagatgagatattggcggctaaaccacttgaactttacggtttgtaacacttaatcacaaaaactgaatttttaggggctaaactatttaaacccggattccgttttgctctgcacacctccgtccaaaaat

SEQ ID NO: 115648 - DNA, 3915 bp, Cannabis sativa
tcttcccaaaaccagtggggttttggtgctttccatggccagaaggaccatggaaccccctcgtgtgcatggcacagttctcaatcagaggagagagaagagagaaaaaaaaaacagagagacttagtcaaaatatttttgtgaggactctactaatgaacaagctacatgaaacttttgtagttgtttcggttctactaagtttatatgtgagtgttgcatgtcagttatgttgggatagaatttgccctttcaagattgactttgattcaatttgaaaataataacctactagactttattctaaaaaaataaaataaataaagaaaagaacctattcttttgtattgatttatctatctaatattgataaagtttgatgcagaaatccaccactttggggaaccatgaagtatctgtctgaaaaaattccaaaagatacttcaagcaaagtgcggataaaccgggacctctactcttctgaaaagtaagtcttgtttgatgattaacattgaatgttattcataatacaaggaaccctgatacatattaaaataatctttggctgtggaatttttacccagaattatggaaactgcccccacattgccagactttgccttagccttaaaaccagacgagtaccaacttcctccagtagatgcctcttggaaccaggagcatatgaacaagggccagacaggcttcaaccaactcaagattgataaaagatgagtcgcatttgttacatttggaaactacataattacatagaccaaacttaagtttggattggatgatcattcagacgcagaggttcataacttttgagtgtccgacgttttctcctgtctttcattatagctattttcgtaatataatccattttttatgtctcttctgttcatgagatttatgatgtatctattatagagctgtgtaaaagtttcaattgtaaattggctactgctgatgggagaataatgctctctttccaaattcccaataaggtttgttattttttatagttgagaatttgaacgagtttttgtgcttaaaattggctatgtgaaaagatgttgctctttataaactctatttcttgcactccctagctaattttcttagcggtataattgttaatgtaagaatttttcgtaacgaggaatgtctattatttgtaaaactgtaattttcttccagtttcgtcagtttagactattattgtcttaaataaagaacttgtaaaatcttgtttctatatttttgggtttggatggaaatatgtagcattagttacttttgaattttgaattttcttttaataaattcaaaatgtaatttgtactgataaaattttaaaaaaaatttcagttttacaaaattaggtatttatgttgctataaaaatcattaaatttctgttacttataaattcaaaattttgagtaattatattgctatttacctttttttttttttttttaagaaaataagtaatctttaatataagaaactgaaatcttcaggccataataaaaaagttaagagcaaactctaaataataactaaaagaaaaaaaaagaaaaaaaaaaaaagaaagaaaaacacttcagaaaaacttgataaaagcgcctgtccttaaaaggcacagcttggcaagcttgtgagccttttcgttgaagacccttgagcagttgaagaattctaatatgggcatctcttcttcacttgccaagcatcatgtttgcacttgtgagattaatcgctaactaaacatgttttctagagattcccaaatctcataactcataaggataaactgtctcgactatttctaatttctttatgagcacattgctcatatttgcaagcatataatgtgttgttagataagatccaagtttcatacttttttcttccaatttaagtagcacttgtggcaggaatttcaggagagccatgtagtcttcacttattaaaataatgttcgtgtttaattttcatttcatatagttatcaccagtgaagttttgattagcaagttgtctatatttttttttaccaaaataagggtcattcgagattcaaccacgtgtccagtggatccacgacgaaaggagatgacttattaatattaaaacccggatcatgtaagcttttggaaagcatatcagcacttgagagttagaggcaattatggaggggctccctaattttgattataactaaagcctttgagaggttagtgatctcccgaagcctcaaggatgtgtgacctgtacctactctttgatacatttcccaagacaaagcactatagatgaccccttccatccagatgacaaaagccctcaaaaagaagactcttggggacttacccatacttttctgacattatgtctcccaatcatagcctgttgatggcttatttttgcactatcccatcagctgcaagcacatctagtcttgtctcacaaaacccttattttagaccttgtgcaatacgtctgtttacctaaaaactgactctgtgacatggacatcaatgtttgacacatggcaagaaagaaaacatcctagagttgagtagtcttgaatcatggaagtcgacctaagaggggtccctagccctgtgcccatgttgactctgggaactctgggaactttggatcccactaagctgtttccaattcactatctttcagtatcctataccatgaagaactcaaattcaaggcctggaagctgaaaatacatgaaataacaatctggaagttaatttgagtgcccagcgcccaaattgacaaccctactagggttttggattctgggcccgtcttagtgaaatgagtcaaactttgtactgagacatgataaggcctgtcacgaatatatttgacgcaatgaaagcagaattggagcactgacaatttagagcacccaaagcacaaggtgctccaagctcccagcgccaaagtcgacacattgtcaacctggggcacttctaaccacaatactaaagaactatcccgagcattttctttgctttcatccaaaatgaggaaaccaatgctttcgagggagaaacggatcgacttggaggtcgaaacagggacccaacgccaaggttgacactttgttagtctagttcatatgaagtcttttgggaatattctccattttcgtcaacaattaagattcgagtgctttaaggaaacaaacagagtcgtctgggggtcagaactaggacctagcgcttaggttgacactttgttcatatatttatcatagtaaaaactgttcatatattctcctatagtgccagcttttgtcaaagtcctcatcgtgttatttcacaaactttcgacaaatataccttacacggaggggttgtaaactttgtttctagatcactataggagtcacggagcttgcttcccgtctacgtgtttcctggttaattgccttaggtagaatactgtggcaaatctatattatttagattaatgagggaaggaaactaagcatgtaacaaaatcctggcaaggttcctttcagagagacaaggctaggtttgtgctaacacttagaccatccttcctcaatccaaagtaacaaagctggcccaacatcagacaaacctttttctcaagttgtgataatagagctattggaaacatggagggtttctaggcgtgtttcttttttctcactacttgtaggaaaactgttagcatggtctacaaaccaagccgactgaaatattattaaagacgtgttcccttttcaaggacaatgctgaaaacatattggttgtgccttttgtgagaatgagaactaggttggacatgcagtagacttcaagtagttactccttccaggaaggagggttgaagatgttgggttttatgcc

SEQ ID NO: 115649 - DNA, 5486 bp, Cannabis sativa
  modified_base (72)..(78): a, c, t, g, unknown or other
  modified_base (239)..(240): a, c, t, g, unknown or other
  modified_base (4939)..(4941): a, c, t, g, unknown or other
atgtgtttaatttatcgttttataaagttcatatttagggtgttaagcaacatacttgtgagtagatctaannnnnnngtaaaataaattccaacacatttgcccccgaagtccccgtgcgaacgtctatacggatagggactttaccagctatattgacattatcgggactattgttacctttgcttgataaaaagttgatgcatttgttaaagcactttgtcttgactgtctgatcnnattgcagtagagaaataactgctttatgtgcctttgtgatgggttactgaagtaagtgagaaaaagggggcctacatgtaatacataagtgagttttggggaaaacccttttttcacttttactttctctcactagaaattttttcttgaaaaagctcctccttctctctaggtggctgaacctataggcttcattctccttgggatttttgcgttatttcaacgatcaaagcttcccaccttcttcttcatcgaaatcttattgtgggtaagcttacttgatttgattgatttttccatgaatgcatgaacattatttattattttgaacattctttgattcttgcattagattgtagtccattcagtattttgatccgcatgatagccttaggataaataatgtgtgttttctagatgaaaaaaattgaatttgacattcgttgtgattcttggctctttgagtcacgatgaacatgtttgagtttttgaaaaatcacgtcttttgatccatgcacatgctgatcggccatggaggctttgtttgaagcctggctggccatgggtggccttcatggggtctggccggccatgaggactatgtcccttggctggccagcctttgcctgaaactagggttcttggccagccgtgaagattgtgtccctaggctagccggcctttgcttgaaactagggttcctaactagcctctaggacctggaaccctagccggcaaaagccaaggctccaagcgggcagctagtttttctcccttttttgacctcagctagggtctcatgacagccttggaggtatatataattgtggtcttatgcatggtttgtcttggaaactctgtataaggctagatgataagtctattatggttaattgtgaaattaggacttacggtatgtcttagtgagtgtgtctaagacggtacttggttgttggtcaaccttgcaccctttgttttacttggaagatacccttgggtgttgttgacttgaatatatttgtagctttgtcaggttgctcacctccccttatttcttccatgcaggtagtgcccggtgttgaattgggaaggtgacaattgtgtaggtcttctattcacctcgtacttatggcaaggatgaaatagactttgtgtaaggcaccccgtacgatcctcatgtgggcatggtggccataaggggttgaattagagtggaggaagagacttcccagcctcctgtcgaggttgagccagaggtggactcagagaccaagagctctgatgcagaatccaagctggaggaggtcgctccagtgagaaggaggaggtataggacatgatctatcctcattgaccatcttttgggccattatgacgcacggggaaatccattgaatgggcttggtgtgccttcagtattaggactagatcatgtcctagaacaatctcccaagacagagatattagatgcaaaaccacctaagataaggtgggtttcgcctccttctgctttctccagtgaggccttcgataagatctttacttgtggcctcagggggtgtccattgtgagattcctcgtaggaactatagggcgcgtaagctcctttcgagcttgttcgcatggttggggcaccacctagaacatggggcggtgatgccgctccatcaatattttctggatggcgtagcttagtttaggatgtgcccaacacagctcatgccaaagagcataaaatatatgtcagcgatgtttgtcttgtacagggagcttggttgccctctgcctactccttacgagatcgggtactatttttagttgaagtttgggctgaagtagagcagaaccaactatttttgcttcagccatcttggttatcaatggctaggtgacaccaactgcaaagccatgtcaaaggttggcaagtacgccaagaaatattttattgcacaaggtcttcacagaattgtgcaccatgaatttcagtttgttccgctctttagacgttccatccttactttggaaataagggatagagtgaattacatcctttctttgtcgactgaacagaaaaacattatccggttgagcagtgtggacaacttctgaatgtatagcttacaccttcctgctcctagggttgcgagagtgccagctgctgatgtggcctaccctggagatggccaaggccctaacttagatgacaaaaagtacctttgtctcgtattgtatagagtctagagaggagagagagagagctctccgtaggcgcctagcccgtggggtcccataggtgacacctcccttcacattgggtctaggggcccaatttttgatagacctacacgcctcatgcctacatctaggggcaagggcaaggctgtagtcgtgagctctaatagctcttcttttgatgatgatggtatttgatagtttataacaccatgcttttattcttgtattgaatatttttgaatgcattctgactttgctgctttctttttgcagacacgtcttccaggctgagaggtcttgcaggtgggccttcgaatgagcctaccgaatgggtgaggaccaaggtggccaggacctctcgcagtgcagatgctagtggtccatcattgcctccccctccactagggcctacacctgccaggcagcctatagttcagcttgccgaccaaggtacatggaggcccagtagaggagcgggatcagctgctggtaagaaggctactgagtcagccactcggcatgtagagagggttatccctttcttggatgaggctttgcatgagttgggtgatagtgtgcctgacaagctatactctgccagactttgggacctttctctagtgagttatactttcagctttgttaatcttcttgacactgtataagctggtcgcccatggtgttgcttgcttgtggctgaccagccttgggcatccatacagggtctggccggccatagcagtccaaggaggggacttgctatctagagttgactgtttgacactaatgttgttttgctttatttttaggccttgataaagttgagctcagctcgtgacaactttaaggggtcttcagacgctttttaggagcgtgtgaaggtcttggaggcatcccttgccgcaaagacaaagccaattttgagttagaggtccttctagtagagaagcagagaatgaggaagagatagagaatttgtgagacacttagagttttagatcaggttaatttctagcttggaggcaacataggttttcaatcagaggttaaggcctttatataggaagccttaaaccctaggtttacaattcaaatcccttaacaattgtatagtttgttagatatttacaaaagaccaaaatgcccttgatttcagatattaatcagccattctattgggcttttggagcccaattggcagtccattactcctggccacgtgtaagagtgtccagtgaggcctgtaaagcaatccttgcccagtcaggcccttgtgctggctaggctagccggccatggtgttgtcactgggctggctggccagctcctaagagtgagctggtgtgtcacttgatccccgtttgagtgtcggggccttcatttgctagggtgctgacttggccttccttttagtgagttgtaatgccacatggcgctagttctgtccacgtaaacatgccacgtcatgaggataaaaattgggatattattaaaaaaaataattttgaatgattaaaaaaattaaaaaataatttaaaattttaaaactaattaagcgatttaaaaaaatatattttgtattagaagattcatttagatactaaaaaaatatattaaaaattcaatttgtaaaaattaaattttatgggaacaaacttaaatatattttgtttttatcaaaaaatatagatttattttaagtaactataacatttttatagtttaatttataacgttttcaaaataattttatattttttattgaattttaattgtttttctttatttattaagatatgagtttataaatataaataagtgtgattttttctttaaaaaatctcagtttatttaaattatttatttgatttttaataattttggtttaatttcttaagatacgtgttgataaataaaataaattttgatttttttaaaaaaataaaattaatatttttattcgattttttaataatttttattattttttctaaattaatagaatattataattgttttttttaaaaaatagaatattataatttttgaaataatttaacttttaataaaatggggcaaaattttgtattggttaaagtttaggggataaaatgctaatttttaatgataaaagaaacggaacctaacaaaatggtcataattatgtaactgatatattttgggaagaatttttaacaagccgtatattttaggggcaaaatcaagtagtcccggaagttcagaagacaaaaatagtaattattctttaaataatgggacttatatttacaccccataaaaatatgaatacaccctttatctaagttcactcccttttattcttaaaagtattattttttataaagacacccccattttattgaagaaattacattgtatacccattttattttacttgttttaatttttacctcaattttcatattctttaagatatactcannnttatagatgatgtccccattagactccttaggttaatgtaaattatacgctagacttaagtaggaaatatgagtatattgagcaattcactcataaaagtgagtaaattttaataaaatataatatgagtgtattttttattaatagatataaaaaaagagatatttttcaatttatctccattttattacaaaaatagatcttattaagtagagagttacaccccaagtttcctaaaaaaaaaaaaacaccatcctatttatttagttatttttcttcctcattaatctctttccctctaatgaaatttcattcagattgaatctaaaaaaatattaagaactcaataccaatcaatagataaaaaacgaaaatgagataaaagcaaacataacaaaatacacaagagaagatacgttcaaagaaaaaaaataaaataaaacaattgagagaagtaagcaaccaaaaaaaaattaagagtggtatataaaactacttgaggctagctcaaatggccataggtgggtgtgtgagtgttggaggtc

SEQ ID NO: 115650 - DNA, 6032 bp, Cannabis sativa
  modified_base (481)..(509): a, c, t, g, unknown or other
  modified_base (4661)..(4667): a, c, t, g, unknown or other
  modified_base (4859)..(4860): a, c, t, g, unknown or other
gaggcctcaatcatttatctttatcaagccaagctcaaataaaatcatcgtttcacttctaaatacttatagaagctataggttcaatatctatgattagcgtcactcaattgcacaatcatgttctcaagatgtatgttctcagctagttaagctttaatgaacaactctaagaacataaataatataattgagatcgaacctaaccatcttaggattaagatctatagacctaagatcaaccaatgacattgacttagaaagatataacagttagtttatgatatcttatccaagttcaacatcggtccaatccaatgtgaaccatgtgaaccatgtaacattggcccaagttcaggacttaatagaatttatacattaaatatataatcatgaaataaatcatttgaaccatgcaacataaaataatttatgatcttttattaattagtaaaccttattatattaaaatgggttttannnnnnnnnnnnnnnnnnnnnnnnnnnnncttgcactaatataaaactaaaaatgcatttcaaataacctcaacactttcatatccagatcaagtgtagtatgtagtattctctctgcaacaagatctgacaggttgtattcaatacaacctttcctttaccattacatttccttaatcaaaaaatccttgatattgtgaaattcccctctatatggctactcctctagggatactagattctttactttttggcaactacttctgtgttattcaagaagtaactagtagttaattcattattgggacaatgccaaaaatcgaatcgaacttttcatagggtgaataagtatccttcctacaactttaacattcagtctcactggtagacttagaaatttcagataggtttttacacttctccaaaattactgttccacccccagcccagagtaatcaccatctcattagtaaactttcttgcattaatgcaagtctataaattcgatttggtgtagtctaagtgttaacgcaaattttcgttaactatagtaaagcctaaattgtgatggatttgtacaaaaaataataacagtaaagaaaaataataagaactcaataattacaaagcttttttatgtggttttgcagttaaaattttgcatagtccacgagtctatcttattagatatttatgatacaattcttagggctttttctcttaaggtttttcgtccctttttcagtgtgacctgctcctatttatcgttacataggagggcagttaattacaaatcagaccgatatcttacaacaataatcccctgaaattgtgcgatttgattacgttccacgtaaactaaatgcggttattatttgaatatcacacagctgtgattggtccacttttactcgatcaatgcatacttgtattaaatacgttgtaaagggtatcattctgggacatctcgtagggaacatagaaaaaataaccctggtagtgagctagagcttttcccatgtcttttcgaggttaataatgtgaatctcgtcgtttatgctattgaagacataacacttcatctgacaatcgcagttcttggtgacaaggtgaacttcagtagtcaacattatttaaatgtcagcttctatctgagagagctaacttgacggagctgtcgttcttattgaaagatgtttggagctgattagtgaaggtaccatgagtgtgccttcctatagcaagatggatgcctcgctattcgttgtttggattcgtctgactattatgcttagtttgtataatgtatattatacgctaagtgttctaacaaccaacaagtctcgcattcatctctttatacctagcgaggttaatgccttgctttgtattaatgatgtcatccttgagatcgtatcttcatataagaaatggttttctggttaatatgtgaattaatagtttgtatatctatatctcgccgaagacttcacagttagcaagttatagatatactctatcagttcagtatttaatgagttattctattttaatatcatgtaatattattactattatattcattgatttgtattctcccaagttgacacgtggcctactctaaagtgccagctgaatttcgggtataacaattgccccttaaaaagctttttaataaaaagtgcttttttaatgattacagagggtatatttgtcataatccctatctttgacattcttcctgcgaatttactcggacttgcttttcgactctaggtgctcaaaaaacttatcccgccggctgtcacgtctccattcgcagaagtctccagcatccaactttttgaattcatacattaagttcttttccttgtgaaatcgttcatattaacttgtaatttttaaagtttcttactaaatttttatttgtttgcagcggttccttggagaccaattcctaccccacggatagctaagcgtcacaaaaccttattgagcataacctatgggttgcgagctgcagattttttgctaaacgagcaaaacctaaataacgttggcctccttgcttcggacgaatatacttgtgattataaaatacccaagtatacctcgtggcaaaaggtccccgtcccagaagaagaggaaagggatgactttgtggctcgcgcacactatctcgagagagttcctactcggggagatggaagatcccgaggtaatcaatgtgggtggtcacccacagtgcttagggcggaatgtaataccttagtatcctttcgagatagtcggtataattttttcatttgaaaccctctcctcatagatcgtatctcccataggttcgatagttggtacccacagtttcatgttcaaattagctgtaacagctctttcttcgtgattgccaaacagtatggaaccatgttggatagtgcgagtcacatagattcaagatgggacttagattcactaaacccttatgacatatttaagatcacaggatcaagggagtttagtaaatattataatccttccttgccatcctctgaagaatatgataaccctccttagtgggagttcttccacattcttattcattttttcttagtgttaatgaattcttcttgcttcacagacacggacatggatttggagaatctattcaaaagtcctccccaagctgacaagagatccaagaagagggtaacccaagctgatgaggcttcagattcgattaaggaacccaaaaggactaagaccaaggccaacaagcaaaaaccctcgagccaccttactatcgacgccgctaagtctcccaatgcaaggaattaggtctctgttgcagggaatgccgaggaacaacccactgggtcggtacaccaagagaagttttttggttctcgtctagaggtggttctcctcgagccttcttgtcctctacccccgaagttggaattgaggggtcataactaagctcgcagcataataccaatagttggcgtaacctcttgacgcttggatccatgggatcttgctatccgaggcagtactgaagacttgaccaaaaaacgttgtgagcttttgcatcaggttaatcttctgacttcctcgtgtccactcttccttaatttgccctctttactaactttagtttgccctttcctcataggcttcttttcttgagactgagctttgcaaagttagggaacatagggatgtcgtggccaagaagatgagcgattctgaagttgaggtctctcacacaaaagaggaagcaagaaagcaacatcaactggaccaacacaagattaaggaactcgaggattctcttaagtctctccaagttgatttcgttaaaaaacaagttgatcatgaccaaaaggtcaaagaattggaggctgaaacaaaagagagggtcaaaatattggtaggaggaccatttatcaaatttggtcattaaaccccgagttggactttggctttttgggtgccaagccttaggatatgcttgccttttgcgagaagactcaaaaggaagaatcgggcgaggaagaggaggttgaagcagagcaagaaggtccagccaagtcccctataataatgtagacttggttttaagtatattaggaaattggcccaaaggccgagacaatggtttccccattgtggcactttttggaaagagaaatttgcaaggttggatgaccaactttgcttttattttatctttattaagtgcttcatacttttattcttgaactttaatatatacttgtttgcttgcattttcattgacaatttaaacaatcatattatgatcaaataccaagtactttaggaatttgcattgctcatatatctctttgataatatctaagtatttaattatatactatgtgcgcgagcagtttattatcggccatgcttttgatctacgagcaattatcaattctgcctcacaataacaactataatctgtttcaagcaaacttgaatatacttttaatgatttatcactttgtatatttttgattgcttatatgaatagttaaattgtatattcatacattaggtttaagtacttttttcaagacaccttgatgtctcgtttaatactttcctatacaatgcgagccgttagtatgcagcttcacatgtgagttatgagttatatctcnnnnnnnacttttgattttcctttctcgtcaaacaggattttaatcaaaaagttattcataatagttcgatcctccttctcgtcaaaaaggtttgatcaacaagaacttgaaaaaagaatttaaaatttttttaaagttggtgggttttcactatatcatgtatttccagataaattctggttaatcatacacatatgnncctcaagtaattttaaagagtaacactttaaaaaaagaaatgattcactttattcataacagaagttcaaaatattacatcagaaatgtgagttacaatcatcagtttactggtagtagggtcgcaaatgttccatgttccagtagttcgttattagcgagccatttagctgagccaatttgtaaacccttgttcctatgaaaaaagttttccccttgttttttgctcttgcagctcctactaaagctatggcaaaaacaaggtaagaaacgaatggaaaatcctaatatgcaaccaagaaattgaggaagaagggatcgaatgctggtacaactgagattcgttcacaaataatggaagaactaacctgtattgatctattggagcaatctgaagatgacgaggatgagatcgaagagttgcaggggagaaggggattggaatcgaatcaagatcaggaggatttattcgaacctccactgtctccttgaagctcactgaaagagattcaaagaatggaggatgctcagaaagactttttgagcttcgtcaaagcaaacaagcaatgtaacagtaacattgccaaaggtatgtctataactccacctgttctgtgatatacaaatgtaattcgtaatcttgaaagctcttttaagagctctagatagggaagcaaggtcaagattgaatgggaggacataaaagaggaagttacctattggaagccctctctggtgtgctatgtcctaggataaaatccaccattgcacgtcttttagggttttgccaaatgactgtggaatctgaaggtagacaaagtaaagatgctggcatatggtattttcattatcagatttaactcaattgagaacagggattcaatcttgaatgggggatacatatttttcaatagaagaccagtcataatgaaggcatgggattcgaacacaaactacaaaaaggaagatgtgaagcaaattcccacttggatacaacttgaagatttggatctcaaatattggggccaaaaatccttattcaagattgttggacagctagggaatccaattatggtagatgttgtcactaaagaaagggagaggctcaactatcctcgggtattgatagaagtattaatggagtaggtgttggaagttattttaccaggaact

SEQ ID NO: 115651 - DNA, 2550 bp, Cannabis sativa
  modified_base (2459)..(2468): a, c, t, g, unknown or other
aggttaaaaaaaaatgtaaccatagggttacaataaaaatgtaaccattgaatagtcacccatatagtttatattatagctttataattatgatttgctcacacaatattaatatataaaataaatatttatttcctaatgaatgacatatagatataaacacaatatatagtggccggcaggggggtttaaaaaaaaaagtcaacttatgctatataaagaattttgtgtacccaaaaatttagtggtccaatttattatatttattttgtctaaaatatatacataatatttatatatttattgtcacaagtatcatagtctttttctttctttttgttcatgaaggaattaatatatatactatagttgtattatgccaaactctccatatatataatgattatataaaaatagtttttcaattagttattttatccttttcaaaaaaaaaaatagttattttatttttctcaaaaaggttttgtcatattcaattttttttcactcgtatggatttttctcattggataaaagatatgtatataatattattaagtctaaccagttgataaattccacacgtatgtttgagtggtcaattattaaataattttattaaccaaaaataaataaattaataaaaataccaatcacattcacatgtggcatattatataaatatatatataataatgaagaagaaaaaatgacttctgtttatcaatatatatatatccttggcttttaatgcagttgatcttataagaaaattttatattatataaaatcaatgattacttgtaatcaaggtcatgctctctctaatcattattaagcttcatttttattcattttttatctaaccatttaaaccatgttatttattgttcttgttgggttttaactattaattaattattcttttagttgtgttgtaagaatattttttggcaaattggactgtttgttaaaaaaatggtatttttaaaaaatactaaaaaaatatgagtaaatttcattttagatcgtgtattttataaaaggtactgattggatcctttgttttattaaatgataaattagaccttgtattttttaaaatagtactaaataatactgtgaactgattttttttattaaaataaaacttaataataagcagatctagaggtattatgacaaaacttgttatattttctgtatgtgttcgtgttatgaattatcttcaagttagttatatcaataaaaaatatcgaaaaataagttcatggtattatttatattattttggaaaatttaaggtttattttgttatttaactaaacagagtgttcaatcaataattttagactgtctaagaaaatttctacttttgtgcccatttaggggtggactcagaaattttgtacaatgagggcaaaaatatttaaagggggattaaatctaaaaattatgacatgataaaaaataatttacaaaaagaaaatataatatagaagaaaaatacaaaaaagagagtataaatataaaaatatctgcaaaattaaattataatttttaattttttttttttaaaaaagggaatgataaataaaaaagtttaatggttcaaaaaaagaaaagttaaatattaaaattttaagataggcatatgcattgtatgtatctattttttttattttttctttgagggaattatgcattgtatgtatctaagctgatacaaattcatgacaaatggcatgtgtgaataaatgcttatccattataattaatgaatgtcaagggcatgcaattctttgaaatatgattagtactataaatttatgttatatttaattgtgtatatatattttgtgaaaaacataataaatctgttaaatcaaaataaaacaaaattagatacacatttattatataataagtaagatatatattgaaacaaaaataaacttgcctatcaaattgaatataattataccattatacactgataaaagaaattatcaaacaagctaatgaaacaaattattcatgaaattggcacgtttataataagaaatacatatatattagaataattggcggcgaaattctcttatattttaattttatactcttaattttttgattatttttcttttatggcaaaattctcttaatttcacttttctttgcaaatttgaagcgcccactactaaaaaactaggtttttttgaaatttttaagcagtcggctagctattgtatattgttatcggtctcattaaccgtcgcctattcagccgttgcaaaaccaggtagaataggcaatagtagaaatcgtcgacaaaaaaatttaccgacgagttaaaattgtaggttatagtacagggtcggccctaggcataggcgggctatataggcccatgcctagggcccacactttctgggggcctaaaataaaaaaataaaaannnnnnnnnnggcttttatttaagtaaaatttaactgtattataatcaacaaatatttatagcttagttggttgaggtgaatggcataatgt

SEQ ID NO: 115652 - DNA, 2941 bp, Cannabis sativa
tatttttataaatatttgtatgtggactgtataaatgtttaatgggccggcccaaagtatttttgtaattttttttccttttttgtatttttttgtttttttcccaaaaaaaattcacaatattattattgtcttttgttggcctttttttttgttttctagtaaaaattatttcagaggaggaaaactatagtacttaaaattccttttatatctctctaatcttatattaagcctttttatgatatgtggtgcttccatcctaatagataataatattcaaataattttatatttgtaaagtggcatgcttgtactatttttttttttttgacatatgcttttactatttttattttcttttgtaaatgaaaataatttttatttccctcaatttctaacaaatttcaaaactttatatgattaagggctgctttcctaaagctctctaaaaccaaaagtgagttaatgaacatactatttggatttttgtttgtatatgcgtatagagaaatgacaaatttgaatttttgaatggttgactttttttttttttttttttacaattgaccaattgtttattgatgatgtataatttatagattaaaaaaataaactatgagcagtggtataatgacattgtgcaacaaatgagtggacattcacatggaaatatatagcaattatctatttcccaataatctttagaagaaataatttgaggacaaaaaattcaacaataatgcaaggctcatacaatgtcatatatattggtgatgagatgtgttcattaacattatcatacaagggtaataagttaagcaaaaaaattaagcgattagtattactatgagtggtcatacttttattatctcaataaaaaaatatcgagtttgatatatcttaatttaataaatattataaaaaaccactaccttataatagtgtcgtgcataatactgataaagtctgtttagtacactgtgttgtaatgtattatattgtattgattgtatcgtgctgtattaataggttgtataaaattatactgtcttcaccataaacaaggccctgacctcactcttccttagattcagcgccaaatcctagcccaagacgcaaaccccgacctcggactcgcacgccaaccccgaccccgaccccagtcccggacctcagacacaagatactgaccctgattccggacctgaactcgaacccgaactcagattctgtccctaaccccagactctagcctcagttctagacccgaacctggactctagcgctggccctagctccagacctgaaccgtggcctcgatctcgaccttgaactacggtctcgacctcagactacgatctatgatcatttttaaataatataatacaacctaatacaaatcatatgattgtaataatttatataatataaagttgtatccaatgttcttacccattatacggccagctaaacggagagttagtgtctaattataacaatgctattcaattcaaagtgtgaagaaagaagtcaaaattgaaaagagggcaattgatctagttgtgaaatctcaaatgaaatggaaatgaaattatagtaaggtgagctttttctttcatggggaattgagagaccttatcccatgtcattgttgtctacctctttcggcattcccttttatttgtccctttggtgccattgtacaaataaacattttatcaacacttgtggagaacaactactataatgtcaaacaaaatgttggctaatgcttgctcaagttcaggcaaagtggtttggactactctaaaagtccttgtaaatattatataataataataatataagtttaatttgtatttaattgatttttttatattgttaatctagttactaatgtgtgtgagtctcattttgtctgccctcaattttcttggtcaaatatcaatcacactcattagtactgattaattctaatttaaatgtgtatattttgctttggtgcatgccttttgagttgctatgctatataatcatatttattacgagtgagtgccttgagatttaaattttcaattgggagtttaaaattgattttttttaattattattaaaaaagatttttattaatcaaaactgaaaaattgctacaccaaccagcacccaataaccttctccatacacttacatattacacacaaaatcataaattttttagtctcttttagagatttttctcctatcaacaaatttcaatctagctttcaaaatcattctaatcatacaatctatataggaaatcataaactttttctattaaaaaatacaagtactctgatttcaccaaatgaagtactgatcccacataaacaactgctgaaacatcaaaaaataagatgcgatgtctctttaaagaactctataacagccaatcaaagtaagtatctggccaaatgaccccttcaagccaagattgaataacttgcacaattttcttgaagaaaggacactcaaagaaaaggcgagtatgttagtcatatcctatatcacacactaggcagagctgagaattgatagtaatagtcactaagtgatctttagttagcaagtgattatgatagacgccaaagaataaatttatactttggtgtggataatctataccaagtcaccttacaattatccacatttgcataaggaattggaaaataattatagagcttcctaacgcgaaatctccccccttttccagcctccaaaattgcatcttgagtgaaattatttttgagattgaggactttgcgccaataccgacttacatcccctttcctataaaaaaaactttatgacatgtttactaataagtaatgggaatcaatagtaaggtaatcattcccttacatttgtttactttaattattaaaattaggaaatgtag

SEQ ID NO: 115653 - DNA, 2414 bp, Cannabis sativa
ataatttttccttcgtggttgcgcccgcatgaagctcccatatggcttaactatctcatcctcaggtgtgtcaaataacttgtgacaaaagttttctgagtgtccaattaaaccacatataaaacgaaacgtaggagcaaattcatatttaaaattagcataaaaccaatcaccgcctgtttttttaagcttcatacgccgtttcagcgggatatcaatgttcactgtcactcttacccgaagaaattcacgccaaagaccattataattcttaggatcttattccacaaagacaccaatatagtttgcagctgtaaagacaaccttctccgtcataaatcccgtagaaagaccatgaatctgtacccacatatcaagctgattaagctttacagctttcagatctccaccccgcgggactctaccaaaaatcaagggtagccgattgaatgtccaagggctgccattaatgactcgcttgatatcgatctcatggtaaaactgaaaaagataaagattcggccccaattccttgacaaacaagccttttcccggcttccacagcccagccaaagtgtgcttcatggcgtcaaaatctattgatctagcattcaaaaatctccccaccaaacactaccggtcatccaccaggatcgcctcctccacatcttcctcaatctcaatcccacactcctcctcatcatccaattctatattcccatattgattctccatatgctccattgcggtactgctcgatgccattatccaccaaaaaaaaaaaaaatcgaagccaagagacaaccagcgacgactgaaacaacgtggtaactgaactccacaatctcaggaacgatagaaaaaaccagatactattcacgcaacccagaaccaagaaaagcagtcccaacacacaatcctcttctcaaaacgcaatccaagacaatcccaatcgcaagaaccagtcaccgagggaccctacacactgatgcaatcccaaaacgcaactctctgctcaaaccgcaagaaccagtcgctgagggagatgacactctcgacgcaagccaaacaaccccagaacttagcctagatccttctggaaacccaggagaaacgacgagggaacctacactatcgacgccgtgttccaccgatgagaacgcaacacccagaaccaagaacgccagtcacaagaagtcagtcgcaggtgcagaaaacaacccagaacccacgagaatcattcccaaacgcagccttggaaacctatgacattacaaagaaagaacctacacagtcgacaacaagcttcgcctgtgaaaacgcagcaatcggaacgtgaaacaaacagccgcaagaaccagtcaaacgcaaaaaccagaccttcgaaacttgagagaagactctcacacatgccagctgacaagacttaattgcttaattcactcgcgcttttaagtcctctggtcttctcttattaatacccatatatatatgtaaaagactgcttttttaatgtttcccttaaaaaatgtatatttaattacaaagattatataattaagttagttgaaagtatttttgtaattattttaatttacaggttatataattgtaaatttcccatcagtcggattttctattcgctttaaaccccgtcagatccaattaactgacaagtcgacggcgtgtgagtgatcgggagctccaaattcgtctctagacagagatagagatcccgggatcggatttgcgaatatggagaatccccaacctggatcagaccgagacaagtacacctcctcctcctcctctaccgcttctcccatatctgccgtcaccaatttctggaaaggtattcgcatttgtttctttacaaaataacatcatctcgataaatttgctatagtttcgtggtaatacttctgatttttcactcgaccttgttagcattagacaaatcacttcttagaaatatttggagttagaattgaagtagttcgcctttcaaaagaaaaaaaaaataaaattgaagtagttctatttgaatacaagcgcgagaaccggaaaaagaagatgaatatgagaacggaatttttcatgctaaagtgttagagagtccaatattgtgtggaaagataatagaatatataagagaatgtgctactcctcccattgctaattggttttgttggttttgtgatggaacctcattcatcttattcctaaattctaacataaaataatctatttgtcaatacaaataatttgatttatctgaagttgaggttttaatagtataatatcaattatgttgtatctttcttcttgtgaatgtatcattttgatcaagttgaactggagtagtttgatttttttcaatgaaattattcattgctcaaaaaaaaaaaaaaaaa

SEQ ID NO: 115654 - DNA, 1486 bp, Cannabis sativa
cagtttcttcacagtttttctggtttttttttttgtaattttctgtttagatcattgcagttcttcttttccagttaatttcactggaattaatggttttattttcctcgttttggtttcattttggttattttgctgatttgaaaaaattgagttatgttcatcttcatcgttcgctccgtgcagctgaaggtttagtgcatgtggtatttttataaatatttgtatgtggactgtataaatgtttaatgggccgacccatagtatttttgtgattttttttttctttttttgtatttttctgttttttttttccctaaaataatatatatagcatttttttgataaatatttatagcatttaaatatttttagatgcaaaaattcttgtcccaaatgatatggtgtatagttagagcagctccaaacatcatataacattttccattctaactttggcacatagctgcaccaaatatacattatattttgtatgtactctaattactatcactctttatttttactttttatattattattatattatatttaataatatttaaatatatatcattattggtaagtttgtattaaatctcaaagagatgttttggtatccttctatccattttgatatacatgagagttttttagtctattttcttataaacgtgtacgttgtagttatttagaaccacaagtaaatttttaaaaaattctgaatagtttacaatgtcaaaatataagcttcaaatttgcacgcatggttgttttttctcaaatgcgtgataaataattatttgaaccttatttttcagcattttaaactatttaagaattttctaaaaaatttacaagtagttttaaataactacagcgtacacgattatgaaaaaaattaagctaaaaaactttattcaatgcggaaataaatataagagtctactagaatgttcattttgagagctgtactatagaatttttcattattattgataataataatataaaaaaaaaagaatactctattttatttaaaaaataataatataataaataatattattttggtgtaaattatggttgtggttaaaatttaagagtctatgacatcatattttgtgttggtgtaatataccaaatttagtgtcttaggttagttggagatggcctaagttcctaatcgttaattatgttagaggaaattagatgacatatcctttttaaggtagtccatctcatttctacctcttttttaaaactcattaatttatacccttttttctaattattataccaattatgccccttctgtttcatataattaacgtgatgcctccccaacatgaatacccactagctattaattaaggtgccgtttggttacacttttgtttttcaattttttaatcacaaaatgaaagtaagatttttgtttttatttttttttttgaaaaataaaaatgcgttctgtaacaacttt

SEQ ID NO: 115655 - DNA, 1985 bp, Cannabis sativa
acttcaaatttcttgtattgataactaatcagattgtaatgagtttcatttagggcacaaaatccaacaaatgcttcccttgaaatcaggcatgatgctagggaggaaaatattcaacataatcaatatggaaatttgcatgataatgggaaggatgttgctcgtgatttgggatttgttaatataaagtcaaatatggctttaaatgagccagttatattggtcaaagagaataatgctttattctcctctgatatggaattatcaatttctgaacttaaaaggaggcgcattgggctaactaataacaatgggcccactgagcctatagtggaggatatggaatatgacataaatgcaaatggggaagaatcagaggtaatttcaaaaaacggggaacaggtgggtgctggtgtccaggcccaccaaacattatgagtactctgagttggaactgtcgtgggcttgggaacccacgtgccattgagttcttggaagatatttgtttccaaaagaagcccaaattccttttcttgtgtgaaactctttgcactaaagagttggtggaccgtgtacgtgttagacttggctttgagggggctttttctgttgatgtaaatggtagaaaaggaggactttctatgttctggagattaaatgatgaagctaagatgctgggcttctcccaacaccatatcgacttggaggtaagtattcaaggtatgagagtgtggaggttaaccggtttgtatggggaacctaaccgacaaatgcggcatagaacttggcaacttatttgaaatctttctcatgaatcaccacttccatggtgtgttattggagattttaacaatattgcaagtaatgatgagaagaaaggagtccgcccatatccttctgcactaatatctggttttcaatcggcccgtgatgattgtcatcttatcgacttggagcttagaggttatccctttacttgggaacgcggaaaaggtgctgaccattgcattgagattaggctggacaaagctaatgtaacacatgactggctggatatttttaatcactcaactcttaccaatattggctatacctgttctgatcatgcacctattttcttgcaacccgaaaccatatctcaggctgccccttttcattgctttagatacaaaaatgtatggtcttgtgaacccatttgttctcagttggttgaagattgctgggctaattcacaaggcatacctatatctgtcagaattaaaaattgctatgttcaattgaagattggggaagggagaacttagggaacttcaagtatcgtattgctcaaagtaaaaagcgcatgtcgagaatgaaaagtcagtcaaattcattctcgtatagtgattttgaaagcgaacagaataattattttgagcttttggctcagcaagaaatttactggaaacaacgatcgaaacaattttggctccactatggcgataaaaataccaagtactttcatgcttctgcaagtgctaggaaaagaaacaatcaaatccgtcaactccaaaattctgatggcgtttggaccgattgggaagatggacttgatcaggttattgtcaattattttattaatctttatactactagttgttcgacaaatgctttggtgattagtgagattaattgcactgttagtggtagtcaaaatgaagagcttttgaaaccagtttcatgtgaggaggtgaaacttgctttgttccaaatacacccggataaagctcctggtcctgatggcatgggtcctttttttttcaacatcactggagtactgtcgggttggatgtctttaaagctttttaagatttctttgattcaggctccttcccgaaagagctgaatgaaactaatcttgttttaatccctaaaaagaagaatgttgctacaatgggagatttaaggcctattgctctttgtaatgtcatttacaaattgatttc

SEQ ID NO: 115656 - DNA, 2146 bp, Cannabis sativa
aaaaaaaaaaaaaactcatcatgtgattttaaaagttttaaaaaaatattgtgaaaactttaaactcaaataacttgtaagtataaattattaaaatagaatagaaaataagaaaaataaatagaatagaaaaataatttctagaaattttcaataatgtccaaataataattcgagaccgaaatattataaacttaacattggagtgaattaaaaatgaaaatctaactataagattgatcacattaaaagtgttaatttttttttaaaagcatattaaataaaaaggtcttaagattcaaaacaaaaaatataacaattgataaattcatagaaaacacatcatgtgatttcaaaattattgccatgacgattatatctcacttatagactacattcaaaattattgtcatatctcatttgtaatcatgatctttcccagcaggtttgtacccaaaaaattaaacaataagttaattacttacttttatacacagtaaatttgtagcttttatgtttttttaaaaagaaaatgtacaaaataaaatctattaattaataattagaaaataaatacgattgtatctaatcaaatttaaatttatacatttagatgttttaattaacatatttaatttttggattttttatagtcatttaagtaaagagatatctttaaactaatagtaaagaaaagattagtgttaacgcatattcttgttaagtaaaattaatagcttttagcaataaatacactacaaaaataaatatataattaataaacaccagatatttttacgtggttttatagttaaaatctacatactcgaagagtccttattattaaggatattcttgagtactaaatacaacgttaaatttttgaataagtaatcttttctctcaaatttaccatcccccttttcccatagattctatccctatttatatgaatataggtaggaagttactctttttgggattgattcaaatataacccttcatgaaatgtggataatttccacgtttcatttaatcacatgtgggataatatctaacaactacctaatcgctctttatttttatccgttagactgttattgctgacttggaaacttgcatctcactggatataagttatctttcttgtccatcttaataggaaaaaatgctaagtgttgggagatagctcacctcgtcgcatttcttcattcgaatcagtattgcgaggtgatcgtcttgctatgtgtaacgcgaggctattgtatgctattatatttatctgctcgggtggttgaatatcaccttcatgtttgtatattttaaggcaaacatgtgtctcgtcaatctcagtttaatagttactatccttgtctcgcttaagacttcatagtcaacgagtttgaatattatctatcaaacatttatttaattgtaacaagttatttttatctacatttattgatataacattgttataccattagagttgattcatattccttctgtagaacatgtgtcagtttttggagtatagctgaatttttggtataacaattgccccctaaaaagtaatatttaattaaaaagaactttttaactgatttcaacggtataatcgtattaacccatttttgagaaattgcatgctttgggtttttagcggttcagaactttaaggcacatcattagcattaaatgctatgactattctcatttgcaatgttcccatccattagattagatttctttcgatgtaacggtgatcaataacagggtataaaaattgaatgtaacaattcatttcgtcatttttgcatttcagacgttcaaatcttgttagcccaagatatgtttccaagagggggtgaattagaaatttaaactaatttcgataaaaaaaaacatttaacacaaaattaagcaattaaacacttaatcaaataaatgcaagtgatatggcaagcaatatattatagcaaataatcaaacttgtaaagtaaagagtttaagagttagaatttgcaaaatctcaatttttacaaggtttggtagaactaagccacctacattcttggacttcaaagctatggacctagctttgagttccaatatcgagccaagttaacgggcttgactaaccctt

SEQ ID NO: 115657 - DNA, 1141 bp, Cannabis sativa
tatgttaagttttcactgttattttacggttgtttttttagttgttctactgttgtttttaattgttctgttttgttgctttatggtcgttttaagttgttttataaaaaagacaattttttttgtaaaaaatatcatgttgcagtaaaattgtaaactttaacccaaaatctaatatttttgtaaaaaaaaatttctaaattatagaactgttggaataaattttgtctagaaaaataaaatgttaaatgaattaaaataaaatagcataaaatttatatttctcttattttgaaacaagaattaacatttgttaaaaaaactataaataattatatttttttaatgaaaatattgttaatttattaattaattaatatgtaaatcagttaataaaatagtttgaagattagcaggaacaaatcccttactaaactgatgacatgaacaagaacaagtaaaacatgccaaataattggtcgctttgttcccaacttggttatcaaagacaatagaaatattatttaaagaagtcagtagacatttacaatcagaaatattcaaaccaaacagagaagacattgtataataaaagaatttttacaaaaatactgaatttttagtaaaagtttacaattttattatcacacgaaattttttataaaaatactatttttttataaaacaaccgtaaaataataaaacagaacaattaaaacaacagtagaacaattgaaaaataaccgtaaaataacaataaaaacataatacaatacacagtgtaaaacttacataatatttaaaaaaaacacagtattgttgaaaaaaaaattacctataataaaaatataaaatattaaaaatttcagtatataatttaaaagctcctataataaattagatgaacgaccactttacaatcaatttgaaggaaccacttgataaagggaatgtgatatttaaatttctttaacatccaccgctttgtgtcagatgtattgattatcgaaaaaaaagtattatttgattattgtgtgagttagttgttacctataagaaaaatgttaaagggcaccaatagtgcctagcacgttctatgtgtcagtatccctattggttgggtcttatatagtttaatata

SEQ ID NO: 115658 - DNA, 3385 bp, Cannabis sativa
  modified_base (26)..(37): a, c, t, g, unknown or other
tttctgatcttttattaattagtaannnnnnnnnnnntaaaatgagttttatttagggcacaaaacccaataggtgtgatgcatgacttgatatatctttgaaataacttcaaaactcaagttgaatcgcgtccatcaaatcaatattgagtgagttatggtcattttactgaaggttgtttagcaccctgcggctaggttgataacctaacacccaggatgacattcttacatcaacatggacactgtgtgagtgttaaaacgtcacaaacttatattttttaatgactaagtgatgtgttgacatcttttagtaagattcggtgttctggtaaaattgttcaccagttctcggagatgtcactgttttgtgaaatcaagaagactcaaaactccttgaattttttgatatcccaccttgttgaaagggtgaaatatcaaagtacaaatttgacttatcacaaattttagctctcgtttactacaaaaaaatagttgactgctcgaaacgaaatcaaattataataagtcgttaccatcgcaccaggtcaggtgtcaacctggtgttgggtgtttcccgtggctcgttttggatgctcaatggaattcaagattgaaaacaaggtgtcctaccacattttttacaattttaggaagaattcccagagcaaaattggtatttaagaagctgaaacatgccaaccaggttgcatgttaacctgggcacaaggcccagtgccatgtcaacctgggcgatggggccctgtttaggctccctggatatcttgtttgcttcctaagatcacttgtatcttatttatttctaatgatagaaaaaatactcagaatacttttcaggaaaatgattggaaacagcccgggttgacaaaatgtcaacctgggtgttgggtccaatttttgaccactagatgactccgtttgattctcggaaacacttgtattgaaattgttgatgaaaatgaagaatacgcttggatgacttcatttggactattgatggaattggccaaggttgacaaagtgtaaaccttggcacaggcacaatgcctaggtcaacctgggcactgggtgtgtgttttggcctctaggtcgatccatttctccccccaaagcacttatttcctctttatggttgaagaaaaataaaatgctcggtataattcttcagtattgtggtttgaagtatcctaacttgacaatatgccaacttgggcgcgaggtgtctatggcacctagtgctccgggtgctcaaaacttaaagtgctttgattctgattccattgcctcaaatatgtctgtaacaggtctaattcatgtccatgtacaaatttgggctcattttcactaagacgggcttgaaaaccgaaatcctagcagggttgtcaacctgggcgctgggcatctgggttgacttccgggttgttgtttcgtgtattttctgctttccgcaacgacaacttgctgccaaaaaattctgtcacgtgtttagttagtattttggtcataacttcttcaatacaactcagaatcggtcgattcaagatattccaaaaagctgagaacgagatctacaacttttatgtggagctctaagtccagttctgcttccaaggtcgtcaaaatttgtaattaagttccaccttatcaaattgagctcgccgacttctactattttcaaccaaaatgtgctaacatttctccaaatgactctaaatgcatgattagtctttaaaatagcctaacaaattataatcacactaatcaataatttaaataatcaatttaagaatattaatacataaattggctatatttataagtcaaaatttcgacttattattcttcatatttgtaatttattgaaatgtattggccagtagcttcataatttacataattcgttccttgatcaaactgtccattgataaatatgagaaatagagttgcgtctttttcctaacagtttgaaaatttaaacattgtaagtcaactatgggataactgccatgaaactgtaatatgacagttatatttgttgtgtgggcaactaatattaaaccttaaaataactaataatgcccatatgtaatgcaaataaaacttactacaatcgagttttctttgtacgagtcctgtgttgccaattttgtgccctatttgttttttttttttttttaaattataatgttgtagtatcacaattattattcaactaatatataacttaattgctactagaatagaaaatttgaatggccatcgtaatgaaaaaatttgtcagtagtttttgtgtcactgatcaacaatcaattgtaccttaatgatattatatggagaaccaactgttaaaattctgtaaaccaactttataacaaccaaataagtatatgaataaaacttaccatgttataattttttaaaagagctttgtgttggtttgtcgatatgaaacacctgaaaatatcataaaaactattgtatcgttatcaatttctaattattgatatgtctagtttcagagcgttagacaaatgttaatgcaaccgcaatgcaactactcaaaaacttaaaaattaaaacaatgtttctatatacgtggctctagatgaatttatattttctttgttatttgtgatttgatatgaataaatccactattgaaaatttggaaaataacattaatgcaacaagagaaacattagctagtgttttaatacattttttttttcaatttatacttgatttgaattgatcaggaactccaaatctattgcagacaaatctatattttatgaatctaaaaattgatattaggaagattattttccagtgattttaatcataattcaggcttaaattttagtttgaaacttgttttctgtctaattttgcataaatatgaaattgtatgtgtttggattacttacggtcttcttctcaggtgagattgccagaatttatggtgattctctgtctggcttgatttcattaagggttggcctgctggtttggttgttggaagatgtcgttattaaagaaggtcgtttgtgtggctgaatagttagagcaagatatatttttgtaaacttttgttgttgggctgtataaatgtttatagagcctcgtcaatgaatttgtgtattatttttgtcattttaataaatacatgaaaaactatttaagaaaatgagagatagagctatttaaagtaattttaggatgaaatgttactgcctcatatcacatttgtatatacagtctaggttaatgttaataataagttttttttttaattaggttcaattagctaatattaagtgtaatatatataggtttttatttttttttaattatgtaatatata

SEQ ID NO: 115659 - DNA, 2785 bp, Cannabis sativa
  modified_base (44)..(44): a, c, t, g, unknown or other
tttctgatctttattaataattaaatctaattatattgaaatgngttttatttagggcatagaacccaacagacattatccgcagtggttgcttaacgagttcaactccattcttcggcaatgtgaactcactgatttggagatgcacggtcacccttttacgtgggaaaaaggtcgaggttcgaatcactgggttaaggttcgattggatagagcattggtatcccagtcatggcgattagctttcccaaaagccattctcaccaaccttaagtattcaacatcggatcactctcccattttcctggagccgaaggtaattaacaattttccccctagtgtttgctttcgttttgagaatacctagtttaaagatcctatttgtttggagattgttaatgattgttgggagcaagctcagtcacaagaattccagcagaagttgtctttgtgtactgagaagttatctcggtggggaaaggaaattacaggcactttgaatcatcgtataaattgttacaaggctgagttgaaagctcttcatccacaacgggatggtgattcggtgcaaagataccatgatacaaaaaagaagctgtatgaagcgcttgataggcgtgaaagttactggaaacaatgggcgaaacaacattggttaaaggaaggagattccaatagtagctatttccataaagctgctacaacctggaaacaaaataatcagattatcgaattgggcgatgcgtcgggtagttggtgttcttgggattcgggtctatctgatgttgtttttaactatttccaagaaatatttcagacttccggtgcttcttgccgagaagttattgattgtgtggaaccagtggtgcctgactatgttaatctggaattatgccaaccaatttcatatgaggaagtaaagaaagccctatttcaaatgcaccaggataagagtccacgtccggatggaatgtcaccggctttttatcagaagtgttggagcactgttgggggcgatgttattggttgtgtttgaaagttttttgagaatggttcccttgagaatggttgtaatgaagctaatattgttttggttcctaaaaagtataacccagaaagaatgatgaatctcagacctataggtttgcatagtgtcttgtataagataatcactaaggtcatggttaatagaatgaagcccttcatggacaccatcatctctgcacatcaaagtgcctttatccaaggtcggttaatctatgataatattctggtttctttcaaaattctgcattatttaaggaggaagaggaagggcaaaaatggttatatggaccttaagctagatatgagcaaagcttatgaccgagtggaatggagctttttggaagctatgttaaggaagctgggatttgctaattattgggtgcagttgattcttagttgtgtgtcttctaccagttataaggttattcatggtgctcatgagataggtcctatttttccgaccagaggtattcgtcaggcggatccactatctccatatttgttaattttgtgtgcagagggtttctcggccattctgcgaaagtatgagaataggggctggttgcatgggtgtaaagttgctaatggggcccctcgatttcacacatgccttttgcagacgacagctacttgtactgtaaagctacttatgaggaagcaatccgaatcaaagaagttctacaaaagattgaattggcatcgggtcagaaggttaattttgaaaagtcttcaatcttttttagtgccaatacttcagattttatgaaaacgaggcttgaaaagcttttggggatgcctattactgcagaggagagtatgtatctgggtcttccaagttctatgggtcgaaacaaaactgtggcattaggtttcttgaaagaaaagttgcaaaaacggctttaatcttggcgttcaaaattcctttctcgggcgggcaaggagatccttattaaaacagtggcacaagcccttccgagttatgctatgagtgttttcttgctccctcttgagatagttcgagacatggagagtatgatggccaagtattggtggaaattgtctaatcagaaattctcgggcatacattggctgtcttggaagcatctttgtgggcacaaagataaggggggtatgggatatagaaatcttcgatattttaatctcgctcttttgggaaagcaagaatggcgactttttattaatcctgattctcttgtgtcaaaggtgtttaaggctagatatttccctcaaggatcgttccttactgcaactattggtttgaatctgagttatgtgtggaggagtatgctggaggctcaaacattggtaaaaaagaggactagatgggttgttggggatggtaaaagcatacctattcttggcgaaccgtggcttccggatgtcgagaatcctatgataatctctactcatccgagcttgactagtgctaatgtgtgcaacttgatgaaaattgatggatcgggctgggaagaggagatccttcaggatttgctgctgccccatgacagattgttggtgcagtctatccctgtcttgtcttcgccaactcatgattctttgaattggtcatttgatctttctggtttgtactcagttaagagtgcctatacgcttttgtagcaacttaatagtgagttcaggctggatacttcagctgaagacaggtttttggaggaagctgttgttgggttttgtgccctaaataaaaccctttaca

SEQ ID NO: 115660 - DNA, 1269 bp, Cannabis sativa
ggcacaccaactcgacatcaacaacgcatttcttaatggcgacttagaagaagaagtttacatgcaactacctcaagggttgaagcttccatcaacaattcaaggcactaatcttgtttgcaagctcaacaaatcgatttatggtcttaagcaatcgtcccgacaatggtataaaaagcttactgctgctcttcttgatgaaggtttcacacagtcccaagccgattatactctattcacaagaggatccaacaacaattttgtcgctctccttgtgtatgtcgacgacatcatccttgctggtcctaacataaccattcttcacactctgcaaaccactcttgaaagcaggttcagacttaaaacattaggaccccttaagtactttcttgggttcgaaatagcacgagcaacttctggcctttttttatcacaacgtaagtacactcttcaactacttactgacactggatatatcagcagcaaaccagcaaaggcccccatggatcctcggcaaaaatttgatgacaaagagggtgatctccttgacaatccatcacactatcgacaactcattggccgccttctgtatttgactctctctcggcgtgatataacatatgccgttaatactttaagtcaattcatgtcttccccaagaactcctcacttaactgcccttcatcaccttcttcgataccttaaaagctcaccaggacaaggcatcttctattcagccacttcatctctgcatttacgaggcttctctgactcggattgggcctcctgtcccctcactcgtcgctccacaaccggcttttgcatttttcttggtgactgccttgtctcttggaaaacaaagaaacaaccaaccgtctcgaagagttccgctgaagcagaatatagagctttagctgcaaccacaagcgaaatcacatggattcaatatcttcttcacgatatccacattgctcaaccaacaccggctttcatctattgtgacaacctctccgccattcacattgccaacaatcccacctttcacgaacgcaccaagcatatcgaattggactgccacttcatcagagaaaaaatagccaaatccaccattcggctcattcctgtcagctccaatcttcaattagctgatgcatttacaaagccattaccctccacaactctcactactcatctctccaagatggccatcagtaatatctatggtccatcttgagggggggggggtaacagaacttagtcttctaagct

SEQ ID NO: 115661 - DNA, 2275 bp, Cannabis sativa
attagtaggatcataatccaacttattacctaattaacccataatataaatataaactctaattatttaccattaggcttattgggatattacagttacaattatcattagccaatactatttgagagatcagtgggagaaatgatatatttttattgttacttgttattgtatatttttcatattttatgataataatctattcttgagacagttaaactgttatttgataatttctataagattaagaatccttgataaaccttatatgttctaaatatttaagtttttcgtgatgagatcaatggtagactgaattatctcattgtttgcattgactaactattattgtgattaattttttgatttcattgagaatatttaaataatctaaagtttgatatgttataaatgtacatgtatattagtaatgacaaagagatcaagtttgaatttatcctacatatatgcttattgaaggcagtctaaggcttactcaagtatacacattcctatcatgatatttgttataggcatgctagattagtacttgaattgtcattcttatggtactaaggatgagttagaaatcaacaaaccaatatcattacaaataatagttggctttacagttggacacgctgcatagatgacaaagttcatttttaagcacttataatggtaagaagagttattttgtggttaagtgtaaaatctaaatgaacacttacaacttcctctctcgtacatgtagtataatagtaagaggagttattttgtgattaggtgttgtgtggacacttaaaacttcctcatttgtagagataatgtgtgtatgcaaattacgaggacattgatttgattgtatattccaactatgctattttatttcagtgttaagagtaattgactctattgtgaatttattaaacttatataataaatattgcaatcatatctttctctcgaaacttgaagagtcttgctactccattggtgaggatgatgttccatttgtagtaaaaaagttgtggagtcctctattagtatcaaaatatgcacttataaataaaatgtcaatgactacactaacacgacttacctaaaagtgtgcactaagaagacatttcttagttggatagctaggtgtcaaagatgtatttgatcagtgggcattatatttatcatgtatgatagacatgtgttaaggattgttattagttgttgatacatgcatattcgggttcactcttgaatattgagtgcacatttgtcgatgtgagccaatggcttagtcattgtgctatattatgtgtggatccagattggtagttatattcatactcatgtaattctccaatgttttgttatatattatatttatatttatcgatataatatggtgcataattagttttacagacatatgtattttttgagattttttgcatacagacactattatttcgtgaatacttgttgatgtaattatgtggtccaagtgggagaatgttataatattttatatggactgagataattaaacatcgctcatgcaatgtcattttaagcatataggggtaactgtataattatgtatggtatagtgtctattatgtaattcggaccataatggttatggtcagtttaattaactgtatttgaggcacacatggtagttctctactgacgattgattgacccattaaatcatagtgtactatcacttatattatgagccaaaaatatatgctcatttcagcccttaagatatttaggcatataatgagaggtttgaatgtgttaaataatattttgataaggtattaagggttctattaggggatgctctccataagctctcttatattcatgtttttgatacttaaaagaattcatgatgattcaaaatgactcaaaaattagtcatgctcaatattgagatatatttattgtataatttaatgctctaagagtatcttcaattgagagctataaatgtagtgtattcctattttatagaacattttgttaaaagttaacttcaatggtaatgtaaaatgtagctcaagctaaaaattgtgccaaattttgcacaaaaaatagcatgcgccaaattttaccctacaataaatgtcacctttttttattatatatttgcactaattaatactatttaatatttttatatttattagttattaaaataatgtaaataaagttaattttttttatatattttcaataagtattaatgatattattgacttttata

SEQ ID NO: 115662 - DNA, 1197 bp, Cannabis sativa
aaaaaaaaaaaaaagagttacaaagagaaagaaaggctgaattcggattcggattcggattcggatctacacaccttcattttggtcattctccttgaactcattctccaaagctttatcaatcatatcagcgaagctaccttctttaggtttagaactcgacacattgaactgagtgaaattagtcccaagtagcagatccgattcatctccaaccaacctctccctctcactctcactctcgctctggctcgtagaaacaggaagcaaatccgaacatagaagaagaaccagaatcggagccaagatcgagaagaaacctctaaccgaatacgaagaagaagatcttctcaacaacattgccgataaattaagaaataacaccaactgagctgaactgagctaagcttcaactccaattcaacaatggcagatatacatacatatatatatatatattatatatctagagtgagaagaagagtgtttaatcaagttgttgtggtcttaatcacaatcaatctggatttagttaaaaccaacaatacatacataaatacacacaaatcatatatatatgtatatatataatgatctctgatataatcgccggtgaattttcaggcgaggagagagagagagtgagtgaaatggaagttagtttgactttttgacttgactatggtaataataagggtaccaactctattatatacctgaaactacagactataaaggctattgagggtaattttgtaatttacttcacctcattttaatggtggctgatccgacaaaatcatcttttggttagttttatttttgggaaaaaaattaaaaacggtttttttttaattttaattaaaataaaataaaagaaagaacaaaagttttttaatttttataagaaaatgtcaaattttggaaatacatccaaattttttgcataaagtcatgtttttttagtgtactcaattcatatataagatgactaggttttccaaccttttccaattttgtctttgtgtgaatttgaatttatgaatgtctttttgtttgataaatagacattttattagaattacttataaagtagaacctctattcaagaatacacctgggattaagcaaattatattttaattgagaggttataattaaatagagttacactagaaaaaaaaattaaaataccaa

SEQ ID NO: 115663 - DNA, 1073 bp, Cannabis sativa
ctgatatttaattttactataatagcgacataatattttaagtggtgttaaatagtattggtaaaattcttcttagaagtgactagtttagtaataggggcaatactagtatttgttaataatgacctattaaggttatattaaagccgggacaagtcactcccagtacactgaactatatccagtgtatcaaggatacttcggatggaggttggatacgtgaccaagaccagattgcgcaatgctttctcaatcggtttaaggagatattcaagaaagaccaacgaagcacagttccgttgtgtcaagacctttttcagaaaatgatatcggaacaagataatggtctcttgaatgagatatcgaatgaggatgaaatgaagatagcacttaatgccatgggaaaggataaggctccgggacctgatggcttccctccaagtttctacctccatcactgggaaaccgttcatgcagatctaaccgagatggttatccacttcttcacacatttggagcttccaaagtttatcaacgacacatcattagtcctagtcccaaaaaaggactctcctccctcggtcaatgactaccgtcccatcgccttatgcaacgtggcttacaaaataatctccaagatcattgcttcgagactgagacacatccttccaagaatcatatccccaaaccaagcggcgttcgtccaaggaatgcatatcgctgaaaacacaatgatagctagggaggtggtccactctatgaacaaaaggagaggcaagcggggatgcatgctcctgaagcttgacttggagaaggcctatgacaaacttgattgggatttcataatctctgtgctctatcaaatcgggtttagtaatcccttcattgcttggattaaagcttgcatctctgtaaaagaaatcaagttgttgctgaatggtgcggtggttggaaaatttaacccggaaaggggactccgacaaggggatccgttatcgccatctctttacataatggcagctgaagccctttctcatcttctcattcggaaggaaaatgaaggtggtctcaaa

SEQ ID NO: 115664 - DNA, 948 bp, Cannabis sativa
tactccaatgtgctccactacaaaactatctcaacatactggtactccaatgaagaacccctcaatgtatagaagtgtattaggggcacttcaatacctcacaatgaccagtcctgatattgcctttgcagtcaatcggttgagccaatttcagcaagctcctacctcagaccattggagtgcatgcaagagaattctaaggtatctctcaggcactctagatggaggaatgcagttcacaccagcaacaacacttgattaactgatgcagactgggctggtttctatgaagatcgaaagtctacatcaggatattgtatttattttggtggaaacttggtgagttggtgttctaagaaacaaacagtagtggccagaagcagtacagaatcgcagtatcgtgctcttgctctggccacaactgaactcatatggatacaatctctcttgaaggaaattggttttcaaagtcagcatttcccatactttgctgtgataatttaggagctagatcacttgcatctaatcctgtattccatgccggtaccaaacaaattgaggtagatctccacttcgtacgcgacaaagtcatagctcaagaactggatgtacgatatgttgacactacacaccagattgctgacattcttactaaaccattggctgctgccccatttctttacgtcaggaacaagttaacacatggtcttgacatgtgcaacttgaggggggatgttggaatataagaagaccacgacagttacaataacagtcagttaaatcagttggacaaccgttagttaattctattttagttggtttcttgttaagctgatttgtaacaactttctgttgtatcatttagttgtattccttttgtaattcacactataaataaagcttcctgccaatctgttgagattgagcaattctctctctctctctctc

SEQ ID NO: 115665 - DNA, 1487 bp, Cannabis sativa
atattaaaaagtaatcaatccaaaataaccgatctaatctgcactttttgcggattggattggattggattgaatttgagctattgtgcagattggattgggtctaaaaaaataaaacctgcacttagtgcggatcggatgcactatgaagaaaatagtgcagattggattggatgaacacctttagttgacgccgacaaaacccactgccaccaaatcccaccttcgaaacgttgaaacccaccaccacgaactctggcttccaaacctaccaccacaaaatctggcttccaaacccaccaccacccttcaaaacccacgagcaagctttgaaacccacgagcaaaccatcgcctatagtatagggcacagttttaaaccgtctcctataccctattataggtgacggttttaaaccgtcaggaatttcacattagggagaatgattggtacatggaaaattgaacgttaataaaattaaacggaattagacaaaaaaaattcaatccaacaatcttaataattcataaaaaaatttaacaacctaaaaaatttagagcaaaatttagtacatatcaaaattgaaatgtaaatatctaattagctttttttttaacaacaaattattattgggttgtagcattaatgattaaataaagtaagaaagagaaaattaaaatgataataaaaaataagtactaattacaacttttgactttttagtcaatctttatgttcaaaatcacaaaatacaattttttatagccgtattttattatttctgtaaatttttaaaattttttgaatggcttactatattaaaaatagagttcttgatatttcaaattaccatgcttcttaaaaaaaatttaaacttatttttggtatctcaaatttttttaaaaatttacaaagatgataatataaatactgccataaattggcacaataatttgatgtttttgatgccttttacagattttgtgccttttaccgttgttgtgccatttattatggcttgtcattaattatttaggatagttttatgatatggtcattaggcaagagaactgatttattttgtgctcaaacttctacttcaacgacttttcaattttgacaaataaatatttcaatttttttttttaagtttttatatttgatatagattgtttaatattatattatgaattattttgtcattgttctttcacattatttagttttcatttaattttgttgtaatatagttttatttattgttatttaatttgttgcttggttttgtagagggcttaaaattattaagactttgccaataagtttaatttattataatcaaaatcacacgtgatttggtgagtgttgttagtttgttgcttttagctaaaatgttatactttcggttggttctttaaaggttttagttaggatttcgttctctttttgtagttgagttttaatttttttagggataattgcggcaa

SEQ ID NO: 115666 - DNA, 1791 bp, Cannabis sativa
ccaaccacgtaaaaatccttctctaattttcttacagttctcgaatcttttaatattttattggttgccgaaaacctcggtcaactgctgcatcaaaaggtttgaagattggtcaggtcaagtttgtagtaagcagaaattgggaattctcttctctagtaactgttctagtaacctgagggagtccattgaaagcaatttgaggatttggggtattcgtgatacggagaaacattggggtaattcgtttttatttgtgcgtagcaagaggaaggactttaatttcctcaaaataaagctctgggaaagattggagggctggagactcaaatctctttctaaggtcggaagaatgatttatattaactcggtggcccttgcaatgccgacttactctatgtctactttcaaactccccctcttgtcctgtagagaacttgatgcggtggttaggaggttttggtggaacggatcgcctgagcctaagaagttttgggctgctataccgtggaatgccttgtgtcaaccaaagcagatgggtggcctaggttttcgacgtttcaaagatataaatgttgccttcttatctaaacttgcttggcagcttgcgagcatggtggataggccttggtgtgatgtcttcaaaggaaagtattttcctagagattctttctagagtattcaagagaagaacactgagagtttcatttggagaggcattttgagttccagaaacactattattgctggggcttgtactattattacctccggggaagatgtgaatgtttggtggcagccttggataccctggttggattatgagcaatttcgcgaattgatggaaagtattagacccaaagcccctagtttgagatgtgtggctgatctgatatatcgaagaacaagatgctggaacttggggtatctatgcttcctttttggtgctaaaatttgcaaacggattggtgagattcagatcgttaagaatgttaattgtgataatctcatcttgaaagagtccttagttggaaaattcagtgttaaaggtgcatattgggttgatccaaaagcaagatttggagacaataatgtgctttggagatggatttgggattcgaaagttcatccgcggttgagtatgatgatttggagagttttcaccaagactctccccacgggtgacaagttctgttcttcgagggagaatgtttgccctgtgtgtcatgcagcctcagaaactcccacccatctgtttgcaaggtgtagttttgcctctgcgctctggtttaccggtcctctgccagttagggtcgacttgattcctggcgataacatagctgatctcttatgcaatctttgttcctcactggattctaatttgagagtcgaaatgctatgttgtgctggtgtgatttttgattggatctagaaaaccaggaattggattattcactccactggtacaaggccttgtgtggattattcactaactttagtgatagttaatgtcccttttttaaaataataaagcaaatgtctttttttacttttcaatacctaaaatattctttattatataaaaggtattataaaaatatcttagagtattatgaatataacatacaaatactataccttagagtaatatgagtattatgtccttttttacttttactcataggtattcttttaatttttgtagaaaatagtgaatcgaattatatgtgtatttcatagaatagtacatatttatatacaaagctaggagactaggaaataggaaactac

SEQ ID NO: 115667 - DNA, 933 bp, Cannabis sativa
atgtgttgcctcgatagcagactaagccaacataacgaaagaccttctcaaaggcacaatgagccacctccatagcatattaaacatatcgaaagaccttattgaaagatgtaagaattactccagtgaaaggtcaaaataacatatcaagcccttattaaagacacatcagtcacatcgaaagtagattaaaacaaatatacaaactcttcatcaaaaatacgtaaagttgcatacataaaaaaaaaaagtagtatcatagaatttgtagtagatagctaaaaatcctgcccatgagaaatagtacgccagtcaaactgaggtattacatatctcggatcattcaaagttgagataatacacatcttaatatggccaactaaaatccaaagggtcaaacaagaagagaaaagttacaaaatctttaaatacatgtataagacaaaacaaactcttcgaaccaagaaaagtcattagactcaagtattatacgacctacattggttaagccctttgaatcagctcaggaaaggcataacaacatcctcatcacttgagtatattatctagtgttcagacaacaaaatactcttaaaagtttcttataaaatacttttataagaaattgggggagtagtgtttgggaaaaaaatcagcaagtccaaattattataaaaaaggcccaaaagttataaaaggcacattctaaaaagaaacactatataagatgtattctagataaaataagcatataggtgggagagttagatattagatagatgacatatctcaagttggatgagatagctcataagagatgacttatcttagatgagatatgtatctcgatcggcaggcctatctcagtcggcaggcctatcttggtcggcgggcgtatctcggttgccaggcatatctcggtcggccgaccta

SEQ ID NO: 115668 - DNA, 2990 bp, Cannabis sativa
gacatgtcgcattgtgattgattagctatatttttaaaaatgattacattgaattatatatggaactcgatacttaattaaactatagcgataatgacacagaaaataactaagtactattggtgttttttagcatttctcgtataataaaccgttttaacccaaaagatataaaattaaatattatattatactaacgaaaagagcgttgcaaataaaattgccatcttggccactggtctggtgcggcctttgagcaaaaaaagatttagcttattttagggctgccatattgcttttgcatgggaaaacatttattatcgttaaattatttattagaaagcattaaattctgagtgtttgactcaatggctgactaaatttgtgcgtagaccataagggggctggttcagaaaaaatgattcctttcctagatcatcttccaagaaaaaaggctttaaattaaatataactaaagaaaagaaaataatttatttgcaaaagtagttataattacagatttatacatggaccatgttaacaatgatgcatcatgcattattttgatactgtaaaatcagtacaattaataattcattataagctactaggtttggaatgtaaggatttttagaataagaaaaaaaaactataatacactttctaaaaaatttagattgttggattcattctttatttgttttagtataaaaaagagcttttcttaattaattatattttataattgtataggttgtatttatttaaaattatatgtaagtttctaaaaaacttaagtaaaataaaaaaattataacttatataattataaaagaaaattaaattgaaaaattatgcttttacgttgatgtgatgaatttaaataaacaagagcaaaagaaactttgatagttgatcatgatgtgatcgataataaagacatgcatagtaatgaagtccaactaacctttcctaaacctgagcagaaaagcaggaaactaattaaggtggctttggctactggggtcatatcgtaatgatgctctgccccctgaaccgtgtgcgtgatctttttttaattaattatatattagcttctacttccagtgctaatataaactagcctgctgtaattgccagctacttaaaaaaaaagtctaatagtaaataaagcattctcgttagagttgctagctcttaacatcttctcttaccatagttacaatattcctatattttaaactatatttattactgcgtgcgtcttaactaataagtagtaatttaaacagttgaaaatttaattgtagtgtatgatacttttttcttcttctaacgagctttgggttgaaattattatggatattgtcctaagtattaaatcatacataaaaaacatgaactatttttcttatcactaaactaattgcttttaagatagaacagtatgactctgaagtctgaacaaaagttagccactaccatgattggttgtttataagtgatttatatttaatattttttttattaaagaataaattttcattaatcaaaactgaacaaatgctaaaattagcacccacaaaataacaaaagagagattacttacatgttattacaaataaaattaaaaatttgttggtttttcttaaagatattcctcctattattaacaagtagtaatctagctttaagtgtgactctaatcaaattatgcacatgagaaattaagaagaccttttgcttaaagatacaattacgatttcaccaaataaattgatgccgcgcaagtagcagcaacaaccctatgaagtagattgcgatcacgattagcattcaactacaaaagtcaattcgggtaagactcgtgccaaatagcattgtcaagccaagaatggatagcacacatgagatgcttggaaaagaacaataaaaaaacgatgattatatcagtcaacaccaacctcaagaaatcatcataatacctcttgctaacaagtgatctttagttaataagttattatgggaggcttgtcagagaataaatttatattttggtacgaataatttataccaaatcagtaaaagaagagttataaagcttactaacctcaaatcttctccctttttcaactttcaaaattgtgtctagagtgagaacaattattaaatactaaactaatattgaactataattattaacatatattaaatagataataaatatgtcttaggatgggtttaatggacatattttttgacattatttttacctatttttagaccattagattagggttcatttactgcacttattcagaggctaaattcgatttcttcatatttaagcgcatttagagtatttgttttttattttcttaaactactttttttttggctcttaaagcatgtgaccgaatttgatatataatagtcacttaaaataattcagataagatatattttatttctgtaatccatatatcttttcaattttgtctaatctttttaaatttcttctatagcgtctcaattatcttttcatactttttcaaatatgtatcaatgcgaaaaacttgccattatttgtcaggtaaaaaagctgccaacacaaccaaaatcaactcccctaaaaccaagagaaaattagaaaaatcactgaaatccccttgcgattatagttgaagttaatgcagagaaagatttgaaacacagagtcatctagatttgaaagtgagccccaaaaaggtagcatatagtgtatgagggctttttaataagcggcgggaataagtggctctctttctaccatgcattactcctcccatgtcctttgttccctttcaaaaacactcacactatacatattctattccttcttctattctatacctattagagcaccttcaaggaggcagcaaaaatggatatatgaagtggttaatgctccaaggaggcagcaactatgactgcaaattgagggtttgtct

SEQ ID NO: 115669 - DNA, 4613 bp, Cannabis sativa
ctccaaaggcaaaagaaaatggtgaggagagcctctcttgctggctggttggcttgcacgaaggggagaagaataatggagtgttttggtgacttgtttcataagctttcccttaaataggtttttttttactttatttattttcttattctatctatttttttttctaaaaaaaaaaaagaattcatcccataaacaattaaacttaaaatacctattccaaagaatgacaaaattaccctccaaagaaacttaaatttttaaaaataacctaggggcatttttggtaattttactaatccattaaaccgacattctaaaaattctaacctagtccaaaatactctcaaaataatccatccattattgtcgtgacatttctaaccacaatgcttaatttccacaatcgtcgggcctgataaaatatttttatttcaaaaatagtatcttcgatacccacatatctcaatataattgccgtaattaataaattacgctgtatatatcattcaataaattctcaatagttaccctaagtaagatcataatcttactttacaaaaataattacatatttaataaaatatgtctatttaaatattattttatttttcgggatattacaacactagttggtaaagcatcatggtaaacacgccaaataaaatgtttgattttgaggggtacctttaagttccagatcatgttccaccacttttcttgtttagttgtaatggagggggagggctcaaattggtggataatggtgtaagcttggtggtatcccaaatttatggtgtatgatccatgtggagtatggaaccaatagagtcgatcttgacctagaggttgaaggagggggatggattgtatatcttagcacacatccctggggaaaagatgttggagttggtgtgtatcccaagctctgttagtggaaattagactggagaccttactgtcaagggtaggtgatggctgaagatagtgtagtttcccatatcccggaatccagacatccttgtaaatatttatggaggcaccattccctacaatattacgtaattcagatcggatgagagattttccccaagagatgctattccagacaagagaagggggatgtcctttcccagagtcaagaaatgaagagtgcgggtgatatcggcttttgagaagttgtgcaacaagagatgtaggagcctgaagaatacgccaagcctgtttagctaacaatgctcgattgaaagctttcattgatcagaaaccaaggtcgccatgaaatttagatttacaaagggagggccaattcttccaataaattttcctggtgtggtcagttcctccccaccaaaattgagccatcatggcttccagcttttggtggaaatagtgaggtagtttaaaacaagtcatcgcataggatggtatcgcttaaaccaccgatttgagaagaatttcttacccccttttgagaagaaagtggagttccacctgtttagatggttccacacatgatcttagaggtaagtaaaggcttctttctttgaacggccaaaagattgaggtaggcccaaatatttctcgatagagtcacgaataggcacattgagcaaggaagtaatctgactcttaacaaggtcagtggtgtttggtgaaaagtagagcgatgatttgtcgtagttgacgagctgacccaaagctaggttgtaagcatgaaggagatccttgatttgagctactgcgatgggagaagctacactaaaaaggatgttgtcatcagcattaaagaggtgtgagattatcggtgcagtccgggaaatcttaaggccaagagtatgcttccaggggagacgttgattgacttgttaggttatgagcgatgaaaggtcttcaaagcataataggaagagataaggggaaaaaggatctccttgacgaatttcatgggatgggataacggatccacacagttgctgattgatggagaaagagaaggaagcggcagaaagacatgacatgacaagattggtaaaatttgaggggaagtggaatttttccataaccctcctaaggaagctccattcaactcggtcaaaagccttggccatgtcaagttttaatgccatccagccaaccttaccttgtttccgatgagttaaggagtgagtgacttcttgcccgatgatgatattgtcaaagatcaaatgattgggaagaaaggcattttgggctagcaaaataattcgacaaagaattactttgaggcgattgaccaaggtatgggaaatgattttgtgcattatagaacaaaggctaattggtcgataatctgtgatggcttgagggtggctctttttgggaataagaacaataatggtattaatgatagtcgataaatccacattgttattcaagaagctaagaacagcgtgcaccatatcagctctaagcaaatgctagtttttttggaaaaaagtaccattgaagccatcagggccgagagacttatcactggccaactggaatacgacttgctggacttcatcaaccgtgaagggtgcttttaggcatgagtattccgtatcggtaagtctgttagagattccagaaaggacatagtccatttgctcagttgtaggttgtttgctggtaaatagttgagtaaaatgttgttcaattgttgtcaaaatgccctgagtatcagtgacaattgagtcatcaaggcgagtgagggagcagatcttatttttggctcggcgagaggaagcaaattgatgaaagtagcgagtgttcttgtcctcgagttttagccaagtaatgcgagaacgttgttgccagtattcttcttctttatagagaagtctatcgaggtcctcttagagttggtgacaatgagtaatctgggaatttgattgttggggattgttctgagcggcttgaagttgagattgaacttttttatttgtcgaggtaggggaggccctagtgttttctgccacttggatagagtgagggcacaatgttgaagcttgttagcgatattggaaatatggtcatggctctaaaaatcatgaatttgattccgcgcgtgactgagacaatcctcaaatccgctctcggcaagccatctgttatcaaaatggaaacgttgctgcgaaggatgacaactagtctcaattttgttaagaaaaaggattaaagctcaatgatcggaaccaaagaagtctccatggagaaggtgggtgttatggaaagaggatatccatgtgaggttcgaaaggccccaatctagttgttcttgtatgcgggtgagatgcgaatgtttattagtgcatgtgtaggggctgtcatgaccatgaatggaattaagagtatatgtatctaggaaagttcaaaaaaaaaaaaaagacaagggtcatttattgatagcccctcaatattttcagatggggaaagaaaagcattaaaatcacctattaaaagccatggattattataaacagtatcaccaagacagttgagaagttaccacgtattagcgcaattattgtggtgcggttccccatagaagccaatgaaagtaaaagtgcaatgattaggaaactgaacatagcaatgaaagtgatttatattataggaatgtagagttacatcaacatcctaagtccataccaaaagcctctttctttcccttctctctctttgaacccaacatgaaccaagaggattgttgctgaatttctcatttcagcaagggattcaaactaaggtaacccctagaacacttacttgttatttttcaagctttgattttggtttagttgtgtgattttgagatttaggggttttagggtttgatgtatgtgtggttcgatttctaagatttaattgagttgattttaagtccttgctactgttttcggtgagttgaaaactcaaacttgggtcatcaatggcatattttgattctgagtgtttttctgagttctattggttggaatatgttgtgtaagctcagtttaggtactctggaaagtttggtggcatttggagaagttttgagcaagtttggagttgtttagggaaacctagtacaaatcggttaaccggtttgccaggacctgtaaaccggttaaccagttttggcagattcttagaacaacttgttttctcgattcaagtccacttcagtgccttagttgggtgatttcttgttccctagggtattgggatttcttttagtaatagcaggaccttaagttgtaggtttggggttcccagattagggttttgacatgtgatttacccagttatgttatgtgattagggcatccatccagcacgagactttccgttcaggtcggccaactcacttgaattcggaaaagaggtaattaagaacaacgtataatatgtgatatatatgcaaatgtatgtatgtgttaaatgtatatgcatgcttatatggttagttcactaccaacactcgtacgaaaaagtggtaaaaagtgcattggtttagtgtatattgtttaaagagtacattacggtgttaccagcacaagtacgggaaagtacagggtgtgcgtggtatatcacttagtggtact

SEQ ID NO: 115670 - DNA, 728 bp, Cannabis sativa
tctctctctctctctctccttcatgctctcagtctctctcactccttccctttcagattctcgagttccctatttgatctacccggtcctatgtttaatttggttttttattgcagggaaattttttgttggtattttatttttcagaccaagaatttgacaaattttttggtgtatttgttttttagatctattttttggtgttgtagtggactagtggtggaggtggtggcggtgaagtcaaaattctcagtggtgattttaattttggtcaggatttcattcctcatatcaagatattattaatgggtgtggtataaggtttttgtgtgattgattcttactagtttgacatatatatatttagtgtagtggtagtgagtgataatgatgatggtggtggtggtaagaaagaagaagaaagaaaaaaagaaaaaaaaaacaaaattttgtaaaaacaatttttataacatttaaataaataaaatgatatggattaatgaaaccatgccatgtacagacagatttatttgacatttaacgataaaaaattaatgaaaaagtggagagcaaaacaaaattgaagtttagggagttacttcaaaaattcaataatgaagttttatcgtgccaaactctaaaattcagggaatttggttggaaattaccttataaaaaaatttaacttgatatggtttgttagtataaaatatatattttttaaaaaa

SEQ ID NO: 115671 - DNA, 2708 bp, Cannabis sativa
aaattttttgccaaacgactcctaatagtttttaaaaactgttttttttcagttttaaaaaacaaaaaacagtttttaaactataaagccaaacaacctctattactctaatgtgttttaaaaaatgtactaaatttggcacatgctaaaaattgtattaaatttggcttaaaatataatattgtgccaaattttactcacaattaatattatttttttatttactataatatcactaattattatgatttattgacttttatattttttatttaccatattactatatttaaataatataaaagaataaaaaataaataatttttgtatattctcaataaaatactaaatgactatcaatatttttaatttttttatactacattttgttctagagtataattataaatagtgagttaaatataacataaatttaatttgtgttcaatttaacacaaattttaaatttggttgaaagtctcatgtttcaaatcagaggtggaccctcgtaaagctcaaggtgagcgcccaaaaaaaaaaattattagaaaaaaaaatagctttttattaatcataatacatgtaagtaaaattgataaatattgttaaaaatattagtttggttttgatgatttaagcttagagcttctctacccactactgtttatttaaattttagcaaagatgatgtaacaagtataatgacacacgagaatattaagactcagttaatgaaaaatatgtaaaattgttataccctgtgagatatattctatgtataggcatgagggtgagtaattatcttctagaggtatgtttaagcaatcatctcttagagtgagtaactattccaaaagtatgtttgagcaaccacccttagggtgagtacaccttccgaaaggatgagataggtgactatccctgaaggtgggttagacagtcacctcctttaagggtaaattatccactcattggtgatacattggtctagagagtatacccttcactctaacagtctaagtatcattctacttacatataacatgattaatacaatacgtctactgattacattaaatattgaacatgtacctcgacacctatttttagagagtgcatcataaaaatatcttataatgtctaaaaatataagaaatgtctaacatatatttttatatatttcttttcatatatatatatataattatttaagtcacacgtaggtagggtgactgggtgagtcataacaagaaaatgttttttatttcttttattgaaacacttaactattccattaaaaaaaaagacaggaatatgttaagtgtacatattcaccaaacaatcaaatccattctataaggagggaactatacttagaattaattaatggtgtaaaactcactaacttggtccacttgaacacatagtaccccaaatagtggatatattcaccgtggaagtcgataagttatgaacttaattacttcaaactatttcctatttttctccataccacacaatagaacagccccaaaaaagaagacacaaaacctttctctttcctacttttcttacatacatgtatatataaacttccattattcaattcaaaagaaaacacaacacttaacacaacaaaacacaatacagatcaaagaaggaagaaaacccaataaaaaatggagaagagttcagtggttttgatgatgctagtgctactcagtggggcaattcttcaaacacgtgaggcaatggcggattgcgccgaggattgcgcgccaacttgtaagaaccaaactggtacatctgaaactcaatgtatggaggcttgtagagccgtatgtgcacaactaggaggcgcaggatctggctcaggtggacttgggattatgggtgggactggaaattaatagctatatattttctaccttctccagatgcatgcatgggacatctctctcagaaatttcttatttcattttaattaattaatgttcatctatcgtttgtagtcaatatatagtattttcatacgtacgttggcattcttatataaatagacataaatgggttccttaattttatttagaagatttattattgttaagtagtgatgcccttgacattatatggctcacccaataaacattaggaatatataattacataaaatattttttttatttttatattcaatttttgttttatatatttttacggtatgttagattaaaacaacacgaaaataataagaaatcaacataaaagtaacaaaaaataacataaaaacaaatatatatatatatatataattaaaaacaacaacaaattaattaacaaaaatataacataaaaatattacaaaagactatagataaaatcatcaaaattgttaaaatattcaaaattgtattttttgttgttgttgtaagtgcagtgttatatattgtttaggcctcggataaggcagaacagaataggttagaggttgtttggctattattttcagttttaagtttttaaaattatgttttcaaaagtgagaataaaaaataattttttgtcattttaaaattttaatcatgatgtttggctcatgtttttaaaattatttttagatttcttttactaaaaaaaaaaaatcaatattctacaccataccatgacatgaacccatcctacctcaaacccaaacccaaacccagact

SEQ ID NO: 115672 - DNA, 2090 bp, Cannabis sativa
  modified_base (46)..(47): a, c, t, g, unknown or other
tctatattaataagtaaatctgaatatattgaaatgagttttattnngggcataaaacccaacacgtacatggtttccttagaaactatgtatgaagcttaatggtgagtctattataatcgaatgttcaacttaagacctcacatggctttgatcatgtaaggatctctgtcttagtcgtagcccggtatgtggcccctataggagctctatctaggtcttttctgggggccttggcctcatgcattcgaaccgatctcatatccggccttagggctttcatgttcttgctttggcgtatagtccatctatttttgaacattactattatttagcctaaaagccatctatgacgaacttatgattgtcctggctgtcttcttatggccttgacaggcaagggtctaaatttactttgtcaaggcgaaggatgcctacacgacttagagggaggtttagtagcttattttaaccttaaaatatctctacgtaagttcattgtgctagttcaatgccttgtacggtatgggcacccctaaagcaccatgcaagaaagtctcatggtcacttgctattcaccaagtttcacaaactttgcctgggttcttccttggggtggtgtccatagtacacatgtggaactaaaagagtaactttaagaagttaatcttattagcaagtggtttagataagtcgatctaacgtgtaacaaaagcttacagcttagtgtccgcttttgaaatcacattgtggctaccctacgtagcttaacaaagcagaggcaattattgaagaatggtgggagaccacgccaataagtttgtgggtactagcgcttttaagggttcctgcatgatgaaatgttagaggaacttaattgacaagttggccagtgagagtacttaccgagatgttccctctttcaatttttgggtagaagttctgacttcaagttctcgtcgtactcgcctgacttgtgtgcacctttactgttatcttgtaacatgatgcgaacctttttagtttggtccggacatgcttgctataagggattttccatctagaaatattcttcaaggagtaattcacttgtgaagaatttttttccttgacttgtttatcgacaggcctagaaactccttgtgcgtaatcatgctgctttgagttggcttggtctcttcttctttctgttttttcaagggatcctattagcaagatgttgtgtacctcttggtcactatagactagaactatgagagcacacttttggtggatcgagctagccagggcaagactaggtggtcagccatattgagggagcactgtttggatgattggatgaggccatggccggccagaatgtagaggtggtggctagctagaatatggactctatggctggccagctttctaaaggcctagtcgatgctatggttggatcctatcttcattcgattggctttgccccctggcataattgatgtagaacctttgtgcactactgtcattagctatacaacctttttcttggaaacgctccttggtggtgttggagaaccacttctgtgtattacgatgtgcaggattgaacactttgtagcggttcttctagtccatgctctcgagaaaggtctttgtttggaggtaaaccgcggtaggtgtcatctagcatgtcgatctcctctgtgataacaatgttgggttctaggaattggatgggcactgggtttgctttgttaggtactactccctaggcaagcaagtgaatctattgtgggattttgttctttttgaaataggacttagttctttgaataacttagagggtacaaagttttcattggttcaaggtacagctggctagttgagcgagtgcgtcggttgttgtgctgtctttgggggcttgcattctactataaccgttgagttatcttaacagctctagtaggccaatattttattatattgagttgtatattcaccaaagacatagcctatgactagctgagactcgtggtgcatgtttaggttgttagcccgcgcttcgtgtgctagctgagggctagcattcagagcttcatattcagcct

SEQ ID NO: 115673 - DNA, 1563 bp, Cannabis sativa
tctcgagcaaatactgatttctgtatcctcttccaatttggctgataagtgtctccccagtttagaatccgaggcatgttggaaccggttttctcagcgtataatttcccgagttgtggtatactttcatatgcccatacttgaaggacataaggaaatccagctaaatgataagtttcacaatggtgatcaggattcctcctttgtctctccctaaacttggaaactctatttaccaaagccctttgaagaaacccaagtgtataagagtagcaaactctaccccaagggtagttgttaaagatgtcaggatgatcgagtagcctgacatgttcgagatctactaatttctgcttttccttggccaacaacatattctccaatagatgcaattgagctagcttcacacaatcttcatcattacttccatcgtaactatcgaacactctatccacaagttccctactaacttttttgctcggaaaatacttttcaagaaacccgttcccagaggtttcgcctctatttacctttggacattcagaacaattcaaaccagttatcaaagcaaactcttttatagaaaatctcagttgcgctccgcagatatcaaaccacatttcttctacgttcggttgttctacttccctcaagagaatgtgatgaacgatttgaccagagaattggaactcactcacatccaagaagtgcccgaaacaggtctttctgaacatctccaattgtttacttgttaacttattctttatcttttgaatcacgtcgtaacttgaatacaaaatgatcttggacttaatccaatcctcttcattaatttttaaatcccccatctgcaatttcaaacaatctacattaaaacaccaacaggtacaacaacactaactttgatgtttcccactttggctttagtactatgaagcttcctacattacgctatgttttagccgaaagaaaattcatgtcacactcactacttagcactcaaaaatccagttctcccctagtttgacagtcatattaaaaggatgattaaaactggaaaaacaatctttctaactaatcctagagataggagagaaacaagaatgtttgtcaatggttctcaattaactcgggtagttttatacatggacaacgaattcaccattgctaaccaaatagtggagaagaaactgtgatacactgtctcaaaacacaaccattcacaagaaagcaaactacttgtaatcgaaattaatcagtgatacatcctagacagaagatagattcactaaaatctttaggaaaattttcaggttacaataaattctcaattcattgaatggaatggaaaattttttcatttcattcatttgtttggttacacattaaagtattgaaatgtcatgctaatagaataacctttccatcactagtccattttgaaatggaaagaaagataatttaaatgcatgatgagaaaaaatttaataattttcttatcaattttttaggagttttttcatttttacattttaaaacagtttttttttttttttgtaattt

SEQ ID NO: 115674 - DNA, 3249 bp, Cannabis sativa
  modified_base (1818)..(1819): a, c, t, g, unknown or other
tggaggcttgaagcggggacgttacacttagtatttcagaatgtggtttgttacatgcaatatgcatcttttgtagtagaatattgtcttaaatttttgtctatttggtgggttgttatatgcaactatcaaatggatgttgtatgatccaatagcttgaatggcacattatcctattaaaaatggttatgatagggggttgcactccgtagaggtgcctacatacgcttttcagggatcaagcccaaatgtagttctatctcaatgcatgaatatttgttagcaatagtgtgctgagaagagtgggtctcgtaagatcattaaacgaaaacaaatgcaatgagaacagaatagtagtttggggtttaagtgtgatacttttttaggtgaatagcattctagttgttgttgatgactcgtccttcgtttgtttggagtttgtaagctccattaccgactacattagtgattaggtagggccctttccatgttggggctagcttacctgctcttgcttccttggtgttttgaaagacctgtcgaagcacctagtctcccaccttgaatgatcgagtgcaggcattgttgttgtaatgctttgctagacactgttagtaggctgccattcttatcgatgccccttctcttctctcatcaactgtgtctagttcgtggaacatgacttccaaatttttcttttcagtagtcagttcatgtctaattgttagagctttactttttgttgggatgcctgcttccattccataggctaaagagaaaggtgtttctcttgtggatgttctagctgttgtgcggtaggaccacagtactcctggtagttcatcaacccatctaccctttgccaattgtgttcatgatggtcttattagacgattctgattggccatttgcttgagggtatttgggagttgagaaactaaacttaatgttccaaaatttgcaaaagttttgaaagtcgatcataatttctttcagaattatgtatctacatataaagtttcttcagatgaatccttttacctctttgtcttgaacttggttgaacgattctgcttctatccacttgttgaagtagtcggtcactacaagcatatatatcttctgtccaggtgtagttggcaatttgccaactatgtccattccccacttcataaaaggccatggggatgtgatcgatatgagacatttagaagattgatggggtacttgtgcaaaatgttggcatttgtcaccttgtcttgtgtattcagatgagttggctctcatagtaggccaatagtagccttgtgtgagggcccggtgtgctaagcttctgcctcccgaatggctgccacattcgcccttgtcaagctcaactagtatgtactttacttctgcagggttaacacatctcaaatatggaccgtaaaaggatcgtttatagagtttacctcacattattgcgaatctagctgcttgagccttgactcgtcgggcttcattcttatcttttggtagcatatctttttctaagtacttgaggatgggcgtcatccatgtcttttcattgggattgtcatttacttcttcctcttctctcttccaaacagcaggccactagaggtacaccattggggttgttttggggccgattgtctggatggaagacacaaggttggctaaagtgtctacatgactatcattttccttaggcacctgattaattgtgaactcatcaaaggtcatttacaattcttttgttctctcaaggtaagttatcattttgctattttgggcttgatagctaccttgcatttnnttgactacaagttgtgaatcgctagagacattgattcttttggctcctatttctttggctaaaccgagtccaacaatcatagcctcatactctaccttaatgtttgtagatttagacccacttctgattgcttgcttgatcttctcgccttggggtgaggtcagaacaagtcataagtcgcttcctcttgtattgcttaaaccatctacatgtaactcccatgtgccatctgtctatccctcaggtgggcaaattctttttctacttgcacttgagagttaggtgtaaattctgcaatgaaatcagctaatacttgagattttaaggtagtttgtggcttgtaggagatgtcgtattcactaagctctattgcccactttgtcagcctgccaaacaactctggtttatgtagtatggtcttgaagggaaagatagtgagtactgtgattgggtggcattggaagtatggacataattttttggctgcgtgaatgagtgccaatgctagcttctctagttgacttacctagtttctgcatcaagtaaggatttagagacataataaattggaagttgtttaccttcatcctctcttactaggactgtgctaactgttgtctcaaagatggctaggtatataaagagcatttcgttgtcttttagctttgacaatagtggtgggctaatcaagtatcactttagtttatctaacgcttcttcgcacttagttgtccattcaaatgtttttgattttttgagtgtgttgaagaaagaatcgcatcactctaaggactttgagatgaatcggcctagcgcagtgattcggcctattagcttttggacatctctgatgcatgttggtgaaaggatccttaggattgagtcaatctgagctaggttggcttcaatccctcgttgtgtcactaagtagcctaagaacttgcctgcagacacaccaaaagaacatttattaggatttaacttcatgttatattttttaggtatttcaaaagattattttaaatgattgatgtgctcctctacaactagtgatttcactagcatgtccttgatgtagatttccatggtcttccccaagtggtcagtgaacatcttgttcacgaggtgttggtaggttgctcctgcattcttcaatctggacaacatcaccaacaaaagattcctaggttggtcatgaagggtatcttctcttagtcttccggatgcatgaggatctagttgtatcctgagaaatcatctatgaagctaaggagttcgtgtcctattgtggcatctaccagcatgtcaatatgtggcaatagaaacgagtcttttgggcacgccttattgaggtctgtaaaatcgatgcagaccctccacttgccatttttctttttcacaatcactacgtttgccagccagtctgggta

SEQ ID NO: 115675 - DNA, 1371 bp, Cannabis sativa
tttgaattgacaatgagctttttttggaagaagctactcctctcatttgtaattcagtttcagtgtagttctaatacaatattttattcttgacaaaaaaaaaatactaaatcataatccaaatccaaaacagctctttcaattaggtactgctgcagccaaacctgcatcaatcaggatttggtttattttactaaaatgaatattaattgcgtttctacagctaaaaataatatattctttgagagaaaattgtataccttattaatatggtagaattttattcaaaagatgtatcttagagcatcacagcgctgatgaagagaagcgctcagcaactcttggtagccactcttgaaagtaggcctggcaatccatctcagcacgagagatggcgttaaggggagtgacagtaatctggaaaatgaaatcataagaacattgttaatcacaggaataacctcttctataaattgaagtaaccaaatatacacacatatccttcttgcaaaattcggtgatctgtatcatcctccttatctgattcagcacccataacctacaaaagcaaaaacgcgtttattattcaatatttgtcaaaaaggatgcaattaaatttaaaatatgaagttagaacacaacgaaaagtaaagttttcccaattcattttaagcatttacaatcaagtacttccaaaaaatacataatcataatgcacaaacagcagtcatttcagaatctttagaaccgaattcagcagcagctattagcttcaatataagtattcttcttttgtttccaatcttaggagactcgaaatatgaattctaatgtgtaccacacacaatatccaagcatagaaactatcaaacttcaaggaaacatgaagaatagaaaaatatacagcagaacaatggcaagaaacaaaagtaaattaaatgataatacaaaagctgcagaaagtaaaatgataacaggacatacttttctttggaagaatcgatagtctgttgacacagctgaagtatcaacttctgcagacccagctgaatctgattccattgtcatggttgacaacattttggctccttccatatcagaagaaacttctgtccatcccattctgaatatggtcttaccctgcttagttagcttatatcccttcgaaggcacagttagatagaaattagcattgaagacacacaagtcaatcagactcaaagaatagatgatggggttatgggaggaaaagcaggaacttcattgtatagagaggcttaaacaggtacctagttgttttgccttctttctttctttacttttttctctctctctctctctctcatgaggccaatcataagccgaaagccc

SEQ ID NO: 115676 - DNA, 4253 bp, Cannabis sativa
tgttgttgttgttgttttttttttgttgttgttgttgttgtttttgttgttgttgttgtttttttttgttgttgttgtttttgtggttgttgttgttgggttgttgtagaggtccaaaggggtgtggtggtggtcgtggttcatattttttaattattttttatttttttgttttgtcataaccgaagtaaaaaactaatttgcattggtgcactactatttatttcagttatgaactgaagcaaaaaaaatttagcttcggttactaagtgaactccctttagctcttaatgtgtgctcactttctctccaaatgagttttagaaaagccttttgacgaagatatgtactcacttcctcttgaaatgagacataaaaaaattttctccccaagacctacactactctaagtttttacaaaagatatactcttctcccaatctaagatatgaacataaaataataagctactctgtagatttttttatacattatagaatatcttatatacgttttacaatagtctaaaatctttttttgaaaaaaattatactcataattaaatgatgattgatctgcagcaacaaatttactatttgatgtagcaagtcaattagtatattcctttatttttatccaagttcatacattgccaaaatagctataaacattaaaacttgctataaaaagtcacaagaacatctatgtaggcaactaaaactaaatcaaataaaaaggaaaagttaatgcaaatgcaaccataatttataacctttgttccataaaactagggatagaaatttggtgggtaatgagcaaggcatgcacccctaaaccccatccttgctccctatttatgtacccatacctgccctgcccccgcccctcctaatcctcaatgggtttgaggtaggaaatctccattgggtatggagacttattgggtatccatgaaaattaaaaaaaaaaattataataatcaaataacataatacaattgaaaataaaaatcaaaagagtttttgaatttaaaataaacattctatctaatttttactttacattctataaattataaaagacatataagtgagacactacaaaaatgatcacttatgtcggtgccttttgagttttgcgccaacaaaggttaagttttaccgccaccttttctttgcagtgtcggcaaaactcttcaaatatcaaaaaattttggcaagtttttttggcgtaaaattgtgccagtgaaagatagttttactggcgtagtaaggaaaaagctccagcaaaagtctttctaacaacgtgtttcgttaaccacgttggtagaaagtgttggtttccctccaccaaaatgcaggattgttgagcgccaaaatataaggtttttgtcggcgtaatatggcaccgataaaacgtttataacttggtcaacatttttttggcgtagtatgacgctggctaaacccaaggtgagaaaattcccacaaaagaaaaaggagtaagggggaaggttttgccaacacaggattgtgctgcaaaagtcttaatgttttttttttttggttgatgaaaatgttatcgtttaatttaagtggtggttttaacggtgtgcacgaatacttttatcgatgcatagaaatgcgtcggtaaaagttgacctaaataataaagaatgacgaacccctcctcccatttcttcttcttcatctttgttccagtatgttgccttcttcttcttcgttctagtccgcggcaactggatgtaagacgcccttccctcatttccttcttcttctacttcttatgccccttctcatatatatatatatatatatatatatacattttctacattttaattaatctgtattttttttattcaaatttagggatctcaaaacaaatagtgattcagcttaattttctctatctctttgcgtcttgcagctctcctcgagttggtgccatggaaaaagtaagggctaagatttaggggaagtcaaaaatttctaataagaaaagcaagtaaagaggacctagttttactactgatgtgaaaaagactaaatccatggaagaaattctaggtgttgaaccactggaatttacagatgaagatgaagacatggatgggaaacatcaagatcctctgcttcgcgatctattccaagcttttttatctccatgatcttctttgtagtcgctgaaaagactagaggacattttctctgattttttttttcttggaagcaaattaggaatgctcgaaatctatttcgcaaggcctccatgaaactcccctgatcctcagatctgagaatattccgaggaacctagcttcatcttttgcgaatttagggaaggataacaagatcaagattactatggaagatattgaggaagaagtcaattactggaattcacccatagtctgttacgtattgggagttaatccacctttatcaatccttaaaggctttgcaaggaggctatggaaggacaaggtggacaaagttggtatgctttcttgtggatttttcctaattcgatttacttgtatggaaggaagagatgttgttcttgcagggagttatatcttctttaataaaaggcatgtcattattaacgcttgagatctgaacacaaattttaagaaagaagatatttacaccattccaatttgggtccaattagaggatcttgagttaaaatactggggtcaaaaatctcttttcaaaattattggtcaggtgaaaaatctttgatggtagatgaagtaataaaaggaagaaataagctcaactatcctaggattcttattgaagtctccctgcaaaaggaatttatatacttttgagatgagtttggttgtgatacattagttgcaatcacttatgaatggaaacccattatttgtagtaattgcaaaggaatgggacattcaacaagtgattacaagaagaaagaagggaggaaacaagaatgtatcgttcaggataaggggaaaaagccagagatcaacaaggatgatgtcaaaaagcctaccgcagacgaatttaggccagtttctaaaggtttgaagcataaagttaagaagcctatggattgttgtgtgataaattcattttctgctcttctagatcaaattgcttcaacatgtgaagtgtttgaagtgagccttagtttgaatgaattggaatttataagaagagggggagaacatcctctttccaatggataagatactaagctagaacgtccaagaaatcaatagtcaataaaaacaaagcgaagtaaagcagtttattgctaataagaatgttgatcttattggtctcctcgagacgagagttaagcctttgaagcttggaaccttatatgttcatatattcttaagttggtgttttactgctaacaatacttggtacaaaaatagtcaaatcattgtagcttagaatcctttgagattcaatgtaagtattttttattgctctagtcagcttatgcatctctatgtttctactgttgataatatgaacaattttttgttatttttgtctataaaattaatgatgaggatggaagaaaaatcttacggaaagaattacagcatttaagtacaactgatccttggattgttgtgagagattttaataatatcctgaatagagacaagagagttggtaccagagtcagatatagtcctacacatcttttcaggactgtgcttgatcttgtcatcttgaagatggaaagtatagtgagaattttcttacttaaagtagtaagctacggggtaatgacagaatatactccaagatagatagaattttggcaaatcaaatttggcttgatagataccctaatgttgaatctattttcctcaatgaaggcctatttatccatactcctgctattctacttgtgtatcctaacccctagtggaaggaagcttttaaatactttaggatgtggtcttctcatcctcaatatcagtaaagaattggtaaagtatggaatcaggaatttaaaggcactaagatgtatcaaatggtatcaaacctcacggccctcaaacatatcaaattttactatttttttagacgtaagtaagtaactatttttgtaggctatttatataatattctacaatgattcagttaataaactgattattggatattgtttttttcacattatttttttttttgatcaattttttttaagatgattttcatattacattaata

SEQ ID NO: 115677 - DNA, 3091 bp, Cannabis sativa
gcttcgaaacccccttcgggtctttttaccagattgtatggcatataagtgcccagaagtttatcccataatgggaagaatggctgagaatagttgtactttaagccttgtagttgatggtgaatgtcatgataagcagtgttattctggaagaatagatgaaagatattacctggtaaccaaagtccacaatgatcatcgacagttttaatcacagcgaagctgaagaaaatgactgctgtccttgcagtcatccccgagattagaaatgatagggccccgccgaaagtgtcgagtaagaggccctcgagggggtggttgtaaagggctccgatagcataagggacaattagtctgtggtgttgtgagtggacatggcggtacaaaaacttgttgtaatgcatataacggtgcacgaaatactgccatgtgtccatgacaaacattgcaacaataatctgcactatctgaactgcgagggagggttgaatggttactcccgatgcatttgccttggacgtgacctaattcaacgatgtttttgaagtaaaggattagtttaagctcaagcagatccatctaaatatcatccagcatagaacatataatctcacaatacttgataaatttaaggttcaaccaataaatcagacatgaagattgcaaaccttctaagcctaactataaattgtctaaaagggtcaaataattaaagatcatttcactttcaaagcaacaaaagattacaatatttccctcttaatcattacaatctacaatctttaaaagcctagaacagcattgtcatttaatggaatagactagatattgaccaggatattcttcagaaattcaatatgtttttagtgtttttatctttataacaggttataagaaggttttgtcatggtgaacaagagttatgagagtttaagtagagccttcctagggtggttgcctatggatagtaatgaaaacattaaatccaatttctgatcaaagccagctaacaacctcactcaggcacaaacataaatttcagtcatgttcacattcctggcaatggcattgtttataaagcctaaaaatattcaagaaaaagcataaacgaaatgtgaaacttttagtcataaagataatggtgatgatgacaataatgatgttaaaacatgagcaaatgaaaaattgcaaagagaattccacaaatcaaatgtctcttcatattggaaaatctttgactttcactaagttaagcccatgcaacaaccagcttgcacagctccaaatgtaaacttggataatcaacttgatacttgttcaacaaaacaattaaacaaagaatctaatttgttcgttacatgattctgattaactttcgaaacaccagattgttccacagaaaatccaaattgctacattcaaaatctattatagtttccctcctaccatatcacattatacaaggtacataaaatcctaaaggaatgatacaaagatttagatgtaatctaccagaaccagatacacagctcgcggtacgagtcctagtctaaacgtgcagatgaataatatggtatggaattcaagtggttcctcaactaacaccaccaccttctacaagctgagaaaagagcttctaaaggatctattatcatatcaaccttagagaggcatgggcttcatgaaactttaagcactttttaaggaaaccaatatctctaaagggaagagaacaaaaagaaaacaaaggtttgattgaagcattttacctatatgcaaatgtcttaaattttcactcacatttctaagttcataatatgtcagcatatggttcaaaaatcccaattataccaaaccataaagactacagtctactctattgccaacaacaaacaaataatggattgttatagtcctttctcatttcctttctaaccaaaatggggttttcaaaaatggagatctgagtacaatctcacttttacaattgccaaaaatagaatatttcaactgggtcaaccttaattcatagtaacaaaccattcagtaaagagttgttcaactcacacaaaacaaaaattaggtctttatattgactaaccaagaagagtgcctgagcaacggttgcctgaacaagctgttgaagcaaaacacctttgaccacagaagagagaggcactgatttgctctgttgttcctcctcttttcttgtatgcaatcgataattatccaaaggtggcatcaactgataaaacccagcatataaccaataaaccacaatcggagcaaatgtacccatcgactcatcactcacataatcttcccaaaaaaccattttttttttcgatcccaattttcactaccagacaaagtttctacctttactaataattcttcaattcccaacaaaacacaaaatttccccaatttttttaaaccctggaagagaaaaaagaatggaaaaatcgaatcaaatgagttgaaaaagacagaaggtggttcgagtattcaaatttttgattttttttttattttctcgggaaccaaacagaaaatgaagaagaaaaacactgaatttgattttgacttacagtgaagaaggtaggaaatgggtttgggtattggagagtgaattctcagatctaaggctgtgtttggattggagaatgtgttattatgaaaagtgagtgcaaacagtgtaaaatacatttaaattttaaacttcactcattcaaaaatcaattgttgatatttttgttctttcttctttgtttttcttttcactttttaaataaataaactaaatgaaatgtctcaaccaattattgattgccacttgttttctaagaaaaatgttttgtattataggttgtcacagtgtgactccctcgtttggtacgcataattggactgtactagacggaatagttttactagtttagtgttgtgctacggagaaaaatagctctatatacattaattagttaagggtaaatagcgtcataagtacctaaagttttaagtttgtaagcagcataacccaatatttatttttagtggcataagtatcaaatgtttgtaaaactgtaat

SEQ ID NO: 115678 - DNA, 1608 bp, Cannabis sativa
  modified_base (26)..(45): a, c, t, g, unknown or other
ttagggtgttaatcaatatacttgtnnnnnnnnnnnnnnnnnnnntaaaataatttccaacatttaagtgtaatggatgagttgattacacgtagatattgacttagaaccgaaactgatgcaaatcagggcctaagatgtcaacatggtcgcccagcactgaccatggcttaggttgactcctaaaatgttgcagaatgttgaaggaatattgcaaaatttcgaccgtctgggacccattcgatatggcacacttctaacactaaatcccacagaattagggagtttgtcccctgtgtcaggccttggaaagaggcacaacaaaaaagacaaccacatttttgtctaacgtccactactcttacattcattgtgcactatcgatggcgcatgcccacctatcactatcacgtggtatggtctcgtacggacaatggttatcttttaaattgggcatcacctacttggcccaagtcaatattataatgtattttacccctatcaatgggcttattttaacaagcgaactgtaacgagtttaggtttacctgaaaaacctgactctagcctataaatagggttctcacccctcatgcaaagggttacagttttttgttgtaaaacactggttaaaaatttagcaaaaacactcttgtgtaaagtacaacatagcaaaagagctcaataacattgagagcttaaaggaagtcttcaccatggttgctactaaaatcgcgaccaaaaactatctgttcgcaatgacaatcataatgatgatgccgatgatttgaactggcctccttcgacggacaatcaagcaggagttgtgggaggaggcgagacgtcggaagtgactcaccgcccacctcagattggaaaaaaaaaagagaattatgttgatgaaacccccatcaatgaagatgaccaaaaaggtcatggtgaggaccaactaggtgattacgacaaagattatgataaaaactactaagaggagtactttgacagatatcctcatatttactaaatatcatccctctattgtaatccttttattttcttctccccacaacatctatctcttgctctccacttctaatcatcatgtttatattcttttatactctgttcaattttctccccatagtcaagccccttagatcttctcttaatttttcaattttgtttcttttaaaatttcgacccttggctttgtgtttcaacaatggagttatgatattttgttcatctatgaaaataataataatttcatgtaatatataaaactattaattgtttattatgatacaatatttaattataaaactaattaaatttttttaaaaaaataattacaatattttcaaactttacattgaaaatataaaatcaatacttttttttaaaaaaaaaaagagcttgtttttaattgggtagaattatcattctgtatggcaaaaaaaaaatctcgaatgatgtattataaaattaaatttttcattatgttacctgttgtgataaatccaacacgcaagtatacgtatcgttctaacaagtaatactcaggtaagtgagatcgttcccacgaggactgtagctaagtaccaatca

SEQ ID NO: 115679 - DNA, 1258 bp, Cannabis sativa
  modified_base (33)..(36): a, c, t, g, unknown or other
tgtgggattgtacagcttacccggtatttcccnnnncggatcacgggactactgacagtcttggttccccccacctcaaatatgaccattgttcacaacaaatgggtttacaaaattaagtataattcagatgggtcagtagacaagcacaaggccaggcttgtggcaaagggattttagtagctccctggaattgatttttttgagacatacagtccactgatcaatccttgcaccattcgaatcattttcactttggcagcaacatatggatgggacattaaagttgacattaataatgcctttttgaatggtgatcttaaggaggatgtctacatgtatcaaccacagtgatttattaatccatactatccacaccatgtttccaagctcaaaaaggctatctgtggcttaagataagcccctcgagctttgtttgataagctcaaaacttgtctaattcagtggggctttcaaaacaacaaatcagatacccgcttatttttcacaagaaataatggaaagcttcttcttctccttgtgtatgttgatgatatactcatcacatgagaaaacatgaatcacatacaacatgtcatcaccaccttgcatgattagtttgctcttaaagtgttagggtctatcagttacttcttaggctttgaagttcatctatccaaagactctatcactcttactcaacaaaaatatgcaagggatttgctgaaaaacactcagttactagattccaagagtcaaactacacctatgtgcgccacaaaaaaattgtcatctaaagtaggcaccccaatgcaagaccccaccacctacaaaagtgtgattggagcatcgcaatatctcacaatgtctagaccagacattgccttcccattcaataagttgagccagttcatgcaatctccaacttttgataaatggagtgcttggaaacgcatcctcatttatctagctggcacattggacaagggttaacattcaaagttgctcattgacttaattttgtagggtttcactgatgctgactgcgctggatgctatgatgatagaaagtctacctctagttattgcattttccttggtggttatctaataagctggtgtttaaagaagcaaactgttgtagcatgatcgagcacagagtttgaatatcatgctctttaggggtgtacatcaaaccgttcaaaccgctcaaaccgcccgcaccgcaaaaaaaatgcggtttgaaattcttcgcggt

SEQ ID NO: 115680 - DNA, 1708 bp, Cannabis sativa
tattaaagaaaacgacaataaatggagaaggtgaagtgaaggtaaacaattattggttgtaaaataaaagtaaagcgcctattgggaattggcctttttgcaccacaatactttcttccattgtttcaaaaagcttttagtttaaagtaataagctaaaacagaaccacatgcataccctaaagcaaagagaacacaatgtttttttaaaaaaaaaaaggtggccgcccctccctctctactttaatctttttagagactttatgaaatacacatatatctatatttgtatataatattaacttgaaaacaaaagacatcatattatgttatagtaacctctctatctctaccgtttaaacttttatccacaaaagttgtgaagttgcattgcatttgcatggggaccataaagcttctattccaaagtaaaatataactctatctccatttcaatataaatatatatatatatatgtatatatataaataagctattgggagtcccactgtcatacactctcctactcccaccaatttccattagtcaatttttaaaatttgtatcccatcaaaaaccaaattgagcatactcttgcatgttgctatttgtttaagtatttatcacttcattataaaaatctaagtaactttaatcttactacgtaacaatacttgatctttgtattttttttttcttttaatttggttttacattcaaatggctgtagtggcgaaaccaattataatctctttcgaagtgataacattaacaaagtataatgaacaaattaattaccttgacaacataaaagtaacactatatatatacttattattattcgatcgacaaaggaatttaatagagacaaaactaataaaaaattaactattaagttggagtcgcctccctttggctccaatattgatcgctatattttttttttatatttaccctactttaccatataaaatactaaatagtgatatgtctttaagaagcatatgtcttttctgctatatatccattaaaagaaaaatgattttaatggattgattagcatatataatcacccattctcatcaaacatttgctaaagtagttctatcctaaaatgactccaatattgctcaagttatttgtatagtgatttcacttgatttttttttctttttgtatcttctcttcttccttcttcgagcatcatttcactgtcctatatataaaaatctgcacatgtaatttctacggttagctaaccaaagcgtgagggacgacatggcgaaagtgttagaaataaaagagagattacaatagaagaataaaataagatgaataaaaaattaagacaattacaactctaagcaaaatattacaaggacaatatattaaataaagagttataatcccaaatcacaaaatacaaataaaaaaaaaagaattacaactcaaaactcaaagatataataagtaaatataaactatataaaaacatatatataatagtgtatatatatgatatagaatatatatatatataataaatgatatatagtagaaatataaagagtgtatatagtatgtgtatataatatatataatactatatagttaagatataaatatagggtaatactatggtaggacctagcaaaagttccctaccggtagggaactttttttctaaccgttgattttagatcttgtg

SEQ ID NO: 115681 - DNA, 1075 bp, Cannabis sativa
aaaaatttaaattttgatgtagggagacacaactactcattatttcctattttattattattattataaaatgttttggaaaaaataaatgacacagtagagaaaaaaaatgtggaataactccagcatgacactttaaaatcataaaaccattattaatagaacttaccaaaggcagtatactgccaaaaatatttaaaaataaaaaacagtataaagttaaaatgaccgtgcgacagtacaaatgaaaaaaaaaattataaaggcagtaataggtgtaaatttcccatacattatgtatgtcaaccatattgcgcccatatcattatcatttgtcttgctttgcattatttttgaataaggacatcggctccttatttaacactgattgtgaacctttgttttcttttttaaagtctcaattcaaggccttctctgttgttaaaaggaatcacttttgtgtaactttagcctcgaccttactgagtactcctttttccgggctatgattattatgaccttttaggctttggtttggtagatgtagctccgtgtttataacaagcaggtcgagcctaccaaacacaactttgggcctacagagtttgaatttagtagaaattacacaaattatgaagaaaaaaaaaacttaaagcttcacttttttatgcactactacaaattatattattcacgtatgttaatattactatttattttgttggcctataggtcatgtatttatgtgagtgtttagaactgacactaaaaaacgttatttatgtctactatatattagatgctaatgacataaacgacgagaaaaagattattaaaaatttaatgatgttttgcgtcgggttataaaagtcgagtatgactatatcatcgtttataaatactcataatacttcttttgacttttataaaccgacactaaaaatcatatttgctttaaactcaaatcgcaaaatcaacacaagcccatttacaccacaaaaaccctaccatatatattaaaattaaattttctaatcctaataaacagccgcccaatgttctctctctctctctc

SEQ ID NO: 115682 - DNA, 1995 bp, Cannabis sativa
agggcacaaaacccaacacctttctgggggtatagcctcaatcacaagggcaataaatgtctagattctaatggatgcttatgcatctctcgagatgtaatttttgatgagcacacatttccttttgctattaggaaaccatttgagtgttcttctagctcttccatgctattgtctgctagaattcccatgacataagtccttgttggccaccatgtgtctagtaaccccactccattacaacaacattaccctagtgttactttacatcctatagcatttaatcctgttatctattctccacacaacctgaggtagtggtgcctgctcctactatttttagctttaacaatatgcctctagtgtctccaccacttcatgatgcctcagttctccctaaccaaactcatatagtcactacacctatcatccaacaatttcatatattacacttgcacaacctcctattttccctaacacttctactcatggtatgtagactagatccataagtggaatacacaaacctagaatctatgttctcactcaagaacctactaatatgaaagatgctctttcatttaagcaatagaattatgcaataggtgatgagatgcttgcacttaaaagaaataagacttggactttggtttctatactacaagggaaataagctactgggcataaatgggtgtaaaagcttaaggaaaatctgcatgggactattaataagcacaaagctccacttgtaactataggattcaatcagcaatttgagttggattttacggagacttttagtctagtagtaaagcctatcaccattaaagtggttctcactccttttttattattttttcttacaaatggtagacaacacaattagatgtaaataatgcctttttaaatggcacttgcaagagacattttacatggttcaacctcctagctatgaggtagttttcaatcctccatttgttttcaaacttcacaaggccctttatggatttaaacaagctccaaggtcctggtttgacaagttacaatagtcccttctctcccttatattatttttatccaagttagatcaatcagtgttcatccaaaacattattaagttgacgatttcagttttagtgtatgtggatgatattctcatcacacttaatgaaatttggtaactcaactcatctctaatgtaaatcaaagttttctcttaaagatcttggggaactgaagtactttctcgggactaaatttaactataccactaatgggacacatttatctcaaacgaaatatattaaagactttctctagaaagcgaaaattaaaaatgctaaacatattggaaaatatattttaccaggatcttacttaataagtatgttgattattactaatctaagaacctaaacatagaaacttaaaataattcaaaataaacatgtaagagattaagaaatcttaaaatagtgcatcgaaaattatgactccttctgtttgattctttaactcttgttcctttatgtcgcaaagtattatcaaaaattcaaacctggatcttcttttgaaaggagtgtctacacagtcttctacactatcctgagtactcccttgatttgtactcaatacttgttgcacacgaaaataagtgaagaaaagtgtttgtaaatactcttaaattataactctcaatatcttacttatctgacatatcctattatcactcaaaaatgtatataccttatatacttgtgtatatagacgtgtatacttgaggaagaagagatgagaaattcaaattcctttatagtcaagtgaaacttgaatctcaagtttattgattaagaaaggtgtagagaggtgtatagtgttggttttatgttactaaattaggtacgtagcagaagagtttcgtattatatgattatcattgtaccatagctcaaggatctccaggtgtgtgcacactgataactctatgaaaataga

SEQ ID NO: 115683 - DNA, 2753 bp, Cannabis sativa
tatctctcgcactcttacccaaaatcttcttcatctatagaatattcttcatacgaaatccaaacccattatctctctctacctctcaatctttctctcttaaaatcacctctcaaaactcgtttgatttcgttctttacgaaaatgataagtgttggtggtatttatagatctaggatataattcctaaagtcggtggctgcaagtactaagttgttaagttagttacgacttaagaaatctaacaaactcctcatagaaatatacccacactagtataagataaagtgcttttggatgaagtgtacgcctctgggactaagaattgaagcatacgctgaaaggtctttccagataggaatagagacaattggagtcgactatccatgacttctttctaggagggaacatctagccatctggaattccttttcggaggaagactagatgtcctgaagactccttccaagtggatatgatagatatccggaaacgccctttcggatgacatctattgttggaggaatttggacaacatcgaattatgtatacataataaattatttgaacaaaaaattacgaacactcacttagagtagtgagtattcgaagagaagctaccaaaacaacagaagaactggaaaatacaaagaacacaagggaatacagatgttcagttcgatctgcttagtccactgttacaaataatttctgcttagtctattaaatttggatcactcatttatataaaaagtaagtgtacttttagttttatacaacaaatcgattatagatccattttacaattaaataatagtattaaatcagaataaacgtaaaagaataaatgaagaacaatacccattctaataataagtgtagcaacgtaggtgacctatcgagtgcaagttgcatgttcatattctcgcacaagcttgcaggctttaggtgtgtcctatatttgctaatgggcccagcagtgggatgtctgtgttctatttgagtcgcattgtttgacatctcacgagttgacaacatgggacatgtgagtccttttcgagtacgtttcgtcattccgaccagtcgttatgtaaagagctatcttacttaatcgcaggagaataatacttagtcatcatatatatgtcgatacatgcgcgacttatataaatcctctcggtcctacttatcttacactacacaaggcatagtatgtgactagaccctgtcaaggtcgcatcatctcgcgagttggatcaggcgaggttaactctttgagagtcattaattaacagttcatccattcctcggggattggatccacgtgtcaatattataggagactactctcgagtttctaggtgaaaaatttacactataacatacatgcccctagtttcgcgattgatagatgtgtcattaggaaaactatcagagagaggtaggtgagttattgtcacgagatggtgacctttgattgtcttgttgatggttttgaaaagatggctataattattatttttatttctccaatatgccacatcatcaagacccttcagggtatgtgtaggcgtgctctttggagaccattagattggaagaccttaggcaattccctaccacgtgtctgcttcccatcaaatacaaactgattctcatttcactttcctcttctaattttactctatcatttcttgagaatttcaaactttagaaattttttgaagcttcgaatccctattctcttgagacgatttctcgaaggttgagggatctttgcagagtgatcacaaattcaagagaaatgatttttacacagaaggttagtaatttttttctcatagcttttgtgaattttcttttctaaatgtttgtatgttgtttaatgcccaaatgtgactttcattagcggtggttgtagtataaatcgggcggtcaattctacagggaggtgaggtgattataaacaaaagcattagtagaaaaataaatacaaaaggttaataaagagtgacgatagtaaccaatgagtttgatgattttttttttttttgtgtttttgtgtttttggtaataaatattaaaataaagactgtttttccaatatgataactttttgaaagaaaataatcatatttttacaaacttgtaccataccattttcctttctttagtcgttggataaaagctaaagaaaaagagagatccaggaaaacctttctccttcaaccaaacatgatacaataatctattagatcatgatatcatttgttggtcatttaataataatatcagttaaatttaaagactacgttggcattgtttgattaatgaaaaattcttatgcttttttaaccagttgactacctttaattataattacagaaaacacatatatatggactcaacaaccttcttatttataagagaaaataattagtggtgggtcttgaggatttattgtccacaataaaattaatcaagtggataatactataaattcaattgagataattaacactttttaacaaaaaaataaaaaataaaaataaaaagtcataaataacattgctcattgttctagtgatgcataactgaaagaaggagagaaaaagaatcaataccatttggcccattaatggcttgtttagttatgagatattttcataaatacctaaaaattatagggcttttttcataaatgtacaacaaaaataaaataattacaaaaaatgtgtaacgcccttacttac

SEQ ID NO: 115684 - DNA, 2191 bp, Cannabis sativa
  modified_base (2135)..(2156): a, c, t, g, unknown or other
ggggggggggggtttgggttgaaaaactcagaaaatgaactctattttggctaaaattagattatttggttgaaaagaccattttgcccctaaagcactcacaataacatatacacataaaagaggtaaatttgtcatttacactcacgcccatatatcacataaattacattttctcatttaacacataaaatccataactaaattccaaaaatatattttggttcctgaacatgagtcgacccaaaatacccggttgtgactataccgtgctgacttgtcagaaattacttgcagaaagacaaaataaatatactatataataatatagtccatgaacacaatatactataaaattacaattttacctttctcaggtaaaaattattaaaatatccatgacacaccaacggagtcttaaaatgcaataaatcataataatttcacatattaaatcatatgataatataatttctcatgaacacttaattaacctagttagggttgctaatccagttactaaactttagggtattacgattaatccatctccgtcgacaatgacaacccgtacaaaaacagtagagagagaacaaatccttgcttgggtgtcgaagaaggagaagagaaggaacataaaagaaataaaaaggaaaagaaaaagaaaaaaaatatttatttaattatttttttttataatatttaaattattttttataatattttgataattaatattacgtgtaccactaaaaatttgccacgtgtacacttgtgtacacgtggacagtccactgtgtcacgtaactgagatttttggacgaaattgtaaagagcaaaacagaatgggagttcagtaggttttgccatcaaaatttttgtgtagttaattgttaaaaaataaataaagtttagttggttttgctgccaatatcctcgttaaaaaattacatctaagtatagtataataatttcataaataaatactctctatccttccatcacacttcatctcctccaccaaacaattcaaaaggattgccactcttttctcccttcctcttattctacatccttcaccaactctccatccttcttattctccatccttcctaacaaacatagccttaagcagggccggccctaggcataggcaagctagactcatgtcgagggctcactcattttggagcccaaataaaaaaatatttttttgaaaaaaaatatacatattttcttaataattttcaaaattattatttatctttatagtaaggactcaatttttttttacctataacccattctaacttaagaccggcccctgaccctaaggaatgtttctatttatctactatgatagctgggtgctcttgtgaatgaaatgctctcttttcattcaaaataataataataatagtaatttgccaaaaaaacgtagtcaaaattttaaattcttagttaaatcgttaattttgttctaatatattttgttttgtataataataaattacagttcaatttttttttatatatgattcctactttgcttatgaaaaacttgtgggatttatattagcaagccataacacttatatggtgggggtttggttataaaataaaataggaaggaaataatttttatttaatttttttatttggttaaaatattagaatgttattatgtttttattacttccaattttaagtttgagttggagatagtagagtttgaatgatagaaagaatatgaaacgaagtattggaggttactactattttaatttgaaaaatgagatccacataaaaatacaaactctttctaataaaaatttaatttaagtttgaaattctagtataaacatcataccaaacacaattatatgagaacgtatattataattggatcattttatatttttttttttgaataatttatactagcaaaaacttattaaaattgtgagttgcatgttttttttttttaaaggtgcttgtaacatataattttgaagttttctttttcaacagagtaaaatactcataaattttttaaaataagtgatttgagttatctgttattcaatatcttatataaaaatgttatataattttttgggaaaaaaacagaaaannnnnnnnnnnnnnnnnnnnnncaaaaatactttgggccagcccattaaacatttat

SEQ ID NO: 115685 - DNA, 2462 bp, Cannabis sativa
  modified_base (47)..(48): a, c, t, g, unknown or other
taaataattttcataattaatcaagattaactgctaatttccaaatnnactaagcgggctttacattcttggtatctctttgagtaatatagttgatgaggatgtgtggtattggggattggagagtagtggcttgtattttgttaaaagtgcatatagagcaattcatgatgaagttgttggtaatgctgtcgatgttgaattttgaaaaatgttttggttacagcaagttcctctaaaagtgaaaaatacagcttggcgagctatcacgggttgccttcctacacgagtacaacttagaattaaaaaggtacaagtccctttagtctgccctttctgtgagttgtataatgagactatcttccattgctttgtctcgtgtttctttctctcgtatgtgctagcactttgctgggctgggggtgaaattgatggtgttgttttgtttggcacttggctgagagatgtattgaatcgggtgggggctgatattgctgctcgtgttttgatgatatgttggtcgttgtggaatgctagaaatgatattatttgccaggaaaatttttgtacagtttcaaaagttgttgaatctgcaaaagtttatcttgatcaatggttgaaagctcaagagaaaactaatgttctatccttgggacccgtttacctaggtgacagattggagctatggactaaaccagatattgatggtatcaagatcaaagtggatgcaacaacatttgatgatattggaaaaattggattgggtatcattgctcgtgatcactataatgttgtcttaacgttcaaatcctggtgcaaatttggtgttatgcaagttgagatggcagaagcaatggagctgaaggaagttctcagctggataaaaatgatgcattggcagaaggttatcattgaaatggatagcttggtggttgtgcaagcggtgaggagctctctttacatgcctttttgttttggtttagttattcatgattgcaaaaaaaaaaaattctcaaatttaagttttgttgagttgatgtttgttaaacgatctacgaatcgtgccgctcatgttgttgctagagccgctcattatactactgattgtaagtttagtagggctaatgctacacctgaattaggcttgatttggtggttgatttgatttaataaaattctgaagcttatttttcaaaaaaaaaaaatcgagttgattttccaagaaatctcgctaccctggtagtttcggtggctgcttcatatatttatttataaagatattttggatctacccattaaattcatttgattcaactatgtaatgttcatgattgccaccctacgattaatttgttcatgggctcttattcaagtggctttttacagataaccaagcgataataatttatttttcttttatatattttgatatgtatgaaataatcgtcgcaacaatttaaaattttggaatttagatttcaattgaatatggaatatgttgtgattcaatcacaccacaaatcaagaacaagaacagagatgagaaacaagaacacaatgatcaaacataaacaaaagggaaatttccgacaaaagtctccaaaaagttcactttgatgcaaattagtccccaagattgaaaaatagtggcaatagtccccaatgtcacatttcttgtaacttcgttagtccttattttaatggagccgaaatatcacgtgtcgaaatattattggcccaaattataattttaatttataaaatattaaaaataagtaaatatatattatttataaatcatatttttttcctttagggcttattttttttcctctgggtttctttttcttttttcttcgtcttcttcaacttccaatgattcaccccaaccccgatccaactaggtaccaaaaacccaccatccactctcttgatctatcatctctcaccctctcaatctctcccaagatctgactcatgccctctccccctctatcttgaatcttgctaaacccaatcgtcaaacccctctcacaccatcacgatccagacatggcgaaccctctccacaccatcaaggtccagtcgtagccaacctctccaccatctggtcaattcaacaatcacaaatacaaactataatttagcaaatgtgtttacatctcatcgatggtgagcagaggtggtctgccttgtttgggcagtgatgagcttttttggtaaaatctcgtcgatgacaaaagaacggaagagcattttagctctgccatggccgaggagaaggaaaaggagagagtgatttggggctttggggttcttaggcatagggaaaactaagaaagttgttggaatttattttaccaggatcttatatctactcacaagtatgttgtttaacaccctatatatgaactttctaaaacgataaataaacacatatttaagaaaaccttacattgatg

SEQ ID NO: 115686 - DNA, 1970 bp, Cannabis sativa
  modified_base (42)..(78): a, c, t, g, unknown or other
gtgaaccatgcaacataaaacgttatttctgatctttattannnnnnnnnnnnnnnnnnnnnnnnnnnnnnnnnnnnngggcataaaacccaacacatgaatggcgtagcagcaagcggttttgtgaagacatcagctacttgattgagggagtccacatatcgaatatctaactgctgagctaagactcgatctcgaaggaaatgcaagtcaatttcaatatgcttcgttcgggcatggtagacaggattggcagctaaagaactagctccaagattatcacaccagattataggacattatgaaagctgaagttggagttcttgtaatagagattgaagccaaattatttctgttgtagccaaagccagagatctgtactcagattcagtgcttgatctggctacaacagattgctttttgaacaccaactgagaagattgcctccgagaaagatacagtagcctgaagttgacttcctgtcattaacacaccttgcccaatctgcatcagtaaagccatgtaattccattcgagatataggagtgaaatggagtcccagatgtaaggtaccaggcagatatcttaatatccgtttgcaagcagcccaatgaatggtagtgggggctttaatgaattgacttagcctattgaccgcaaaggctatgtctggtcttgtgagagttaagtattgaagagccccgaggacacttctgtaaagtttgggatcagagagaagttctctagtggtgaggctgagtttggtgcttgaacacataggtgtagattgaggtttggcatcagtgagattggttttagcaagaaggtccttcgtatacttcgactgagtgagatagatgcatgttgtgtccctgaaaacctcaaaaccaagaaaataattgatagaacccaactctttgagcccaaactgttgatttaacttgctgataatgtgttgaatataagtggaatcctggcctgtaattaatatttcatcgacataaaccagtagcaaaaccaagtggccattctgatgaagaaagaataggctggtgtcagctttcgaattggtgaagccccactttgagagagtgtgtttgagagtgtcaaactaggcccgtggtgcctgtttgagaccatatatagccttattgagtttgcatacatgatggggaaattcaggatcaataaagcctggtggctgctgcatgtaaaccacctcatttaactcaccattaagaaatgcattgttatctatctgctgtatgtcccaattgtaagtgatggtcagggagaaaatgagtcgaatagtacacggcttcacaatagggctatatgtcttgaagtaatctaggccatgtatctgttgaaaccctttagccacaagtcgggctttaaatttgtcaactgaaccatctttgttgtatttaactctataaacccacttgttgctgacaactgtcattccttctatgaaagggaccaagatccaagtgccctttctttttagagcatggaactcagtggtcatggcaccattccaatgaggagaagcaagagcttgctttaaagatgttggttctaactcatgaaaactgtgagcaagataagtttttggtttgtgaatgccattttggcacgagtaaccatgctgtgagtattgtgagggacagtggggttgggtaagatagctgaagtggaggactgagtgactatgagaggagattcagtgatgtcaggatgagaactgtgagatgtagaggtggaattgtgagtacgagtatgaagaggatatggtagggaagagctagtggtatgtgagagggaatgagagttttgatcagaattctgtaggggatagggtaaggaagagtttcttgatgaaagttgttgagaagtagagtgcgaggaaagagagtgagacatattattggatggcataggtgtggggttttgtgccctaaataaaa

SEQ ID NO: 115687 - DNA, 1099 bp, Cannabis sativa
attgatgttgaataaaatagattacattgaaatggaattttatttagggcataaaacccaacaggaactcccttggtgtgtgtggggaatgatgagagagaggagctctaactcccttggacgcgcgcggatggtggagtggcaattggggcaacgatgatctaagcatggggagctctgcacgcaaggagctcaacctaggcattgactcctcctcgtgttggcttgtccctttacataggtcaacttcgtttccttgtcaatatactttttaagcgtattatggaatttatacttggtgaatttttggatataacactaatgactctaaaaattacacttagcaagttttagaggccaacaactattaaaagctctttcttcccaataagatttttatctttgatatagagctaaaagccattaaaacacgcttttctttggtggtggagcttaactttaatagttgttgcattgaataagattgtttaaaggttgtcaatatggttttgcatcagcagaatgtgtgttcagatagtgatgcttttattgctaatattcatcgtttctttagtgaaacaagttgtaagggagtgtatcacattgcgaggaaagttaattgtgtggctcatgctttagccaaaacaactttagagtctaaagcttatgctttttaaaaagagcatttgcttcgtgttgcaagtattgtgagtttattgtgtgtttggaaagtcatagaggaattggatttgagtgtaattagaggtaattatacagtttgatatgtttgtgtgactatatatttacattgtaattgtataattagaaataattgaggggttctaattacactctccaaattttagggtcccatgatatttgagtgtaattacagtgcaattactaaaaactttccattttaaattactaactatttataatatttttcataaaaaaaaaacttttgacaatattattttcttgtgtaatcagtaattattttaccagacaatacattaatggcatgtttactaatcaggattgggagtgataggtatggtaatcactccttttcatttgtttactttatttaatggtt

SEQ ID NO: 115688 - DNA, 2059 bp, Cannabis sativa
atatattaaaccacaaacatgaaaactacatgtaaacataaatgacttctaatttttcattgataacaaatcagattagattgaaatgggttttatttagggcataaaatcccaatagcatctgcttgtacatctcagactacgaacttaatagccaggcttttttaggtacggcgtcagggtttgtcccccatgatatgccatagtacagagcatgtgcgttcaattgtacagacatgaatggtccgacggctattgacaagggaaattcaaaaatggaaaccccaggatgacacgtgtatgatgcccaacctgtacaaccttacacccttgaatgccatatggtgataaggccacctaccaaatcaatggttggatctcgtccaaaggtgatcaattcaagctagcgcaaggatggaagttggcctataaatacccatgcattccttaagataaggggagggacattttttgaagacaaaaataatactatactactcacataaaaaacctcacaaaaaaattcctatgaaattttcttcttcttcaagaggaacaggaggaataaggggttctagtccattgtatacacgtttgtcgaccgcgatcacaaccttgattatggtcacgaccacgtctattactttgattatgatcacgaccgcaaacaaccatgcttatgattgtcataaattgtagcattcacttcagggagtggggaaaatctagttgggcaatattcatgatttttcatcagaagttgataattctgtttagcaactagaagacataaaatcaattctgaatattttttaaaattttgttctctatattgctgctataagagcacatttgagacatgaaaagtagtatatattttttctaacatttcatagtcagtaactttttctccacagaacaataatttagaagtgatattaaacattacagaattataatcacgtacaaatttaaaatcttacaacctcaaatgcgaccaatcattcttagcctttgacaatatgatagttttctgatggttatatctttcttttaaatttttctaaagtataagagaatcttttactgtcaaatattcatattttaacccctcatggaaatgatggcgaaggaaaatcatagccttggtcttattttattttatttcagtattttgatctttgatgtgactcatagcatctaaatagatttcagcatcaagaatccatgataaataatttcttccaaaaatatcaagtgccacaaagttcagttttacaagatttgccatgaaaaaaataatattaatataaagtataaagtattagacatatacataagctttggaaagaaaataaaagtacaacaaaatataacacatagaaattaaaatactaaattatagaataagaaaaaaaaattaaacaatgtataatatgataaacaaatcaacacatataatatataaatattcattcataacaaaataaataaataaaaaaaattgctaccttgaatgtgtttcaattagatgagtatatatctacatatatatttagcgtattatgactttaaaacaattcgagatcagatataacaaatactattatacttcaagtagaggctcgtgctgataacgtattataagatattataatttagagaaagaaaatagagaagagataagaattttcttagtaccttatcccaataggtgatctctaagttatacacatatgagagtcaaaaattagaaaattaagaaagaaaaaaagtattaattacagttaataatattaaagaaaaattgaaatttcatatatatattaatatttataacaaaaataagtattttttgtaagatttttttttttttacaaatcacaaacctaacccatctacatcggttaagtagatactcatccaatctttatttatttaggcggcgtttggtaacggttttttaattagttttctgtttttaaaagtagaaaagtaaaaatatttttcaaaaatatgttctttaaaactgtttttacttttcaattttataattaga

SEQ ID NO: 115689 - DNA, 1469 bp, Cannabis sativa
attagaacaaatcaaagatcaactattagaaaatttaaggatgatcatctttatttcatattgacatataacatagggaaaaacacaaacataaccattgtactaggcaactaacatgcatactagtacaatttacatataggtccatcccctaagattactagatgtatttggattttggaatccaaacaagattctgttcagggaagtaatggcaaactggtaaagtaccaggttcaattcctaggacactaaatgacacatggttacgactccactgagaagtatccatatgacaaacagcaatagcttcaaccttgtctccattttcaccacccaataagatcttatacaccctgttttcactaacttggtaatgacaatagtacactaaataaggataaggcatggtgtgacaagccaccatcatcttattaggacccaatatctgtttaggcacatccaaaatggtgtagttttgaagagacactctcaaattggtcaagtgagtagttgtgacaacactaatctcatcctctaatccgaacgcgccacgtgcaaaatcgagcatggattctagagaagtagcacacgttttggtttctcctatgatggatctagactcacactgctttagggtgtcttccatggcactaccttggggagattgtggggtgaaagagaaacggttgagaaggtaaggaaggtgttttagtgaaaagggtatggatgatgcttcttgtaaaggcaacaagcgtggtggtgtagtagaaggatctttcttgggaaagtaaatgggcattgttttgcctacttttaggtcatttgtggtgaagaaaatcattaaatttggatccattttttccatgtgagacatcatgtggtcatgagcttgaacgtgttgtgtttttgctttttcttcaatcttattgccaatattgctttcgcttggaagttgtatgtattttctactcatcatggagattgattcatgatgatcatgatgattcccataaccaagctgcaaaaacattacatcaatatatacatatataattaatgaaatgaaaaaatggattttaatttgtagaatattacctggaaaaatagtaagtgaattattaagaaattccttgaagcaataactactccaaaagtacccatgtttttcttctctcttgttgaaacttctcctaaaactttagtctatcttaatttctcaaataaacaaacaaatatagcaagaagaagaagaagtgaaatgatgagtacaaaaaccttatatttttcaaataaatattatatatcaacattgtaggaccatgtcatgtcactataattaattttatactaaaaggtgtgcataaatcgatccaattcaatgagaaccgaccgatccaattacaaccgaccgacatacattggatatctgattgtgatcggatcggattggatgttattttcaaata

SEQ ID NO: 115690 - DNA, 1707 bp, Cannabis sativa
tatcattatcttcttgttttttggtgttgaggagagaaaaagctaataatgagaggccagatgttggaattttgcctcctccaaaagttagagaactcccaaaatagaggaagaccaaaatcttttaagctggctaattaaagggtatttggtatgtggatttggctttacagacagcatgtttgctattaattatattttatttatactttaatatatattttaatttgtgctgatatagaacttgaaacatgtcctccatttctcgatgaatcttttgtgtaaaaacaaagtatatgtctgaccaaatatttggtctttgtttagttcaatgataaaatccctccaatgggaccattctaatttataacatttaataagccatatgaggggaccaattctaatgaacaataataacctttcccagtattcgtctttaattccatattttttttgtcaatctaattttttggtatcaatatattagaatgaaagttcaaactctttaggtaagacttctagtcattgtggtagactggtagtagaatataatgatgataaagtagtaacatgaataatgagatatatattaaaagcatgattacacatatatattcttaatctaaatggaatgcacacgacgtataaatctatttaaatatgcttgaatgaaccttctaataattaaaacataaaatgtgtatataatatttagatgtttctttcttcttatattataactattatacaatatatgagattgaaaatgtattgcttctcctttcagagaaaaaaaaaagattaaagaaatattaattgcttctccataaaatgatgttacttttaattgtttaattaagaaaatatatatatatattgtgaacaatttaataatttcttctacgtgacaaacatatataaaatcacatatttaatacgctcttctaagttcttctaacattcaactcgaattttttttttatttcaatcatgttttttttaagtaatgaatgtttaataacccaatgtgaatgttttattgatacacttgtttaatcaaatattgtatggagagggaaaatataaattaaacttaaaatttaaattggtaggccactttgtcgcaactttcatctgattttgtatttgatttttaaaaaaactaaaagaaaagaaaaaaccagctcagctgtgccactttcattgcaaactattacaaattccatgtacttttttccccttgtgaattgagaatggtacattaattcaaaaagtgagacattttgagtggctgcgatttgcaaacgagttgcccataccctatgttttagacgtagattgagatttaaaaatcatttatgtacatatatttaattgtatatgtttccatatttgtagctctttatttattatttatatggacgtaattgaaaaataaatctaaattattcaaacctttggatcttagtctaatagtcttataatttgtaaatttattagtggattttttttacatatatactttataaaaatatatatggaaaaataaaataattttacaaaaaaagaaaagaaaaaaagagaaaattccaaaacaatgtcatatattaacttaacaagacttctaagaataattatcgtcgggaaagttactaagaattcgaaaaagtcgtcagaggaaaagctgtaagaaaaattattagagtt

SEQ ID NO: 115691 - DNA, 3164 bp, Cannabis sativa
  modified_base (43)..(84): a, c, t, g, unknown or other
aactttatatgtgtttattttaattgttttagaattcatattnnnnnnnnnnnnnnnnnnnnnnnnnnnnnnnnnnnnnnnnnngtaaaataatttccaacagccgcatgcaggggtcgtacatcggaaccgtgttattaaagtcatcagtgatcatccttctctgacgccggcatatggattcgtcgtgacccacaatcccacatttgtaacacacatatgggagatgttcatacttgaaataacatcaaagactaaccccttcttccattggaagaaataacccaacaaaaagaggttttagaagagaaatactgacccttagccggatatattcgtttgaaggaaatccgttacgccacatgcgatcgattgagatgaccaaaccaatcttgttagctatagctgtcgcattcttctgagtccagaaccgaggaggaactacatagacccttacccagatcggagaggagtccatgtccaccaaaccccacctaccatcctctggcattggtttgaccaccaagaagccatcacacaccgcccatgggccatttttgacaatgagttcagcctccgcttttttagttaaacggaggataaaggttttgttcccaacttcctgaagcttccacccaggagccaacttccattttttacccagaaccgagcgaagcaaaccgttgaaaataggacgcttcgatatgatctttgccaccaccgacttcccagcagcttcacttcccaaatcaaggttagcctccagcgatattgagagctcctcaaccccagtcaccatcatattctcagaggtctcattcccatcagcaggcatcgccatgaattcttccatctctcaatactcacaaaagaaaacacagagggacacaacaaccaggtcacaaaccaacgaaagacactcactaaagaaaagcacagaaaactacgcgaagcaaaaactgaaggagagggaaaaaccctaggccaaacagattaggcaaaaacccacaacaggggctgaacgtacggagaatattcagtacggatcaaagggagtactattgaattgttaattgtcacttccaaatcacttttattttgacctaataataataataaataatagaattgaaataaaaataaatttaaattcttataaaaaaaaatgaaaagacatatctaaaaacgaataaatataagttaatagagaatgtggaaatgaaaatgaaaaaaaaaaaaaaactaaataaatgaagaaacaaaaagaaaaacaaattacaaagaatggaagaaaattgtatatagaatgccacctgaataatagaaactaatatagtcttattgtctaccaccaatattttttctctaatgaatgtattaggtacggttcttaggtggtccactcgattagagttcattgactatcacttttttatcacctataaatttatgagaaatattctatcacctataaatttatgataaaaattttcatgaaattatatactaatcaaccattatataaaatacattatattttaagataaatcaacaaaaaattacaagaacataatagttaaatgtttcatcgtatacatgtgttgatactcgaaattacatcaattagtaagtttttactttaaaataatcaaaaatataaataagtatacatatacaaaatatggcatacaatattttcttcatcaaattaaaagactttgtaacaagctcccagttgggacttgcttaacctcttattatatttgatgaattagattaagttggatgtgcttcaccttgttgatgagcaccatttgaaatacatccttgctcttttcgtttgtgcccacaaccaagttcattggttagatcaaatatatacatttatatttatagctataaagtgagagagaaagctcttttcgtttgtgcccacacaaccaagtccattagttagatcaaatatatgcatttatatttatagctataaagtgagagagaaagtgtaggtatttggaagaagatgaaaagtagaatgaagaaaataataaaggagacattaatttttttttttcagttgttatatattataaaaattaaatattataaaataagagttataaaaatgaaaagttagaattagaattaaatagaataacattaaaatttttagttattattttttttgtaaaatattatttaaaataaatgttatgaaaatgaatagtcaatattaaataataacttacaaaaatattaaatgaatagttactattaagtaataacttacaataggcattcaggaggtattgagttggttgaaggagaatcgatggcctcaagtttacatcgaaaccgtgtgtggtgcaagctattcatagttccatagatatgatttccttgtttggtagcgtcattcaagattgtaaaactatgcttgctgctcttaataatgttattgtgtctttcgttaagcaatcagctaatgtagtggcttataagtttgctagaactgctagattatatcctgattgtatttgcagtttggagactgttccaaccgagttgctgccttgtttggtagcggatgtaagggtttaatttcaataataagatgaaatttccattcaaaaacaaaaaaaagtaataacttacaaaaatattatttattgaccaaaaaattaacaaaaaagtaaaataatgagagtgcaaacaaattaaaaagaagttcatagaatatgccatattatcatccctaacaaaagaattgttggggtatgtgacatgacattctatcattttagtattgtcatttttctattttatgatttttttaaaatttatctatttttatctatatttttatttatgagtatctatttattcttataactcatattccattattattatgtacatattcattctcataactcacatcatttataacacattatttatttattattattattattattcaacaaaatatatatattaatattcaatcttttttaattgagaaaattagccacttttttttttataactctcatcagttgggtgaagggaaggtgggttgaggggggtgtgcctgctggtgtggttatggagtcggactcgctgctgctggtgcgagctgtgcaacagaagaagcgtttgtt

SEQ ID NO: 115692 - DNA, 889 bp, Cannabis sativa
  modified_base (54)..(54): a, c, t, g, unknown or other
  modified_base (236)..(239): a, c, t, g, unknown or other
attgtctttgtaattttgatactttattgattgatttcattctctgggcgtggncccgtggactaggagtgttcgggagaacgcttatatgacgtacaaatctcttgtatcaagttattttattttctacaaatatttatattctgcctgttctgttttgtcattgcaaaactggtttctgcagtagcaaaattacattctggttctgtaagcgtatacagttttatattttcgtnnnnattattgacatttgcaaaaactcagtttttcataatttttgtgcctaagtatgagcctttagaaattctcccactcttctttaatgttgaggaaaatcgagtatatttatgcgagttgctgtcatcctatgtcgtgtgtgattattctgagatgaatcgcattttgtacatatcccttagtcttataacttactcctgagtatgtaagtcaatcagttgcaagctcttaaagaacttgttacctaccctttccagctaactgttgttctgttagatactctgcgtatcacgagatagactttctgtgcattgattttcacctcgatggtctttacaaaatagtagtttttatttacggctcaccttcatcttttaaaaaagagaagcttaattatatttatcgactgtatttctcgaggcgagtaacatcgtgcgtatttatttctatacaatccaagctggtattttctcgtttctctcacacgtgtcgtaaccatattacttgcccaaaatgtgagtataactgttacgaaaattatgaacgatacacaagtgcaggaaatcaagtagtaaactcacgcaggtgaggtcgatccacagggaattgaactgaataccactaaattggacttatgattctatttggtaga

SEQ ID NO: 115693 - DNA, 1662 bp, Cannabis sativa
  modified_base (1588)..(1597): a, c, t, g, unknown or other
taattggtcacttaattttgtatcacaccttataatagcatatacattatacatatgtgcccacataggatttttaatccaacacatacaacgtcaaaaaacaaggaaacaatttcattttatactaaacattatcaaaggggttttctttgcaacaaactttaaaacgatttactttttatctttacttacaaaattaacaatatgctcagcatcattgtctttggattcacacaccttttcctatcaattaaaaataataattcaattaacatccaataaagtcaataattatcaaacatagtagcaatattcatattaagaaaaaaaaaatatcttaattttttttttattttttttttataactgttacctccaagggagcaacaaaaaacaaaacaaaccacaaaacaaacaagaaactagaaatagagaacaacataatcaaaattaagagtctaacaaacttaagtaagctaagctaaaaagtaaggaaactgccgcatcaactttctgtctcacgaagaagcagggagctgtcaaaattggccaattcaatcatcccaaacctgtgagatcgaatcgcccagcgagccacattgtgggctgcacagttgagctttcgagggatccaactagcctcccaaagctcaagtcgactgacgatgccgtgaaatatctgcaccaggggctggatgttgtgcttaaggtcctctatctttgtatgatctgttgtaattgcctccaccgcacctactgagtcgcactggaagatgacatttttgagatttagagaaatagccatttccgcgccccagcaaaaggatacaatttctccggccagcggatcattgtaatggaaacgtttggtggatcattgtaattgaagtcggtatcggatggtctatttacctccttgtggaaccagttgatccactcatcccatctcgtagctataactataaaggttcggatttgccaactacacccaaaccatacagctctggcgaaatcacattcccagaagatatgaaatgtgcattccacttacaaagaacagaatgggcacgttggatcatttaattggagaaaattcatgagtttccctcttgtcagtaggcagtcagctaggatcctccaccaaagcattttgaggcgattatgcattttagctccccaaatgcgtctccacttcacattatcattcacatcatctttagacttataattgttctgtatgtcgatctaatggtgaacttcccattatgttctggaatccaaagctaggaatcattcgtcggatgattaggaagtgcaatgttcagaatgcgttttgcatcctctggatggaaccatcttctcacccgagcctcattccacataccattatcaatgaacttacttaccaagcttattccttccgtggcatcaagtcttggttgtggttgtaatatgggtcctgaaacccacggatggaaccaaatagaagtggactcaccatttcctattttgcggcataggcctctatgcatatactgtctcgtgaggagcatagccttccacattcgaattttatttgaaaaatagnnnnnnnnnnaaaattatttatttaattttggatcaacttaaatcagtgactttttcatttgatggttaattaaa

SEQ ID NO: 115694 - DNA, 2147 bp, Cannabis sativa
tataaacagtatagtaagagaaacaacattttagtaacgatactttaaggttatgttacattaaattatataagattcaatatttaatgaccaatagtgatattgaaatttaagaaaatactaaataccactagtaatttttaacatttctcataagaaaaatactattaatattataattagtataataaaatattaaatcttatataaatctatgtaattaattttaaagaatatagcaaacaaacggtaaagtaacacaaagtaacacgtctaaaatatactagacattagtatatagtaaatgacaattgttgatttagatttgcaggggacatgatactaccacgtcatatagtggtggcaggaccagccttaaaaataggcaagttagacccgtactcaaggcccaaaataaaaaataaaaagtttcattagcttttcttttaagtaaaatgaaacgtacatgtattataaacaataaatatttataacttagttggttgaggtgtatgatatattttacgattacaataatctcatgacactcatttttaaccctcttggatgaaaaaaatcatgtagagaaaacttaagagtaaaaacacaagtcataattaactttacaaacaagaccgaaaaaattcaagcgccatcatcatttcttctatgaaataccatttgattgtgtcaaaagcttttgttaaatccattttaaccatgtacgagagatgtgcattttttcttgcaaatcttggaaaattataacattttgaggaataaaccttctatagacaaaactcccttaattttgtgctataagatgcgtcaggataatgcaaagtctattacatatcattttagtagctattttataaataacgttacaataagcgctaaaaatcacttatttgttacaggcaattaatttttgacaccaataattattgtagtagcattcacttctcggagtattttcctagtgtagaaaatatttttgtagagtaaattatgaattatatataaagtattctaattttaaaattaacacatctcaaaaatatttatggagaagctagctgttggactttgttctatgaaggactcaagaaaaaacataatgaacttgggaaggttaggaatagactgtctatatactaagtataaatacaatatttgcttagatgagatgtgtccgatttgtggattgtatagaaaaattatagagtatttatttttcaattgtcacttaagcattcatgtatgttttggctggtcttagtattgcagatacagttaattaatatattattgtggtcagtggtcgcccattatactttttttttagcatgaaccttttttgggttcaaacttcaaaggagtattgcttaggattcaagttaaagaagaatggtaactgagtatagtagtgtctaacactttttataagtgacattttatgattggttaacgacattttttaaaaattatcattgtaaattaattaagatctgataattaattacaccaatagcactatgagattgagaaaaatactagagactaataatccttttaaacgtttctttactaattaataataaagaaagtagtacgtacgtacgttcgtgggacaaggagataagggggtttgatttggatatgcaccatgatcgatcgatcgactttaaataaaagatgctttctttcccatgcatatatatatatgctacagagaagaatagttaatcttctttttctgtctgaatttaaagtaataatcacctttgcctttgccttttcttactttttcttttgtcattgttattattttttttatcttttgctttactttaattttcttattaacagtactttctattaatacctaatttttcaagttaagttattaggaacctccacgccctcatctctcagcctcgtataagggtatgcataaatttatccaattacaacgatcgctaaatattggatatattcaattagcagatttgattggatgttatttttgaatatccaattagatcgcattaaatattggatggagtgtctaaaaattcaatacatttaacatctaatcgaattaattaatatttttatttaatttagatgagtaattaaatttt

SEQ ID NO: 115695 - DNA, 5096 bp, Cannabis sativa
aaaaaaaattcgtgtgacaatatttttataaaagttaactgaaattccaatatttttgtaagtttccttaagttattataagttattataagtatttcattttcagacgaaacttaataattaatagtttctttttaagggaaaattcatattttataccgatttggtacgacaaaaaagaataaatatagtatgttagtagattgcattgataaatagttagtaaggaccactttttattaaatttaatagattacttgcttactttttttttttttttttggaacaaactacttactcatgactttttaaaaacgaataaattttattaaaactgattttttttataaatcacatcaaccataaaccatagtaagtatttatctaattatcaagacatatttgatctctatcaaaaataaatatatttgatcaaactacttactattttgacgtcaataaattattagtaaattcaatgcaaccatcaattcatttctctctacatatatttatttattatactttaaaccaaacattacaaaataataataataataatgttatgcatttcaatataagatcttgtatattgtgatttaataaataatatgaagaacaattataattaattaaaatgtatcatatctctatataatgttaaagtatcttaagatgtgaaataataatactctttgtggataaatatttatacagtgaaatctaaacaatttataattgagagtgatataataaactttgtatatattaacatctaataaatattatattatacggtgtagcaacaatacacgtactattatacaagttatataactaacacttttgaccaatgtattagtctacacacatttatgtgtgcattgatgtgtggtgcgttattttctttagttattaataatgttattaccctctactactgggcaccacattcatcgaggaaatacttaactaataatcaatgtaacatgtataaagataaattaacattatctttgtgaatataaagataattaattgcattgtgcataatattggtaagagaaatattaaaaagtatctagtattttttttacatattaatatagctattagtacaattaaatatcttttaactaattgcaatcagtgtaacatatctaataaattttaagtatcactatatccaatatcaatgttctaggtaagtatcaattatataaacactctaatgatcctaaagcaaatcatcaaattagtcatactacatatatctagctattaacagatcgatatagcatggttttattgaatttaatatataacgaggctcgaagataacaaccatgagtaaataaacaaatgtttattttagtctatatatcaacagaaacaacagttaattgagtacaataatcaacccttagttgagactttctccaaatgtttatccggtcaatagaaattaatattaaatgtgtgaaatatgatattaaattgcactaacaaggatatatcatttctctgtgatgtttggcacattgtgcagcttaacattcctaatctcttctcttgtcgtgattccaactaagaactaggaaaagccacatcatcagggacggactctttcacaataatgtggggctagccccactaacaaaaatattaccttttaaaaaattaaatgtaaatttttcaatttaataattataaaccaaaatagtagaatagctcccataaaattagataaatttaataagagtgattataatgtaattataaataatttttttataataaataagtctccacaaagtaaaaattctgagtccgtcactgcacatcatattctttttggcataaattaatctcatttctttttagttgcaaatgctagctcaagtaataagtaaaataaaatttagaacgaaaaaaaaagtgaaaaaacaagtattaataattagcctcatatataattatacgtacgtacgtacgtcctttctatcttgatccgtagaaaagccgtacttcaacatgttggcagcaacatacacagccacatgaattttctcaccatatttgtgtattgcatccgtaaggcttagccctccagcgctatgtcccaccagtactaccttcaaaatcaaaataatatatatatatatattcatcaaattcttaattaatatggaatttgttttgtttaaattttgacatactaaattatattttttaaaattttaaagtcattaaaattttatcattgttaaatcaaaataaaaatttatcattgttaaatttaaatttttttttctaataattttattaagaaaagtctatcataaattaaagttcatgatgaatataattgattacatatcaaagtgtttaagtggcataatttgattgatattaaatttgaaaaatataatttaatacataaataataataaaattagtaaaattaaaatatcctaattagccaattaataaataggtaagagataagtatttgtgtgtgtaccttttggttgggtggtaaggaggccataaaattggtgagaggctgattatagtgatcgaaagttaaaatggtgtttggatcagaagagtctatgcctgaggctttgaggtcaaggcatgtgactttgtgaccagaagtttcaagcagagtccggatcttgtaccagcaccaacctccatggcttgatccatggactagcacaaattctagtcctgaacccttcccattattattatcattattattattactttcactttctccttccctttcacccataattttcttcttcaaccctgtactactcaattctactatactagtactaccctagacagtagatacttattgatacttgtaataaataaatttatatacatgacacggccataaggtttttttaaacaactagtacctcaatatgtgcgcccaagtgacatgtgttaaacggatcggcccacacgtattggaccactaattacttaacggatcgggttacatgcccatgcagtcgtggctcaactctgcacgtttatttgcgtctaatattttaatgcgaaattcttatttttatgcatatttttttaaaaaaaaattatttacactcaataaatttttaaaaatattttattttatataaaatttacattaatattgtaataaattttaaaaaaaaatcttcctatttatattcttaaaaaatatagttatgaaatatattttaaatatcatgataaaaaaattaaaataaaaaattatatgaaattttttgagaaaattgaaaaaaaattacatggtttaaaaaaatataaaaataaaattaaataagataaaataatgtgaggaaaatttttcaaaaaatattaatgtaatttttaaaaattatttaattttattcaattttttaacaataaggtagttgtgcaaatagaactacttagcatatattttaaaaattatattttaaaaaaaaatgtataaattctatgaatgatgtaattgttagtattttaattgggtcggtcccataataaacaaactattctcccccttgcttttttagttttttcaacattctttttattctttgaaaaatagaatatgaggtatttatttacgaggaattttatcacatcaaatgattttctaactttaatgaaatttcaacgtgatcattttattttatttaaaaaaaaaaaatcaccaatcactctaagtgttgctgacacgtgtaatttcactagctatacctattttataactagaaaaatctcatttttaatctcttattgatgttctatcaagttttaactcttgacttttagtaatttgataaatagtaaacattatagtgtgatttatcaaaacaaaaataatatgagttcaaattaaataagaatttgttaaaaaaaattaaatacaaatctacacaaaaactaactttaaaaaatggttttttttttttttttgacataataaaaaggatgattaatttgaaataattaaaaattggtagtgggttcttttccagtttcttttgggaagtgagaaagtcatcataacgtgcaaagttttctttcattaatgagttgtgatattatactatttacagggtcccgtgttaaatgagatctcatttagtattttagtttatagtatccaaaatcacaaacaaaaataaaaaataaaatatgtagaaaagtggctgtccaaccctcaaattgcaggccaaatagcgaaaatgtatgcgtagtatcagacacgtatcaacatgtctttaatttgtatgaatacataaatagaaacataaccaaattttttattatttatatttttcaattgatataataataaagcaaaataggaaaattccatgtgcactccagtaactagagtggacaaatctaatccaaattaatttattttatacaattatctcatataaaaaattagatatttaattataatttgattagattgaatgttgaaagttaaattttaattagattgaatcggttattagatgttaattttaaaattcaattaaaaatctacaattcaattacatctaatatatattaaaaaaatatttatatttatttatatataataataaaaaaaggattttaacttttctttagttaaatttgtaatacttagttgttttacgtatttattttcatgatgttttattcttttattagttggtagttttgttgttttaattattttaaaattttggttgtattaaatttgtaaggataatatttttatgtagtattaaacttaaatgaaggttaacatatagtttttaggtatgtttcttcatatttctaagttaatattaaaaattaggtgtgtaattggatatccaattaaaaaactgatccaatccagttagtaattaaattaagagaaaattacattctatacccacttttactatttattattttaattttttacctttgttttattattctttaatttatatcaaattttataggtcatattcccattatgtacattaacgatactaattttaataagttatgtgagattatatttagta

SEQ ID NO: 115696 - DNA, 813 bp, Cannabis sativa
tatattatatggtagttattttgcaagacatattttaaaggataaaattgtcattatatatttaatattaaaaaataaaataaaaataaaaaaatccattaccctaaatggcattccttacaaaattggtgggagaagttatccctttcttttctcccttatttaatcaacttctcccttgaatgattaccttactattgattatcattaagatcacttgtgaaaaattagtgccatattacatattaaaccaatccaaatgtgtcaactcaactaactattaacgtgttatatttacattagttaagatctttattcaaaacggcaaccacccacaccaccttaaattaatgcccataacttaaaatctcaaccatcaccattcaccactaaccccaaatcttcttacgagtaaataacctgagaattacagtaaaaacctagcacctgcttacgaggagaaactaaaggaaatgttcttcttgttatctgctatgaatctcaatctctgatcataatcgtctctttccaaagaaacaccaacaatacaagtaagcataaattaatttctctactcaattttaattttaagatcattattattacataaatcaattgattgttagggtttgtattcattgctgttacagtcctcaatcaatccacagttttcaactcacatggctgaaaatggcaacagtcttcttccggcggagaagaagagactgaaaatgacatcatcatcatcaccatctgctgaggaggatgatgaggacagaatttctaaactacctgatgcactcattctacaca

SEQ ID NO: 115697 - DNA, 5210 bp, Cannabis sativa
tactgatactaaaaaacatgatttgaattcagctctccaacagaaacaattgtaaaccaagcttagaagattcaattgttaactttatctttctctctaagcatgtccttgtgtaagagagatacatgttagaaaacgggaaacaaacattttatactagttagaaagcttacttgcaaacgtattttttgaacctggtataccaaatactgttgaaagattcctgaaaataacaaaacactatcttaaacacttcactcccaaaactatgtgcattctcactccctccatgagattctaaaagggtgtaaaccggttcaaacaaaagcagtcataagaaagcacaatttttcaaaagcaatcaatctatgcataagaaaagaaagctaggggcacaaaacctgtaacagctaaaagaacaacagcgcagctgcaaagtaattgcgaagtaaacctctgtataggatgaaatatccatggagctgcaactgccaatgcagcataacctgcctaaaattgacacgatcaatccaactaatatacatatgttgtaatgtaagtactactatgcgattaaaatgagaaaaaggttctgcttgccaataataaaaagtaaaccacactcccgaagatgcttctcgacttgcggtgaccgaacaaaggagcttcatgcagtatatctaaaaacctaaagcaccacaacttaaccatcaaaattcacaattgaaccaaaataaacaaaatttgttttctagatagacactgaaacaaaaaccgcaacaactataatcaccaaattttagcacaggttaattataaaatatcagaattccaattacactacagagaaattgaacaagtatcatcagaatttcgactatgataaacgcgatcaagttctgtgaatcttcatctgcaatcacaatttttaatttttttttatactattagtgttggggttggaggaacttacagagcgttgtcttcacgagatgtggaagccaatggagtttgtctctccgttgccattcttgcttgtctttattttttttttcctattatttttccatggaacagcttccctgtaggctgtaactataacaaatctaaagaaatgcttcttcttcgttttagtctcaccttttttattttattttatttttttgctacgaattcttttttaattttttaatttttagtgacaggggactccacaaacacacttttttttttcttttgcaaaatgccacaatcccacttaatttttgcaagtgacgaattttgcgccatgtttagtaattagtagatttataacaacaatgttttttaaaaccatttttgttctggaaaaaacaattgaaaataaatgtcaagattttatttactaatgacttttttttatgaatttgggaatttaattatacgaaacattacacggaaccaaataatatactcatataaattattgatatattattattttagtatagtttgtcttgattatattcattgtgttataattaatgaacacatgttactagtacttactagaagatatgcatattttcaaactttagactaaaatggttatatcttcaaacttatgcaatgacaaaattggaatgatatttttcaaataaaacttaaaaaatattgtatatctctactgtcagtaccattttgggcttagacaatatatgaagcccagtataaatataaatgggccaagtgaaaatcaacttagaaactgggcgattccacccaagggtccggtgagaaagaatctgcaagtctttgaacataaccctaacgcggttatcgtctgatctgatctctctcttcgatgagattgagttttgagataggcccctgttactgtttggattgttcttacttaaatctggagctgaaaaatgttttgggtttttgcgtcatccatggtttccattagtttcatcaacatttccagtccatgaagtgtgtatttgtccggctttcaatggtcgagtcatttgctttgccaactttaaaatttggtactttgtcgtttctatgaagattatagaatcaaagccaaaacctaattcgaaatcggctcgacccattagaaaatctagttcttcgtcctcccagaaaaggattgtgattgagaatatatacgagagtagagccgagcctaatgatggcgcggcggtacagatgacccttttgtttttcacagcccgtcccttctgggttcgagcctccaagatcgccatttcacattttcatagcttagcagctcacgggggatctcgctcacgaccattcgataaggaggtaatatctaattctgaggcttggtttgtgaaggttgtttatactctctttgttcgttctccatccttggattcttgcgttggttatcttagtaagaatttaacatcttcaattgcgtttgaagtcataaaacggcttaacaatccgaaattgggtttgaagttctttgagctcagtagagacaattggagtattaatcatagttttaggacttacaattttctcatgaggtccctatgtcaaatgggttttcatgattcggctaaatttgtgtttgattgcatgaggactgatggcctctcgcctgataattcggttatagagtttttggtttcttcctatgcacaagttggtaaattagacttcggcgagaaattgcttgacgagcttcagtgtgatgagtttagagtgagtacatttgtttacaatagtttgttgaacgttttggttagaagaaatcaagttagtgaggctgtttgcttatttaaaaagcataagggatcacattttcaaccggatatttggacttttaatattattattcgaggtttgtgtgggataggagaagttcatacggccttcgggtttttggatgatatggagaagtttggttgttcacctgatattgttacatataacacaatgataagtggactgtgtaggactaatgaggttgatataggttgcaaattgttgaagaaaattcaatcaagaagcgacctttcacctaatgttataacttttacgtcagtcatatctggttattgcaaattgggtcagatggaggaggcctctgccctttttcacgagatgattacttctaacattaaaccaaatacgtacacttttaatgctctaatagatggatttggtaaggctaatgacatggcatcagctatttccttgtatgagaagatgcccttttatggttctcatccagatgtcataacctttacttctctaattgacggctattgtcgagctggacagccaaaccagggtttgaagctttggcgcgagatgaatgcaagaaatgtgttgcctaatggatatactttctctgttttgattcatgctctttgcaaagataatagaattaatgaggctcgtgaatatctgagacaattaaatcagagtgatattgtttcgaaatcttttatgtacaaccctgttgttgatggattgtgcaaggctggtaatgttgatgaggcaaacaggattgtggccgagatggaggagaagagatgcaaccctgataaagtgactttcaccattctcattcttgggaattgtatgaaaggaaggttggtagaggcaattggtgtttttaataagatggtgacaattggatgtgcccctgataagataactgtggatagtttggcatcatgtctcttcaaggccgggatgcctaatgaagctattcatattaaaagaactgctgtcgaggatccaaatttggctttgtcatgtttaagaagtagtcatccgttaacgaatgctgagatacgactggctgtataatttaatggtttccacataaatgcttgctcgttcttgctcttcaggtagaaaacgtccaaattattaccaagtgcaatgcgtccattttgtagtgcatacagacaaaaccagcaactcagtaggtacgtgattatcatgcaacttcctcgtttgtatatcttgtttgtaacttttctgtttatgtgggggtgtggggagtccttttattcttttttgtttgtatggctaatgctgatagattatgctttcttgcacactttagaaataatgtcactaaaaattatagaacagttcattgaatttcactcacttgaaactcaattcaaagtcaaatattgtggttttgggctctcaaaatattggagtgcttaaccaatttttttgttaatctctgaacctcatgaaatacttcataattgggttttctacgagcaagaaaccaagctggtaccttcgtgatcaaatataaatttcaagaaataattgtgtgtttgtgttcaaatttgcaggttacgctgacattgagcttccttaacagcaccattcttttcaataattggattgttaattcatctgtttgcttcctggattgcaggtgacagtgtgtccggcttgatgttgctatagaagtgtgacatacctggttttggacaatagattttttggcacaactaatatggagatctgtaaggctctcttattcaaatgagatctccaacattaaggattatttgaacagacccacctgaacaatgcctctagggaatcacataaaatgtcagtaatcacataatactgtgcatttagcatccttcctccaaattgtcgtttcttttccttctggtaattttattaccattacaattgactaaagtcgaagtccaccttttcaaactgcttaaaagaaagggttgtaatgtgaaagattggggaaaaaaggtaattagatgggcaacatttttgtaataaatttgtattctagtttttgggccttccggatcggagtttgcttttagagtcgttgtatgttaactgtaaattttcctcatcttcatacattttctcaaatggtgtacaggtttaaaaagaaaaaaaaatagctctaactatagaacttgaatttttggtagaaattcttttcatcttcataatcttttcttaaatgatgtacaagattgcagaaatgaataaaagaagcgtaattttagtgatcaattatttttttcttgcctctattctttttttaatatatgcaaattaaatccttaatagtattgggaaattatataatgcacccccttaaaagggatacaccgatacatctctatctgttttagtatccggaataattttttaatcaaattttt

SEQ ID NO: 115698 - DNA, 1521 bp, Cannabis sativa
atagtcacccaaatatatatatatttatatatatatatatatatatatgaaatagctttaacattataccaaagcttattttatgttcatagatattacttttatgaagagctttattgataatctgaacaagcatttcactctcaaggaccttggcccattacatcattttctcagaatagaggtttttcgagacaacacaggactctatcttacacagacaatatacattgaagacatcttgagaagaacaaacatgaccactttgaagtcctatgtcaattaatgatggtgaggcaatgcacaatcccatggcttacagaagtacagtaggagccttacagtatctttgccatacaagaccaaatattgcctatccggttaataagttaagccaatttttacaagctcctacaagcacacactggagaggtgtaaaaagggtattgagatatttgcaaggaaccaaaatgcaaggtcttcatatcagctgctgcaacaagctgaacatcagtggtttttctcatgctgattgggcatcgtgtcctgatgaccgcagatcagttgcagggtacagtgtataccttagagaaacacttgtatcgtggtcctcaaagaaataagctatcatctctagatcgagtacagagtcagagtaccgtgcacttgcacacgttgcatctgaaatttcttggatcgaatcactgctaaaggaacctagagtaccgctgctgcttccctcaataacctggtgcaaaaatttgagtgctagcgctttagcatccaatcccatcttccacacacgcaccaaacatatcgaaattgatgtccactatgttcgcgacaaagtgttgaaggaggaacttgaggtttactacattccatcccatgaccaagtggctgactgcttcactaagggtctgtcacactcacgattcagcttcctagttgacaaacttggcgtgagaacatctcccttcagtttgagggacgatgttaagaaatgagagtgtcacaccagtgtattcctacaccaggagcagcatatcaattcccaaattgtgccttgtcatcatcttgtggtcctgcatcaatttcccataataccgttagaccttttatgataatgattgggatcttattgttaggatattccctttgctgtactatttgatttgtaacagttgtacagtacctattggctaaatgtaattactcttcactattaatcaagtactctggctcccaaaatctttgagcagagttttatacttttcagcgtttccctaaaatttaagtaagagcatatccccaaacgaaaatccctaccattgctcgaaagaaaatccctaaaaagtaaccaataatctcaaccattgctggaaagaaaatccctaattggtagtgactaaatctgaaaaaataacaaaatataaatttattaataaaagaaacatcagagagagagagagagagagagagagagagagagatacctaatttctgttgggttttatgccc

SEQ ID NO: 115699 - DNA, 3503 bp, Cannabis sativa
cgcaagatcacgagccacaaagttactcttcaaggcttccaaaggaacacttttggtgggctgaagacacggcttgaactcatctaccactgtcttcgaatcagattggaagataatgttgattctagccttggctccaagaatttctgctgttttgcaaattgtagctgcttcagctaatgtgccatccgaatgccaaaggttccgaagccagatcttgatgatttcagcctggtcattgtgaagaaccgcagcaccaactgattggtctctcctaatggcaatatcatattacagactatcaaatatttcttacattccaaatgtttgcttagtcactgataatggcatccgtgtctcatttctaagtagcttgataatgggacattaatctacatcaaagagtaacaagtattagaaaattcaatcacaaattatctcaatatggattcaccaataatctccacaggaacataagccctctttaaaatgatgaaatcttttggcatctcgagcaatgatttctcttccaacagctttagagacaaactttatccatgaatgacagtccccacaaactctaaggttcttaaaaagtctgatagtagtagttttgttattagtcttccacagtgcaaaggctatggccagtttctcactatggtaatataaagacctctttttttcctcctcatccatgttttgcaacacaaatcttgtatcaggaatgtaacccaaaatctttaccttctcaatcaaacatcctaatgtatcaagtatctctttagaactcgggtgagaccaatctccagccatgaaagtgtgaacctccttatcaatctcaacccagctcattgcaggattcttcttaaacttcatttctctcattgtgcttttcatctcaataacttgactccaattaccagctgaggcataaagatttgacatgaggacgtgagtcccctcatcgtccggggagagatcaagcacttgctttagagctctctcggccatctccacctctccatggatcttacaagcactcagaagtgtcctccataaaactaaatctggatttctgacttgttttaccaacacttcagcctcttcaagtctcccacaacgcccgagcagattagccatgcaagcatagtgatctctggtcaattcaaactgttgattgttcttaatggaatcaaataactgacagccttcttcaaccaaccctgcattgttacatgctaatagaacactcaaaattgttacttcatttggttcaaggcccaactctttcatcttatgaaacaatttaattgcttcatgaccaataccattctgggcatagctgtatatcatgaaattcatggacaccacatcatattcaactaaagcatcaaagacagaccttgccatttcggtacttccacatttcccatacaaattaacaacagcagaacctgcatatttatctctatccaatccaaatttcataaccatagcatgaatttgttttcctaactcaagcattgcaagactggaacatgcctgaagaacactagataatgtaaaagagttgggaagaacagaactactaatcatctctttgaacttagacaaagctacctcttctttcccattttggataagagctactaatagggaggtccaagttacctgattaggacacaagaagttgttgaaaacttttagtgaatcatcaatcaaaccacatctagcatacatagtaagaagtgaagttttcgatgccacagctgattcaaggccagatttcaccataagaccatgaaccaacttacctatacttaaatcctcaacatttccacaagtgatcaagatacttgcaaaagtatactcattcgcattaattccttggcgaatcatttccccgaaaaccttaagagctttttcgccatcaccatgctgagtgtaaccaacaatcaaagctgttaacaaaaccacatctttgctcataacccggtctgccactatatgagcttccttcatttttccaaactttgcatacatatcaacaatggcagaaccaacaaacttgtttgaaacctccaaacccaaaacaatagacatcccatgaccttccctccctccattaacaaaacccagttcagaaaaagccttgaaaacacttgagaatgtgaaattatcaggtagaacaccctctgaaaccatccttttacacaacaaaatagcttccttacactttccctgaccaatgtaataagaaatcattgaattccatgaaattaaatacctttgaggcaattcatcgaacagtttgcgtgtatcaacaatgcaaccacacttaaggtaagcatcagtgagcttattccctacgttgagacctaaaagcccaaactttatagcatgagcgtggaccattctggctttggttaagggcttgtgctctatacattgttgaatcaaagaacacatacttgtgttgttgaatgagggttcattaatggagttttgtacaatgaaagtcaagaatctacagtggttgatgattagtagattggtattattaatggtgatggccaaattcaagagcttagccaatccaaccatcatcattttgccttttttgaagtttattgcttcatattcttctagtctttgcaaaagtaaaactcaatgccatcacaggctttatatatataaatatatatatatatatcttacagtttatatagttacttcattgattcattcaaacaaaagtcaaaattcttaatgaaagcttcattgatagaaaaaggcaacaagtttacagaatttatttgtgcacttttttttttttatttgttttttttaaattatgtattaataatactaattaaaattagaaatttttacataacacactaaaatttaaaaattatatgtaaatataaattaatatggataaatttttatttttacggtttgaactcttttttttaataaaaatatgttcttcatagattatttataatttttatgatattaattttctctttgtttatttttgttgttttgtagtttatatatagttaatttatagttattttgaggttgatttttcattgttttttcacactattttttttttctaatcgtatttttgtaattttaaaattttaaaatggtatttttaaaatattaaatttataaaactgtaaataaaacataaaaaaaataatttcttataaaaaaatctcttaaaattatatgacaattttattttttaagaaaatataatataattcactcacaaaattaatttgtatttttttaaatacagcagttatatttgtttaaaggaaaaaaaaaaaattaactcccattttgatgtgtaaactatgcttaacaattcagataaattataatgtgaaagacaataaataaattatgctcataatatttagggtaaataccattttggaccctctgtttcacaaaagttaccaattggaccctgtgtt

SEQ ID NO: 115700 - DNA, 1050 bp, Cannabis sativa
ttagggcataaaacccaataaatggagcctaaaatctaatattttttatcaggaagtcatacattatgcgtcctaaagtgatcatgtggattatagtgtaaaaaataatacactacaacgtgagaatcaatgatttcaaaaatcttgaaaaaaacatagtcatcaatggaggattcaagaaaaaaaatgaaaaagtgagatttgaagacttacccactgatgaaggtcgttgtcgatgcttgggggatggttagatcattgtaataaatcaaaaacctcgagaaatggaggagcttgaggtgtcgggtgtgatgaggaaatgaagagttgcttttttttttctttcttatagagagagttcaaagaaaagagagaggttgtagtgaagttaatgaaaatgaagaaaagttgaaccttgtgtaggttccgtagtcttttcccccaaaaaacttagtgggtggttatttctccacaagaatagtcgtgtagaagactcacaattcataaattagaaaatgtgtacccgaaacataaatctccataatgattggcagtaaagtcattttttgtcatgggcgggatttgaaaattcctatctgtccagacgtctgcatagggacgtggggcaaatattatcttaattttttctcacgtgacgtgacgtgtccacataggcaaaactgaggccacgtaaaatacatcctgttaatagatgagtaaagtcaccttgcgcaacacgtcaattaaaaagagttccaaataatcaagcaagaccaagattgatggaaatggccaaccaaaaggttttggccggaccataccttggccggccaatgaaacctatgtgctggtaaggccctaagtatagggctggtcggccagcatgtacaaaagagcttaaatgattagaatctgcatcaaacttcgtagacgaataacaccttgatttcagctacgggatgactccaactgttgaccgagattttcggcaaccaataaaataataaaagattaaagagctgtaagaaattaagagaaggatttttacgt

SEQ ID NO: 115701 - DNA, 1674 bp, Cannabis sativa
gataaaatattttctatgatttttgaataagttcaaatgatttttcatatattttctataatgttaataaatttttataagttaaaatatatttttactaactttttaaaaattatttgctagtgaatgtgcaatattttaaaattttgagtatttttactgctagaaaaaaaaaattattaattgttatgattaattaatattagatatttttatcaccaaaaataaaaataaagtatttaaaatgttgtattctttaaacatcacaaaccaaaaaaactactggatgagaggaaaaaactactttaaaagtcaatgatggccatgcttggtctttcgattttaaaatgaaatctaatagattgaaaaaagaaatatcaaaaagctaaatattaccattttaaaatttatacagaatatttttttacactgttaattactagttatcctttgtcacataaaatactcatatttttagtgtccatgttgactttgaaatttacatggtacaatcttgaagtatcaaaatgaaactagctaaaatacagggataaccctctagctagccttgagggaagcttgctttcacctctcactcactccaataatgagcctgaagaccactcttttgtttcatcaacgggcctcaaggggcaccaactcacctagtgagcctcaggggccatccacttgtagatcgcccactccattaggtgaggctatctctcatcctcgtttggtcgcccaatgaggccaagatcccatatttgattgctcccatgtggccacacacatgcataatgaccctactgatgaggttattcttgccacataaagaagacattatcgttaatcttggtccttgatgtttaatagagagcctcacaaaaagactcgcttccttcatgcttcaacaattacaaatattttaaagaaactagaaggcatggcatcaaccaaggacattccaagtaaaagacataactctatcgatgaggctattcttgcctcataaagaagacaccaccgagagagcttggtccttgttgtttaatagagagtctcacaaaggaagaaatcacttccttgatgcttcaactgtaatactctaacttttagaaatgccacgtatatgtttttataaacaagatgataataatcaactcaaaattttagattattaaaatgcgtggaattaaaataataataaatataaataaactatacacataaaatcaaaaagatgttaacccaaaaaattttcttggtgatgtggacatcaatgttttacacgtgccaagaaggatgacgtcacagagttgggtagacctgagtaatagcaattgactttggaggggaccccagccctacacctaggttgacttcgagagctctaagatggaagtttggattttaataacttgaatccaacaaactatctttcagtattctgtaccatgaaggcatggagcaacctaatccaagccccgggagctgaaattacacgaacctgcaacccataagccaatctaggcacctagggtttcaccaagggcccaagttgacattcccaagtagggtttcagtttttggtaggagtgggcatcatccaatccaatccaattgaaccgaaccgatccaatccaatccaattacaaaaagttggatatccaa

SEQ ID NO: 115702 - DNA, 1957 bp, Cannabis sativa
  modified_base (1913)..(1921): a, c, t, g, unknown or other
aatttaacaatctcaatagttcatggggcatgctttggtacatgtcaaagttcgggagaaaaaaatcctaattaaccatagcaatattacaccgaagaaggtactaggcaccaattatacctttttagcaattctatttatatatatatataaatatatatattaagttatttaaaaataattaaaggaaaaaagaagacataattgggacataggagccacgtgtgtgcaactttccaatgtaacatgtttataattaaacttgaaaaaacaaagcaaaaataagtacaagaggaaaactaatacaacaaaaaataaaaaaacacagccagatcttaaccatacctgcaagatacgtccggtgatgttggaggatgtggcaaagaaggagcgaccgagatcagaactgcctaagaagtgggacgagcttaggaccagatatgggttttagagaggggttgagaatggtttagtaatgaaaagctgaaataaaaagctaaaataaaaggctgagcttaagtgatgcttttagaaggctcttttgaacagttttttttttccaaaaaaatgaaataattacggacaatattgtcgtcattgataattttatcaacgacaacaatatcgttaataatatataaaatcatcattgttttatagtttgttttttttttaaaaaaaaaacgattttcatcacccacaacaattagatgttgttggtgatactctcactattagtgaggatttctcagcgttagtaatagtgccgttagtgatgctattaattcttgtggttagacggctaattattttgttcgtttttctaaatttaatcctgatcgtatctctaataggagagacgtcccaattaaactgcatactattattttcgttgattgctatcatgattttttttaaaaaaaaacacttccattatggaaatattaattacacaattttttaaggggaattgccccatatattatctttttaattttttttttttaaatttacggtttgagttgctccgatagtttctatgtgggttgttataatgattttgattgcgatttaagttgttctgttagtttctatgtgtgggttgctgtataggattctgtgtgaaattatgtaaaaatgtaaaaaaaactattttaaagtgtaaaaataaaaaaaatcctatttttaatttattctcttatctaatttcggccaaaataataaataaataaaatagcttagagttatacagaaatgatatcattatcccacaattaactaaaaattaaaattaaatatttgatattaacaattgaaaataaaaggaggggagaaaggacacttttggttaattagacaaataattaaggataatttaccatctacaaacaacatttttttttttctattttattattaatagtaatttagtctatagcatttacaattttaacgtgatttcataccctttttaaaactattgcactgttctatattttatagctaaacttatgtttctttctttattttctttttctttttttatttaaatttagacttgtggtttcatacaatatactttagggtttttttatttttatttttaaataatgtgtttgtatattatataaggcggttatatatgtgcattttttttatatggtattaagatatattttcatttttgagggtgttttttgaagaaaaaaaaatcattagagtatatatttgtatctgtattaattttgaacttttattgtgattttaattttgtatgcttaatggtttttttttcttcatttttttaagattttttaaatatttgtttgaatgtgtttttgatattgtatctctcagggtttctatgttatagggttgtatagtgtatactatatatatatatatctttatannnnnnnnntgcctatctaacggcaattcttggtttaacagaata

SEQ ID NO: 115703 - DNA, 1973 bp, Cannabis sativa
agaagaatttggtgaaatgtgttctaactctatctccttcaatgtaccatctttttagttgagcgatgcaagcagtattatctatagttttgcagcctggtttgaggagggtcttcgggtgtggaagaaggatgaacaagtgggggttgctatgttgtgttggtctctgtggaatagtaggaataatactgtttggaattcaaagttgtcttccatagaagaagtggtatctacagcttctcttaactttaaatcttgggatgatgctcaaagaaagttctctaactctccatttgatcttggtggtcaggagagatttattgagcattggacaaaaccaattttaccttttcttaagttaatgttgatggtgctattttttcggatgatattcgttttggattcggaatggttgcaaggaatagtgctggcacagttttgaaggcagtccaaatttgcaaacatggtggttggaggcctttaatggtggaagcaatgggtctcaaggaagctttgagttggataaaggagaagggttggcaccatgttattgtgaaaaccgattgtcttacgctcatcaatgatatcaagaacgctaaaattttagcttctccttatggttttgttttacaagattgtagaggtttgttaacctcgttagtgtctgttgattgttgttttgttaaacggtatgctaataggcttgcgcatgctttagcgcaagcttctctttataaggctgatcgtgttcttagtggggattctttactgcttgttattcttccatagttttggaagattttattgaataaagctactttattttcaaaaaaacaaacaaacaattgagcatgtttaaatgtgaagtgtcatttttcaaaacatacaccaagtgtattttggtcttttacttataaggtatctcatcatttcactcattcatagtgacatgtggcggttatctcaagttacaaatatctctaatactctctgatttacatcatttatagataaccatactcgtttaacttagaaatttcttctgaaagataaatttgatgttgctaccactttcaaaaagtttcattccatgattaaaaattaatttcaagctaatttccatattttgcacattgataatgacacaaatattttaattcaatcttaggttattatcttatctctaatggctttgtccaccaaagtttatgtgttagtattcctcaacaaaatggaattgttgaaagaaaaaattcacataccttaaaagttactaagactcgtgtttactactactgttgctaagatttttttagaaagaagctatttggacaacttatttaatcaccttctcgtgtcttacaatatcaaacgctaatgttttctcttcttaagatttatcctcaatactcacctatattccactgaaatcatttggatgtataatcgatgtttatgttttaagacctaatcataccaaatttgatcctcattcttaaaagtgtagtttctttgagtattcctccacaaaaaagggatacaaatgtttcaaccctctcactcgtcgccttattgtctcatcaggcgtcacatttaatgaagaacaacatttttatcccatacaataggcttcagggagggcatgctagtgatacttattgctgggattcttctagtataaattttagcacctagtatttattgtaccaaatgttactccaaacttctttaacttcttatgacaaagttagtagatacgagtatattttatgagtacagcacatcttaaaagaatttccttaattttgcattttgataggactactaaagtttgaaaaagagaacattgagaaaagattaaaataagaagaagaacgatatacaaatccaccatcaacatcatcattgtcatgacatcatgtttcaactcaactcctacaagcacatccatgttatgatatatatatatatat

SEQ ID NO: 115704 - DNA, 1770 bp, Cannabis sativa
ccacttctaacattccatacggaagaagaaagacaaattactcaaaatttaaaaaagaaacaaaaaactgatgttaaatatgaaaagatatacaaaggattttactagaattcttatttcaatgagcaagtatatacaattctgaatggaataagaaagcattacactcttaaccagatacatcatttaagctcaaatgcttagaagacatgtggtttgctcccacaagaggtttacatagaaactatttatagttttctgggctaggtggggagctagttaacaataaaaataagtaaataattaaaaatactggaatcccaatattaactatctaacagggtcttcccacttcataaaaagacattcaaaattttccactaacattcacaaaagatcagctcaaaacaaaatatgggcaagcggacggacccaattgatgtggcggtagcccccattaaaaaataatataatttttgtttaaaatagacatagatattttttttataatcctcacaaatcaacaaaaatcctggtccgtaatggacaagttcggcaagttgttattatcaataccttaatttcgcttcctgatttcaacttcccggccagtatgtcctcccttaagctttccacaatttttatcgtaattcttggtccaaaatcagataccagcagagcctttatcccatcataacaagaataagttaaatataagtgcataaattaaatatatgattacattccataagaagaaggaaaattgcaaaaagaaaacctcttcgagttcgtccagcactttgtcggtgtcggcaaggttccaatataggaggagctcgtctacgacggcgaggttgtcccgagtcttggaaaagccggagaaaatcttctcaacatcattcttagctttctcctttatcagtcgacccaaccgggtgaagaacccggtctggctagcactgcatttgaaccgggatttatcgggtcgggtcagcaggagccgagcagactgtgaatttgagcagagtgagatatgagagagagaagatggacatgaaacagccattttcttcgcctctgactgataacttcacagcttagagtaaccagataacgtcgagaatttgcatcgagaaacgatgtcgtttagcaataaaataaggaaaaggaatatcaaattgttttagattttattttaaaattaacaaacaatttaataaacaagtaatattttttctttcaaaaaaaaaagtaatattttaagatttttttttgttttgtttgctaaatgtaatatattaagcattaattttgtcatatgctaactattaactaacaactttacataattcttttaagttcttttgattttcaaaaatatataaaataataataatatacatataagctcattttatttggttttttttttttaggtttttttatttttacacttcaaaatcgtttttttttttatatatttttacgaaattctatataaaaactcttattgcaactagcgcgtcaaactaaattgcaacaaaaaatcgtatagaaactcctattgcaattgcaaccattttaaaaactcaaaccgtaaatatgaaaaaaaattaaaaaaaacagtatatggggtaattcttttttttttcataataaactaataatatattattgggtaaataccattttggaccttctgttttacaaaagttactaattggactctgtgttttgttaaatgacaaaatggaccctgcattttctaaa

SEQ ID NO: 115705 - DNA, 5457 bp, Cannabis sativa
  modified_base (51)..(60): a, c, t, g, unknown or other
  modified_base (109)..(117): a, c, t, g, unknown or other
atattccgttgcaactactgtaaggcttcttatactttatatgtgtttatnnnnnnnnnntttagaagttcatatttagtatgttaaataacatacttgttagtaaatnnnnnnnnntggtaaaatatttccaacacttctgattgacaatatctcttttcaaagctagccatgagccatgccccattaaatataggtagggattataatagttgtacatgtttataggtatagggtataaaagactttgacagatatattttttgggcaccaagatttatttactgaaatttcaatttacaaacgttttaaaaaaaattcagttccccccattaattcatgtccacaagactatatgtatagagaccccacttttcttctttcgaaattaataccatacactatctccaccatttttaggacaactaaaaaatgtttttgaagcctgacaaattttagtaggctaaaaaataggacatggtggctactggtggagaagactcatccgtgttcgagagggatgtcccatcatggaaaaattcacttcaaggacacccccattgctactgtggtgatcaagattatgttgggacttctattagtagagcaaatcttggtcatcgcttctttggatgtccacactatgtaagagttttaacttcttagattcaaacgtacctgttatactaggcttcttcaataagctaatttagttattttcacttcaggagaacgatgaaagtcgaggatgtgattacttttgttgaatcgataaatctcatgctaaaaaatctacagaggctactgccaaattgcataaccaaatcaagattttggagcaagagaagaagcacaatgaaaacgttattaaaaaattatttattatatttatttgcctttacatcattttccaacttttatttcgttaaagattatgaaagtgtaaatttatttatgttttatattttttatgttgtcgaagttaggatttaacttcactcggtaaaaatactttttaagtaatcctttgttatggattgtaactattaatatgttgttgtatagtacttgtctatcatattatgtaacaccctactaaattaggcgtggtatcatatttttcttaattgttgtgcacacctttggtaatcaaagggtttaatataaatgtggataattaaaattttcttaaaaaactgaacttttaaaataaacataatttatataattctcagatgccgttgaaaattaacataagtcaacaaaatacttgcgttacaaaagttgtcattacatgtctaataaaaacgtaagtctaatctatcttgaagaccctgaatgctcaaggtctaaccatcttgatatgtacaatcttcacccttagctttaaactcatcccgattcgattctagctcatacctacacatacacgtaataactatgagtcaacagactcagtaagaaaagtataatcataaacataaacatatatccagaccgtaactaggcgctcatacacctactcacgatttgataactgtgtcaggaacctcctcgacaagtatgactaattgcaaatccgacctatactcagtactctagtcacactgatgtggtagcaagaaattcatactatttggaagcctactatatatgtgttggcatctcgatataaatctatatacacctcacttataccctgatatgctattttgatggctactgacatgcacactaaacatgtatacatatatgcaaataattctactaatctcaccttaattttgaatgcaagcgtgccggtaactctaagtggaaactgctgctcgatgaataaaggccttaagtcacaatttacgtaaaactcgtaagtgatccgctaaagaactttcgtggattctaaacttgaaactaatgttttcctatcgataaataacatgactaaaccttacgcattgagaaaattaataaaaaatgggatttcgcaaaaagtaccccagaaaaatagtaggccgtttttgagcaaacgacaggccgttttttctgggttttttgcctgaaaaaatagcatgccgttttactagaaatggcctaccgttttctcagcaggattcccaagattccaaaactcgatcaaaacaatcccaatcttttccaaactttccaaaacttcaaataaggaagaaacaaacttgtttcaacagctaaaaacatccttaaccccttagaagcaaaattacaattgttgggccatgtttgagttcttgaactcaaacttgctcaacacaagacacaaccaactaatcaagcttaaacaaactcctaacaatcataaaactacccagaaaacatcccctaaaaaacctaacatcaaaccaaagctacaacccaaaatcacataatcaaccctaattttcacagttagaaattcaaaggaaactaaagatagaagcttaccttgaccttaaatcacaaaacccttgaattcctatgctgaaatccctattgcttggtctagaataggtgaggaaaaagcttgttttccttggttccatggtttggccgaacaacaggagagagagggtgaagaggtggtgtttgatttctaaattatccttaaccaatattattattattattatttcagcttattaacttagggataactctaaaaaatcccactatcataatcaacgtaacacttaggtaattaaagagactaaatttccccttgcttcactatgaaataaccttacctcctaggggtaaagtggtccaactaatagctctaaataaatattgacattctaaatgtctaattatttagcctcgctaattctaaaatactatacagtatctaaatgactctattggccaaaatgtcgcatcccactgttaccgaatacaaaacataaaaattataaaattttatgtataacatatataatgcatctagaattcaaatatatctccatatttgagaaaatattttcctaaagcctatttcaggaaataagccctaacttctactaagagacatataattataaaataataatcaaatccttaattatctactaattctcataacttaaatatgcggtcattacaattattcccgttaaaaggatttcttccttgaaatcaaatctgaataactctggacataaggctctcaagttggattctaattcttaggtggtttcctctacctcaacgtttcttcaaacaccttgaccaatattataattctattttaaggaactttatcttcttatcgagaattctaattatttcatcatatacgataagtctggttgaagttctaagattcggtaacctttggaatatgagtcaaaattcttgatacaactacaaggaaacatcatgtgtgttgtccatgctgatcataacattaaacgagagattatgaatctaattttcttgagaaactctaaaatttttaggaacctagggcacatcttagccttattcccaaagtatttatctcttttattgataacatacaggaactggcatgttttccactagttgggaatacatctacgtttgaacttcatattaacatatcgtttgctgtttactttgaaaagcagcatcttggccataattttccttaaagtcttacagatccattgaactaactacggatctatatattttttgttctaggttttaaaaataatacttcatactgttcaatattttatagggaaccattcttatcgtactttgataactgtttgttgtatgaaaactaactcgaaggcatagacttgtttaatgaattcttgaaattcatgaggtaaacatgcaacgtatctttcattatcttaataatcccttcggactgacaatgtgcctaagggtacaaagctgcactaaactttagtttttttttgtatctatggccctttttgtagattctgtcaaaacttaaaagtaaatttttgcttcctatccaaaataatagacttagaatcacataaggtcatactatttctcttaaatgatccccatactaactcttacactgaaaagagtattttaattcatattcaatcacacgaaggcaaatatgcttacgattttaagtactctaattaccataacttttggtaacctcttcctgtttcacttgagaaaatctaataaatcacaataacctttctagtctttgatggttaaacctaattcactgacaaattaggcttccaaatacatcaactaccacatcattttgtattctacctcatcagtaagtagaaatttcaagtcttggtacatcctaatagtaccaacattgtaacaatttaaggagtggtgtaagttttcttaaagtatctcttatgagctctacactgtctgagacacaaactcgagtttattaacgaaacatctcgtgatctgacattaagaattttctgatctagctagcttaaaacttattttcgagttttttttaactaagttgtatccataaattaagcattttttttatctaattaatctggttgaagtgttaacttattgagtttacccaggcaaactccaaacgtaacctgaccatgacaatcattaactgaggaggaaccagagttgtactgaaaacacccatgggacatttcctagttaaggttccttccattaaattggcctccctaggataataaagaatttcatagtcttaatctttgactaactccaaccattgtttttgtctcatatccctttctctctagttattaaaatatttcacgattccctccatagagatcgttgatcaaaacctaaaagaaaaatctctattacaaattttagataataaattggttaacgtaacttatgctccttcaactaataagaagaataagtaataaccctaacatcttgcatcaaagtgcactccagatcttatctgggtatctcacaatgaatcacgagttttcttgatatgattcctagaccaacactgagatcgtaatcgatctttgcttcagctctcgaatctaatttcacatttgtttggccataccacagtcatttcttcttgattaaccttaatgactccctttggcctacgccagtctccatcaaaaaactcctatgcggccatgcaagtcatggttttctgttgcctatggattcgatcgatgtgttacgagaattatgaatcgtacgcaagtgcatgtaatcaagtagtaaactcacacaggtgaggtcgaaccacaggaaattggattgagtaccactagactaaatttatgattctatttggcaaaccaatagtttttatgattaaaaacaaaataataattcaagaaactaaagtagacagataaagattaatcaagatgagaaaatagggaagagaatcctgttgatttgtttacccaattgttaatgcctaactgctatcttttttcttgatgtgaa

SEQ ID NO: 115706 - DNA, 1249 bp, Cannabis sativa
acagtatttttgaaaaaatttccgtgtgacagtatttttgtaaaagttaacctaaattccagtatttttgtaagttttcctttttaaaatttacatacgatccgatccaattatgattcgatatccgattctattagatcagttcagattggatcgatcggttgtaattgaatttgatgactttttgtacacccctagttgatcgtgatttttaatgggacacgtactaatttttgagagatcttgacacacaaatgttttgagcttcgggcatccttttcgaaaactcgaatcaaaatacttcaggatttagaaactctcagagttctaggatctattcttgaaggtcacgagatcgaaaaggaacaatactattgcccttcgggtaacatcgctcttaggaaaattctctctcgaagattccatttgctaaatggtgagaaaccctagttggagaggaggtggtgcatttttatgatattttgctaaacaattagaaaagtggggcattttttaaaatcccaaactaaaagggtagatatgcaaaataaaagatgaagttggcccaccttactagctaagacatgtgaagaatgatataatctctccaactttattctactttctttttatttaaagtaaaataaatgaataaataaataaaaacttttcatatttcttcatcttattttattttattttaatctacagttttcaacagttaattagttattgcagaaaattgatgtcgttttcaaatattagccctttaatgccattgccaacagtcaaccaacttctgattgattccattatttagctacataaataaataaataataacaaaaatgaaaatatattatataatatatagcaagtgaaccgtagttgttagtaagtttgtaatatacttctattatttatatattaatagcgtaagaataatttaattaaataataaaaaaaaaaagagacactttacttaccaattgctacactgtaaagcaatggtatataattaagatccttaacaatatttaaaaatgttacatgaaattaaatactaattataaaaaatttgtgcattagatctctagagaatcattttgataaatttattttatttttcttttaaaattttctatttttttttttttataatagtatacgttcactaataaaaaattacaatttattgtgactaaatgtatttttagtcacaataattgtaactaaaattaaattagtg

SEQ ID NO: 115707 - DNA, 1878 bp, Cannabis sativa
aaaaaaaaaaaaaaactctaatattaataactctacaaattatattgatggtctcaaattacattaaataattaatgacttgttttggtcaaaggtaattttttatcaacaaaaaaatataataagaaagtaagaaaatattaggtggctatagtttatactgagtaacattttacataaaattagtcttgaaaattaaattacattgcatatgtagtaagaccactctaataggtaattaccccattagagatgctaatgataatctttaagagtgtcaaaaaatttcataccaccttaaaatataagatatattttttcatattatttttagtattttttattctaaaaatatctcaatgataaacacttttaaaaatcattaatattatttaatatatattaaatgattaatttttcttaatcacaaaattttagtcatttatttcggtaaatttcttatttattttggcatttaagaaaaaaaatttaatcaatttttaagtatgttaattatttaagactacacatgaaattatttcgaaaatttcaagtagtttattatactgaaaatataagatttatatattttattatatacacaactattttttttatacacatggtaagtgattatttaaactttatttttgatattataaacaattcaaaattttttaaaaatttacaaataattttaaataattacaaagtacccaattattaaaaaaattagactaaaaaaattatctaaatactaaaacaaataagaatctacaacataaatttccaaacttttatataccaaattaagttacatagtgcccatttctttttaattaaaaaaagtttgctttttacaattcttgataagtcggctatcttatccaattgttttattgctttttatttgttttgttttaaatgtagaattcaagtaaagattcctatactttatgagaatgtatacattaataaaaggataatatattctataaatatatatatataaataattaatttataaaaattcgtctatggttgtgttaatcgtgatgcatggaatttaacatgtgaagttttatcgggacataaaaattaaagtttttgtatttttagaaaaaagaaaaatatataattgcttctcttaatatgccgatagtgaataaaaataaataagagtaacgtaatttaatgaagctaagggttaagtaacgaatatatatctttatcgaaatattatccatgtgtgagttacgtaaagtaagaatatatataaatatatatatatatattaatataaatatatataccactattaggtttattttgatttatagtgtccaccttataagtacaactttatacatagtggatctaaaatttaaagtaagggagtataattttttttgtaagtgagatcgaggaggtaaaataaacttaaaaaaaataaaaatatttttaatgggattagaacgtttgtcctctaaactatatgctaagtaacttaataatttcactaaagttaatattaaacatataaatatcatcttttattacaaatatctgttttaactaactaaaatgcatatgtgttttttttctgatttttttttcatggtatgactacttcccctcgcttgtatgtggctccgcccgtatataaagcatcctgtgttgtgtagtatagtaagaggaatgacttttcttagtatctttcttatttgggttaaaggttcgaaatctactacaatttttcttgagagaattaaaaaaggttttgctctctgaaagttagctgttgtaggtagaactatttgtgacagtcagtagtctcgtgatccgtaacgggaaataccgggtaagctgtgcaatccc

SEQ ID NO: 115708 - DNA, 5313 bp, Cannabis sativa
atagaaggggcaacctcgcaaggattcgttctttccgccaccaaggctctaagggtcgatttgcatgagaatttaccattacgttccaagatccagaaccatctatcctctccatcaccagacgggttgccccctttcagtatagccgagatagtctcattatcaaacaaacttttaagtttttgggtattccatccaccattgtccaggagaagctctgcaacttttgtctccccattcaacgagggtcctcttgggtggggaagaaatcccttcaaatgcgcaatccacgaatcatgccatatgataatattccgaccatccacaactcgcttacaggcacccttgctgataataggtcttgatttcgccacattcttccagaaccacgagtccgaggcttttaggttgcattcaagaaaagacttacctctaagatattttgcttccagtattcgacaacataagaattggtttccagtcagaaggttccacccccatttagccaggaaagcttggttcatttctttggatttccggaagcccaagcctcctactgacttggggaggcaaagtttgtcccaggctctaaggtgaagtccgtgattgcccttttcggaaccccaccagaaatcccgagccaatccgtcaatcttagcggcaaggcgattggatagtttagttgtttgcataggatacatgggaagagataagcccactgacttgatcatagtcgccctccttgctttagagagagtcttagctttccagccgtgcaatttcgctgttaggttatccagaataaaattaaagtctgcatctttttgtctcgatctgaataaaggaagccctagataattgaccttgccttccggcgaacctatacccaacaaatccttgatcccttgtttcatgctcgcaggtgtatgcttactgaagaatattgaggtcttcattttattcactttctgccccgaccaagagcaaaacttttcaagacagtcccaataaccttttgattcctctaaggtggctttgccgacaagaatgagatcatcagcaaagaagatatgagaaatgacagggcccctcctactaagtctgataccgctaatagttttcttatctaaggcttcattcaacagccttgacaaaatttctgcagcccagataaataagtagggcgaaagagggtcaccctgacgaagaccacacgccggtttaatcttgccaacagggcctccgttaagacagatattgagggaggtggttgtgatacactgagagacccacttacgaaactcaagaggcacctcaaaacactcaagcacatgatcaataaatctccaactcatcctatcataagctttcataagatcaatcttaattgcaaaccaaccctctctgccttttttcctattaaacgagtggactatttcctgggcaatcacgttattgtcctgaatattcctccccaggacaaaggcagcttgggtggggcatatgagcttaagtaacaacggtttgatcctgttagcaatgatcttcgaaatgaccttatacaccacattgtagagagagatcggacgaaagtgattcggtctcttcggattctggatcttaggaatcaggacaatattagtagcattgactcctttgtgcatacaccctgaatggaagaaatccaggattgcatcgcagaagtcgttccctacagaatcccaatagtgtttaaaaaagaggactgacattccatcaggtcccggagctttgttactgctcatagcaaacaaggtagccctaatttcctcaagagagggtctccggataagctctgcctgatcgtccattgagactttatcctcgattaagtcatgaaaatttagatcatggccaatctccacaccagagaatatgccattaaagaactccataaattcattgccaatcagctctcttttcgcgatccacaaattatctttattaaggatgctctcaatggcattccttctacctctgattgaagcggaaaggaagaaaaatttagaatacttatcccctttcttcagccaagaaaccctggccctctgcttccaatacaaatctttccttactctaacctcgttaagggagctacgtaatgctctttcagtcgcccaatctctagatcccacaggcagtttttgaataaaatcaagtctcttttccagatcacagatcagagtatcaaattttccaaattgggatctgttcccgtgcataagcgcaacccgagtagccccaatcttcttaaaaattctggccggggcccaagggtaacttacagaattccaagcagagtccaccactagtctgctccgatcatccttagtccaggcttcttcaaatttaaaacttcttcgaacattttcctccatcccttccgaaaacaggcaaagagggtgatgattcaagttggaggtctgggacgagcagagaacagcttttgggaaaagtctaatccaagcaccattaacaagtcctttgtcgagggccgatttaacatgatttgtcccagaacgatgattatcccaagtcaacttgtctccttggattggcaaattaatcagaccccgagcattcaccaaacgggagataaccggaatgaactggtctctacctttagatccgacacgttccgagtcacagagcacgaaattagtgtcacccaatataagccacggccctccaaatctatccccagtcttcataaagttctcccaaaaagttttcttagcatggaagtaaagggggccgtagacacaggacaaaagccaaggatgcgagggggggtccgagaaaacaatacccgatatatggttttgggaacgcgcaatacattcaaactcaaacccaattttccaagccaaaataatacttcctgcattaccaaccgcaggaacagtaatatgaaaataaaaatggagcgagtgaagggtacgtaccaaggatgaggcatcaactttgagttcgatcagaaagatgaaatccggggatctcgaccgaatcaaggacttcaactcacgaactgtagaggtctgccctaaccctctacagttccaagcaatgcctcgcatggctcctgtggaggagtagagacctcctctacaggggtatgagagtgagcagacccaaaggaaccagtatcctccaccacgaaagtgccaaccataggccttgatgagatcacctttcttcccttagtattccacacattcgctccactgaaatcgctaatggataaagagatatcctccgatggttgttcctccgcatccttggaagcattagcattgacatccgtgtcccaagggaagtctcggacaacaccgggatgacagcggggaaccttccatggccgtgaacaaagggaagtggatgccccgtccaactttctcttcttaaaaggattagttctagcattggtctccaaggaagacaaaaccccaaagtcaccgccaatggctttaatctcagataagtccaaattgctaaacttctttagctcttgtacaagagaaccttgagcttgaaaaaaattagccaaggctaagatttcatcatgctgaacattaacctcttgcccacaagaggagctaacagaagaagtggctttagctgtcttattaatctcaaacatattcatgctattgcaccccattgaatttttactttccacagccggcccaataagaacacacgagcccatcctcttaccatcatccatattcatacttacttccttgtgctcaaaagggggcgcggtcccacgaggtaagttctgggcagtttttctatttataccagctataatcggcccattaggcataacaatttcaattggctcttttttctttaaacccggcccagaaaaggaaatagccagcccaatagcacaatcaataggccctagtctaatacacatttcattcccactagtcaaccttcggtcaacgcaattcaaattaaaggagggatcgaactcagactcctttctcgtttcaaactctccagaccgaaacttattacccagaaaggaagatccaggcttgcaaaaggcaggctgtattttgggaacccacatcgcatggctcgacagtcccgcctcctgggatctacgtccagtcgttatcgaagcacgtctcgaatagcgagccaccgatttcagtctaacagttccaaacgcactagcaaccatggccgactgaaggtgaccggcacggtacagaccaggggaagggctagccgacgaaaccaaagccggagttaaaaagtgggagcgtcctcttctttgatggccaaatcttccacatttatagcagaaaatacccaacttctcataattgagtgtaaccaacaatggctaccaggtaccatttcaaaataacacccggagaatagaggttgatgaaaattcaaaacaatcaaaacttttgagaaacttactccatagggtcggattacctccatccaactcaaaagcacttaccattagatgaggagatggtggcatttaactattgccattacacccgacatacatagacaagtcaccaaactaagaaaaataccaaccataaacaaaccctcagaccaaagaaaaactacccaggataaaaggatcaaagaaccacaacacaagaaattcaaaagtggtgagaaagaccacagctcaacagccaaacaatagaaaacagaaaacacaagcacatagagagagatagaaaaggaaaatggaagaaaagactcaactaagagagaatgatagaagaccattctctctaccctctggcgtaattgcttcaaaattaattgataatggaaagagtagctcattcatcttatacattctatcacttttccacacatattagtaataagagactctttaacaccccctcaaaatgatagttattttatttgtttaccatgttggacaactcgatcataaatgactcttttttagctcattatctttgatcacaagtgactctttttgctctattttttagatcagttagatttttgttggctctttttttttttttggctcactaatcttccacaactttaattacaccaatattattctcaccaataaggacattttttggcattttaaaatattacaatccatttttttatatggtattaattataatagggatattggcggctaaaccacctgaactttacggtttgtaacacttaaccacaaaaactgaaattttggcggctaaactacctaaactcccattccgttttgctctgtac

SEQ ID NO: 115709 - DNA, 2177 bp, Cannabis sativa
  modified_base (32)..(47): a, c, t, g, unknown or other
tattttcactttttcaattttaaaaacaaaannnnnnnnnnnnnnnngttaccaaacgacaccatagtatattacttttttgtgtctctgcattctctttatgaatcaataataaattaaattaaaaatttacattaaaaatcctgaaatcacatgcagctgatggtgttatatgggattgaagtcctgaagtcacacttgccagagcaccacctgttcacaccaccacaatgacattaacagttagatatcataaaaaagaaaatattttcttggttagatcatccaaattaggctggagttttttctccctatatacctagctaacctagtgtttcttcccactatatatgaatgtgaatgtttaattgcagctttgtacagtatatatacataaaagtacggtacataaaacaaaaattagtaaaatctatttcaaagatatgtacaaattaattcaaatatatatatacataatattttagttcctcaggtaaaggccaatctatatttaagcaaaagttaacagaagtaagcattgatacacatacatataagccaaaagtacttagtcacggtctctccctattataaactcactatttatataaatatttataaacactccattgtatatacgtatctacattttgaaggtcaccctttatcatatatatatatatatacacgtaaaaaatttctcttaattatttctttcccactcaaatatcacctctctctctctctgcatggtctcatattatttcatgcagaaaatgcaaaccgtaattcccaaactacccctcgtcctcctcctcaaaccattcctactctccctcttcttctccattctctttctcactcttctctcctcccaaacgccacgtcaccccaaatccacaaccgcttcggccggctccgacctccgaatccgacccggttacaccacctacgaatcctacatccaccaccagcttaacaaaacactcaacccaagactccgcaaaatatggaccacgagcgattgggaccggaaagtccgagtctttaccgcattcttcgctaacctcacgcgccgtaacctcctctcaaactcatccaaatcgctctgtatcggggcccgcgtaggccaggaggtttcggcccttaggcgcgttggcgtctctgattcaatcggagtcgacctcgtccctcacccgccgctcgtggtagggggtgacttccacgcgcttccattcgcgaacgagacgttcgagttcgagttttcgaacgtgttcgaccacgcgctgtacccggagaagttcgttggggagatcgaacggacgatgaagggtggaggaatctgcgccctacacgtgtcgattaataaaaggggtgataagtactcggctaacgatctgtttagtgtgggccctttggttgagttgtttaaagagtctgagcttgtggaggttagacccgtcgacggcttcggcctcgatactgaagtcgtttttcggaagaaaattattcatcaataaaatgatatatattattaattgtaatatttattctaattttaacgttggtttttaaatatttttcttatgttttagttaaatgtatgattattgatatttagtttcgaatttctatacatatttattagggaaattttgatttattatatatatgatctactaacacagattttaactgttatatatatttatttatttatttgtcaataatggatgtctatcattttatcttatcttattttatttacccaaaaagaaatcgatccttccaactgaatatattattgaaagaggagtgttggtatatatgatatgcagaaagaaaaacgagtaggaaataagattgatattaatggggatattatatatttataacttttgagatatgctttacttctatcaaaatagcgttattatatggttttctagtattgctaaaattgatacgatcacaattgtgccatgtcaaagatgtaaaagagatgtagagaaattagggtttcatttaattataaatcaaagtgaaaaatataattaataaaaaagctttacataggcaactaatataaaagattcaaataaaagaaaagagtagaataactctaaataactatttaacacactccctcaaagtattgagttttttttttttttttt

SEQ ID NO: 115710 - DNA, 999 bp, Cannabis sativa
cacctataggcgtacaatgtactatttgtcctcttgggactacttttgtattgttggccattaaagcctatatataccctattttcaggttgtgagaggggttagaaaatcattgtaacactaaatacttgagtaatttaaacacttttctttcttcattgttacttcaaacatttatcttgatcaagctttaaaactttcaacattcttcgtgatttgacattaactatggtttttcgactttgatttcgttgatgagattcagccatcaacaattaggatgagtaattagattttatgttgtaatatttattttatatatatatatgaaaattatgattaaaattttatttgtatttttattttgttttttggattggatatccaataaataaatctaaaatattagatggatcccatttgatttgcatgatttaaaaaatattgaatttaaaatattggataaatctgaattaaaataataaatatacaatacattcaataaatctattcaaatattcaattaatttgggtgattaaaattagtttgattggatgagttaataatatttaacaatcattttataatttgatcgaatctagatatttacatgcatacatttatgcaacttatgtgcaaatgattctatggaggctacgttaaataataaaattaaataaatttgcacgcaacaaagtaaaaatttactacaaacataaaatctaaatttaaatgtctaatgaaataaattaatactaaaattgtattgctacatttggatttaaatttttccagtcatatggtcatcattggataatccttgttctatgagcatgatatgagatttgtgggtgtttatatagagcatgaaaatctatgtatataattaatacaatatcctattatttaacagaatattctttattaattttgtaatattattatatatatatttaaagataaaaattatataaatatttaatataagaaaattttaa

SEQ ID NO: 115711 - DNA, 1441 bp, Cannabis sativa
attattataaatatatttattatttggatagtatagcataataatataatgcaaatatatagaatgattaatattatatgaagatcacgataatattataagaaacacggctggacaaataaaaattgatttattgataaaacttattatttatgtcaaacttaagaaaacctagacactttttataccttaactaaataaacaatcaattaaaaataaatatatgggaataaaaatataactcaactaacatatatataaataatataaaatatttttgttatttaaacatgtcaaaaatagaagtaataattttcatatattatcacaaaaaaatatattgttatttatgcatgccaaaacatagttagacaaaattttcttgcaaaaaacaactctaaaatatagccactctatcattcaaaatatattaatatatttttatttaatttatatcaaaaattttaattatatcatatatcattttttctaactttttaatttttttttctttgcattatttaaatattatatcttaaataagtagtcattgagagaaaaaaaaaaataacaaaagaaaacaattatgaaggagctctaaactttctttggatgtatggttgaaaagaaaatacaatttagatcacatttgatataataatatggctttatttaaaatttaaagaattctttattataaaagcatcaaatacaagtgttcatcaaactagttggttctaaaagcataagtattgttaattttttttaaattttacttagtgaaaaatacacaaacatcataatgatctaaaataatattagagagtgacaagactaaaaaaaaaaaaagacagaaacaatgacttttggaaatgagtgtgattgagggatatatgtggtgttatccataatagtttattaaaacagtgtttttggattactaatgtcaaaatatgtcactataagattctaaagcaattcccccacttacttatataattcaagagtttatagaccatgaaacacaaaagagaatatcctttacccaaaaatacacaaaattataatttttaatctatctcatggcatgacgtcacaccctttatagatttcattctccaccatccgattaatctttataggctcatattcattagtaataaatagaggccctaaatcgtagataatcgaaccatggcccaaattgattgggaaaaagcccatcttttttttggtaccggacaagtgtctgtcagtgagtgtagtgtagtagttatctaagaagttcttagagtttgacataatcaaatctggcaatacaccattttttctactataactactgtttcatactgttttagtacaacttattggaatattaataagatttgtttctacttttagagcctcggctctttttctttgtttttttatttttttt

SEQ ID NO: 115712 - DNA, 4103 bp, Cannabis sativa
  modified_base (2768)..(2793): a, c, t, g, unknown or other
aaattaaaatattaccaaaaattaatatacatattgatgataacgatacatgccacattattaatttatgtaatcaaacacgcttggttacctgccggttctcttctataaaagggtattaatttcccgaactcatactctcatctcaacatatacagattttcttcatatatattaccaaatatattataatataaatcttgaacagaaaagatgtcggctgatctatgcggcaaactagagattgatgtagagtccaacacgtctcctccaaagttttatgaattgttgaaacatagacctcaccactttccgggtgcttctaaggatttaattcagagttgtgatctacatgaaggcgaatgggggaaagagggttctgtcttatactggaattactttcatggtaataagttccttaaacacaataatagctatatgttatacaggagatgtgtgaaattttaatcatgcatctttataaattctattggtttttggagaaaatctctcatattcttattatatatatgtcaccctcaatttcaaaagagtactttcacattatcacaaattataggagaaaaaaaaaactctagtaagtatatgatccataaaatattgtaaaattgaattaaaaatagttacttttgaaatagaaaatagtcacaattaaaatgaagtgttaataatttaatttatagaagagtaaatattattttggattttatattttgtaaaagttacacaataattttttttattttgttaaatgataaaatacaccatgtattttttaaaatggtaaaatagaattctcaaaaataaaacttaaaaataatccgagaggtattacaaaactcattaaattttctatatgtgttcatattaggaattatcttaaaaaaaattatgtataattgagctcggattcctatttgtactattttaaaaaaatatattgtctattttatcatttaacaaaataaaaggctaatattcttagacagtgtatttataaatatatatattaattaattaatttgttgattgtagaggggaaacctaaggtggcaaaagaagtagtggaagacatagacgacgacaaaaaagcaattacttacagagtaattgaaggtgatcttatggaacattacaagagcttcaaattcgtgattcaagtaattccaaaaacagatggtgaaggtagcattgttcattggacaattcactacgagaaactccatcacgaaatcatagacccgcataccatgattgagtttgtccatgaactcacaaagtatcttgacactcatcttcacgaggcataataatatatatattgccaaattaaagtactctcgctcatgtattatatattattatatataatatatcaatcgatataagtaatatatattattattatatcgactaataaataaaatgtttacgagagtactataaattacagtaagtgtggttttctttgtttgtgagattattatcataatggaatcaagtttcgtttgtttgagtatttcagcatttcgggtccgatggatctatcctgatccaatgccatctgtttaattctgcaaatttatagccatatttttatttttctctacattaattaagtgaaattaaactcgatcagtacctagtaatatacgtttcaaatataaagtggcgttaagtaagcttcattaataatataaaatattggaacaatgagaatgtagagagagaattgaacgaaaagggatcgagtaaggttttggatattgaatggagctctctgattgaatgaattataatcaagattccaagctatttagagctgagctattataagagatgaaaggttatgacaacctaattaatatctaactgaatcttcaatcagccaacatgctctctcaagcaaaaagggcaatcaaaccacttgaagcttgtattttgaaccggagaaacttggcaactgagagacctttggacgttagaacatcaactatctgttcaagagtaggaacatatatagcatatgtgcaatgagcttctatagtacattagttctcgttaaaggctatattgagaacattaatgttgtcagtaaaagttaaataatgttctcagtgattttctaccattttcacccaattgactcatttataccgagaacatattgttcttggtagaactttttactgagaacaatttttttttacaaccactttttttgttcattgttaatattcataatagataacttatatatttttattttggtattaatattgcttaaataatcatgaaagtaaaattcattaataaaaataccataaattaagttttttttcttacattttttaaaattataagtttaattacttaagtactaaaaatgctaataaaagagttcgtgaaaaaagtaaatactacatataattataactactgactcggttctccatcatcgagatgattagactgctgaggcaaattctgtgatcacagtgatacaatttgtcctaactagttcctccagttgtctaatccacttatctcgtgaacttaatcccttatgggatccatgtttctttggaaaagctattgtcatatttaaatattcatgagttagtatattcacataaatattaataatataagttaaatattttaaattataggctaattagcaatttttcctctcgaactttgacaaataccaaatcatgcttcctaaatttttttggccgttaaannnnnnnnnnnnnnnnnnnnnnnnnntagatttaagaacttttgtctaattttattcaattttactagattgtttatgtactaaactatgctctccagactttaaaatctaccaaatcatgccccttaaactttgatatgtactaaatcatgccccctgaacttttatctatgttgaaattattttactaaaattagataaaagtcattaaatttaacaattttaatagttcagggtaattttcaatcacccaaacgagcaacttctgtcatatatgataaatacaagtattaaaaatattataataaatttttgttttactttcaagccctctttaggtggggtcctaggctcatatttactctgtttacttttagaatcgattcaagaaaatttatataatatgaagtttttttttaaaaaaaaaaaatcatataataagaagtttcatttagtggaatgtatacatggaatgtcgcgattacaattaaatttgtcctataaataaatatatatatatatatatttatataattttcaaaaagttttatcatgaaaaaaaggcaagaagttagaaggaattccacttagtttgtggtaacaagaatatgacatgttcatgggcagtggaatatggagtaccactataacttatgactggaaaatagtacctatgtacatattgctttttttcatattcaaatcaaattgattcacaaaatacagaagattagacaaccaaaataaggttaaaaggaaaatgatagcaaatgacaaattttcaatgcttaaaaattcattgaggtcaggattaacctgctgacttttattacaaatcacaagtcattccagccattaatacacgtgaaaaaattttataatttcagaatgtgggatatacatctcattgatagtatatgacaataagatggaaaaatgccattaacaaacaattatgaccttattgatttctataaccactggcggacccaattaaggaccagtgtgggcttaagcccatgttgaaaaaaaaaaaatatttcttttacttcttaactgaaaaaaaaaaattaattattttaattgtccacaacaaatacgcaacaaaatgagagatcaatagttgatattttgacagtatatctcgaaaaggatgtattcaatgctattgacaacgagcttatcattcatcattttcaaaacatgaaaactcgtcgaggacaactctaaagatatgagctcaaaaattgatattttattaaaattttaggatattgagtatgttatatattttgaacatcgttttagatttttttttttttttctattataagat

SEQ ID NO: 115713 - DNA, 1782 bp, Cannabis sativa
agacccgtgctcaacaagcatctcatgaaaaggaagaacggaccaaaagacatcatgataagcctttaccttctactaaaaggctcaaacaaaaccctttatctgcatcctctagtaatgattaagaagaatcctagtgatgagtccaattcaaaggatcaaaccttttctttttgaaaaaggtgcttttggtaatgatgatgatgttttatctaggaatgaagaagatccatcaatctttgaagatgaaaaagaacttgagtcctctaatttgtctctcctaaaatggctattcccgaatctatagcagtaacaccactttctgcctctacatctcgtgccattgccaaggataagggtaaacaaccaattaagggttcttcatctggtaacttttctaatttttatccacataattttaggttttgttataatgaaaatcaaagggattgaaaattgtatgctacccgaaaatttgagagtgagaagaattttattttgagtgctcatcgggtttatgggattgtaaaatttttgcaacaagataatgggagggccctttatctggttttgataggtatgttggtggggttaaagaattttatgcaaatttgtctaatgattttcttaatgaaattttttagttttttggacaactttaattatgttcgaggcattggttttcttttactgtcgatgacatagaaaatgtattgcacctacctaaatatatatgttgagaataagattgtttcttctgaatgtcatcttcttctattgtagatcacatgttaataagttcaatagcttttcggtcatagtgtccgaatcacccttctcacatatggtcatgcctctctcatgcgttttactcttagtaattagtttttcaattcaaacaagacaatggtgtctcaagacttggtctttcttttttatcgaatcaccacgagtgcattaattgatttggcttcattcatcatggagcaaattatttattttcctcgaggtaaaaagccaactcataagcttattttttcaaatctaatttataaggttctttgctcccacaaaaaaaaaaaaaattgatcatccaaatgatgcccgtgtgagttccctcttactggtataatttttcaaccctcatagtactttgacggaatttttctcaagcgaataaagatttatgttggtgctagtgacccctctgctgctgtaagtaccaattctgctcctgcaaaattgtaagaggtcaagcaggttgtggctttgacgagcaatcatttggctgccatggaagaagttcaacagagatgtccaagcagttgatcacattggttcagatttaagaactacaagattagttttctttcatttgctttgttttgttttcattaagttatgctgaactttgtttgttttcttttgtctttggctctaaaagatacacaaaaaaggggagtaatgtttaactttttggattgtatactccactggatcctttttctaaggggagttaagtttggtgtttgtgttaaaatttttgttaaagttagcattttattttgtgttattggtgtaacaagaggagtttgtttctgtgatttttctaacttagttatgtatgagtttgaacattaaaatatattttgtttgtctataaagtgccaaagagggatattgtaaaggggtttactgaaaaatacattttttatttatcaattagccaaatttacctttaattttatatttaattgaaacatacctctttttatatgtatt

SEQ ID NO: 115714 - DNA, 1446 bp, Cannabis sativa
tatgaaacttataaaaaaatatagtaaaaaagtaaaaaataccgcctggcagtatttttataaaaaaaaatagcaaaaattagtataccatgtaaattttccgttagcaattctcataaaatagcgataaattaacgtcctaatctaactaaagggttgactaatatgcttggcatcccatataagatattgagcaatatgcgagtgtaataccaaaaattggatttaaggtctatataactgaagctaataagggccatcatattaaattgctaaatttattatattagctttggttataagacatggatctataatcaatactaaggcttagaaaattggaaactcgaacttgttgattatataaatggatgattatgagattaacatcgtcattctataatcgacgcatatatacaattgtggcataacgggaaattgcagttgtttttatcaatttcgtgttgtttcataaaaatcagcaaatataatgcaaagtagttcttaatcaaaagtgatatatatcatgaaaatttataatcatattttattatgattgacatgttatgttgtaattattactttattaattttttattttaattttttttgggtggatatatagatgttttaaatgtaattactgctacaccatttaagatattaattcacgataatttgttaagatggtgcaacattgcccattcagcaaaatatatattctcaaacaatgactagaaaaaaatatttactaattaataaatttttataaaacttagtcatttcttttacgtaacttagtcattgtttagttaacaaaaaagtaaatatgtacgtatataatacccgtgatcgatcaataatacgtcttttaaattttcaagcaattaagtgagatacgtacgtagaactttgtccatggagaatgaaattgtgtacttaattatgaaacaaaaaagagagaacgggtgaaatgactagtacttaattacacaatgcttcaagtaataattactaatcggatttggctcaaaaatggaatctagggtacttcattatgtagaagctatcagtttgccctcgatctactattgtcaatgatgagtaaacgtataaacgaaagttaaatagaaaaattaaaagacgtacacgagagatttataatggtttggccctaagaattgtcaatgacctacgaccatatagtgattcgagcttattagcgtcaatatatgtttctagtattcactattacaaaaattagcttcaatgacttgtattgagtcactttaaaattatttagtgacactttactgcgcgttactaatgtaggtgactgcaaaagtaatattttttttttttgacaaagtgattttaatcactcatgaatttacgacgcccatgtccgccaccggcgctggaatctcctcgaaccaggatagctca

SEQ ID NO: 115715 - DNA, 1550 bp, Cannabis sativa
  modified_base (1505)..(1505): a, c, t, g, unknown or other
tatactataattagcagttcacaacatgatgaagactaatgagaggttaaagaagataaagattattgactcttctgattgtttgctatgtgaagtgcatgaagaatccttgggtcacttattttttgtgtctatattttgttgtcgatgcttacaacatgtgaaacaatttgtgtttttgttacggtaaagcaaaactagaggtgttcaagagtgtaaaaactagaattatatatcattggccttcacccataatgatacaaattggtataggttcttatagagtaaattttgtgtttttgttacggtaaagcaaaacttgtttgtttgtgtacattagactttcaggccttagtaaggtgttgtaggatgtaaatgaagattaaaataatacaattctctaattcatcaaaaaaataacttgattgaagagatgaagattatgaaatctcatactaccaaagatgatcataagtacaccaatacatattctttttgatatcataaccagcccaccagaaccttgcatatatatatatatatatatatcctatgaatgtcattgataaaattcacagaaaatttgaaaagattcatagtataagtaggtatggattgaattgtgtacagttttgatgaggacttcttttcctgtcatagaaaaaagctttgatttctaattgttaggccttttccaaattctatttcgaaccgaattgaaaagcccaatcttattatggccaataaaattcatagaacttattattattattattattattttttttttgagaattgagtaaatgtaagtaaatattttaaatcatatatatatttatacattttgtttcaatagctgcagcaaaaaagtatgtgaaattgatgactatgtagtaaaattaatgtaaggcttgactggaccttcctttaaatatatccagacagatgtgtaactttgaccacataaataataacaaatcaatcatcaatgttataaaacacaaccaaccaaccaacaaaccatgcatatatgtacacaagaatcatatatgtaaattaatttgtataacttttcatacagaagttacagtaaattaaattatcattggtggagattattagggtaggaccagctggaaagtaacagtaccttaattttgtagtaaattagggttttgaacttttagttattcaatatttggattcagatcccaacaacacaaccaaatacttattattattattattgcagaacaagttctttagttatttgctgccatgtaagttgtgggcgcactttttcagtatataaaacatttacatttacatttacatttacagaacctaaaaaaggataaattctgagaatatttatgaatgttaacatttatgtgttgaatgataagaacattaatgttatagagaattgttaaaaaggatctattacagtagaacctatattcaagaatagacttggtaccaagcaaattatattctaattgagnggttataactaaatagagttataccaaaaaaaaaaaaaattaaaa

SEQ ID NO: 115716 - DNA, 1004 bp, Cannabis sativa
  modified_base (499)..(502): a, c, t, g, unknown or other
ttttgtccatatcttattattctcgtaggcatatatgttgtgttgtgcccctcgcctcgcctcgccgtggcccattgttttttgtttttgtactacagatgatgatgccgaccaacaagtttctgtctgtgtctcaattctcaaaaagactaaaattgactaataaataataatagaacaagagagtgctgaggacactctttttgagtgacatgtgtacctttttaaactatatttaagtttaattacaattacactgtttttacttttcattgataattaaaatgggtcatgtcacttacttagcactaccttagctggggcaaggctagggtcacttaacgtgtttttaatggaaaattgcgatataaattttcacaaataatttttttaatttctgtttacaatggaggaggggtatttaaataaatataagtgtggaactaatagattatgcttatgactactatttaataattttatttaattattttttttnnnntttttttttcttttttctctttctttcttcttcctttttctcactcttggttttttttgtttatgcttcaaccagaaaattaaacaatgcttcgggcggtattgtaatcgtttttagttagtattgataaatatttctattatcggtattattttgttgagatgtttataatattatttgcatctaaactaattgcatatatgaattataatttattaataaaaaaattacttattttttatttaaatgtttatatagctatgaaaatatatttaaaataaaaattttaagggtctgtttagtatgcgggattagactagattaaacaagattggattatggtgaaagtaatcttgtgtggtttaagaagactacactgttttatttttttcttttaagaaaaacttaaattgaaataaaaatatataataataaataaataaaaatgaataattcttagaaaaaaataaaaataaaaaaataaaattataaaataaaataa

SEQ ID NO: 115717 - DNA, 1210 bp, Cannabis sativa
ggattggattggattagatcggataatttgtgaacacccctacaactcacagtactttgaaatttataatttaccaaacgctcatctcaatttttttttacagctttgctaagctgttttttctcacagcacagctataggtattttttcgaaaagcacacctatgtcaaactggccctaagaaggaagtaattaataaatattgtatcttagtattcctctctttgaccgatatattctcgtagtctttgatattttctatgatggttgtgtagagttctctagaatatctctaaaaaaggagctagatatgaaaaggaaataaacttggcacatcacatataagtgttgaaaagctatgatcaccattcaccaagctcaaggtagttaattaatttatttgtaagtttgaggacataatgttaccattttctttttctcgaagaatatatatatatatatatttataaaatttatatatgaaagataagtatatgcaaaaactcacttttatatatgccatactgaaaagaagtataattcctagctagtgaatattcctgctatgaaataaaagcaattattattaaaggtttgccatcgataggatcacaaattatacaatttctctgttaatcttcatcataaagcaattctgatgatcaggtttataattggttccctctctggcctttatttccctttctatgtttatgtccataacacttttgcctattatataataagggcctaaaatattagccaaagattacatatagaacaagtcctttctgttttagggggcatattattggtcccccatgcgactcaaaaagaagggaaagaaaaaataaagttaacaaagacaaaatatatatcagtgatgatgagccagctttcaatccaaagtgggagaagactagctagcattctttctcatcatgatatgtacgtctaaagatatatgactttgttaagatttaggattaaggtgttgagtagctcgtttgggttggaaatgttagaaaatataagattaataagatgcatatgtttccatctcaaaataatatatagatataatgaaggagatagttcatgcatgttagagtatatatctctaatcagtggcggatccaggatttaagttgaggggggcgatacttttttttttttataagtgaggggtacgtttttttttttttttttt

SEQ ID NO: 115718 - DNA, 1985 bp, Cannabis sativa
actcccgtgataatggccatcttatgttcatctttcgtaaactttcctactttaattaccttagcattgaagcgcttgatataactcttcaagctttcatctcccttttacttaacatttgctaggcttgtcccaggaatggtgtagtcacgggaggcatggtgttaagccacaaactcatcaataagttgtttccacaatgtaatggatctaggtgatagccttttgaactatttatatgtcgcacctttgagtttcatgacaaagcattggcatctcgctttgctactgaccctcttcatcttcataacctcgttgaaggcatataggtggtactttaggtttgtgatcccctcataaagtggaaaattaggctctttaaagtttagcggtagtggttcagtttgaatctcccttgagaaaggagattcatcaccaaaatcatcctcatcccaattgcactctttggatgcagctaacactattctcctttagagctcctccatctccttactaagttattcctaccttttattcaacttttctcggaggtctgatgatatgggctttgttcctcccttatcgagaggggtgatcaatgacgatgtctatttctcaatggtagccttttggttgagttttttttttttttttttctataaatcaccgtggatctccttacattcagtctttttaggccgagacaagggttgtagatccttttgagatttagcctttgcgatgaagattttattgtattatttattgaatattttgacatcccttcatcctctttctcgcctctgtcgttctttttggtctcctgccctctttgttagattaggggtgtgttagagtggcctttcaagacttcttcgagtaccctttgcatgttttcaatgattttttccaaccagaggtttctcatcctcaactcgttcatctcctcatcatgaactcaagcttgggagcttgaactcactgagtgaggccgtttctctttcccaggtcaatggtgaaaggttttgagatctttcggtgtcgacaggggaggttatcttataggggactgaactctttgcctttgcgatccattttcaccattatgtgtgatgaaagcaatcaccccatctcactgcatgtctgtcaagacctcttcatgatggtcgccttcttttcttgcttgaggccttcaaccatttgcactttcttcctaagtgaggggtgctggtgtgtctcgccttcgagctaccagttgagtgttgtccaggtgaacctccacaccttagagacgataggagcatctagacattttgcaatgatcatatgtatggaaacaacatagcttgagctagtcgttcccacggcggcaccaaactattgatggtgaaaattcgtcaaccaaactatagctgaaaaatcaaaacatagatgcaagacctaagactaagatgaatatatggaaatatgaaaacttaaataaaagttccaataatctatggagaaagatatagaagtttatatttttctaggtcaagtgttacaatgatttcccaaccccctctcacatctgagaatggggtatctataagatcaaattgcctgagatacacttgtcctcaagggacaagttggttgtatgtggctacaagttgtaggtgctggaggtggaggtggccttgcgccttgtaccattgtcggacgttaggtggtcctgagttgtaggaatggtggatgtagagtacctattgttagggcatcaaaggctgtagacgaagtgcctccactacttgtaccctttccccactaggtcacattgaaggcgtgatcgtactctatttcgtacccttctgcatgcatgccttgtcctttgattcttctcccaacgaccttctctccaacacttaagaaaatattgcctttatttctcttccgcatcttctccttctcacatttgtctttctcacccactcactcacttgcac

SEQ ID NO: 115719 - DNA, 1554 bp, Cannabis sativa
acacttcaatagatgtttctttaaagaaatcagccaataaacaaccagccaagagaccaaatggcatgactaattcctggttcctagagatagtgaatataacatctgataaaaagctcacagcaatcaaaacaacagtaagccatttgaatgccttttgtccaagagaaagcaattgctgcaccagtatatcagcccctttctcccattcaagttccttaactgagtcaggaatggctttctgtaatttctccttgacgtcattgattttcatattaacattttctggtccaccagattgtgacattgatactttcaaggcacatctggacaaagcctggtgacgggtccctagtagaaccaagttcttttggacttgacatgattggtacccaaatagttttatctgtcccaaaaaattaagcagttatgacacacttgaattcttctccagaatacatcaaataccatactagttttggactgtcaactctaatataaaaactccacttttccggatgtttggtataactaaataacacaaccttacagcacaatactcgctccaattaagaaataatatatggataagttacaaataaaataaaattaaaactcactttcataaccattgatttgaataaaaatttgcattgcttcaaaaaaaaaaaaaaaaaaataaaaaataaaaagtttgaactaactttaatctgaacataaattatccattaaagtttaggtggggagcctagtttctaaataagttatctatgaattacatacaaagggacggctatatataagtacagaaaagaaaagagtatcatccaagtgcaagaatactaaaaatagcaaagaaaatgagtgagaaagaaagtgaggtacctcagaaggcgaagaaaaagaagaagaagaagaagtaggcaaaagagtagaagcaggaagcgccattgacaccgcacagggtccttatctccttccctttcttcgcatcgtttcttagggtttaacagactcaatttgctgtttcttcttgttttgtcgttcctgtaatcttacaaacaatcagtagtataaaatgatgagttttatgggccagctctgttgagcttgcttattaagccgaatattatagacccgctatgcaccgggttcaccaagttggcccaattctaaaacaaagataaaatttggggaaattatagttttaattacaaaactaccaagttctttatacatcagttctgctgcctttttttttcttttcaaaaaataaaacgttagtgcatgtttgacatcataactaaaaaaatgttttttgttttaaaaacattgtgttatcccaatttttgcactctgacgtggcatcactcgatggtgacacgtggaatcaactctgggtatctgctcgcaagacacgagccgagcaggatacctcacacatttgctcggacgaagtgctctaagccgagcagtgagcaatctgcacagaacgccaacacttagcaaattcagctttcgcatcgtatgtcatcaagaaaatccctataactt

SEQ ID NO: 115720 - DNA, 1918 bp, Cannabis sativa
ttgtcatttaacaaaacacagggtccaattggtaacttttgtaaaacagaaggtccaaaatagtatttaccctattattttctcttagagctttgttaattattttttaaaaaaaaattaaaatgaatcaagatttgtaagaatataaatcaagattatattaaaacataaaagtgaattcattgtaattattaagaaaagaaaaacatttactctactaaatataaacaaacattatttacatcaaatatttattttatttgagtaatttttagaatttcaaataattagtatatttgcacagtttcatgtataacaacaaaacaatgataatatttgtaaatcaaaattttcataataattaaaatatatatatataataatttttcctttctcctatataattgtttttattagtgttgttgttgcaaaaatgaattaattaatattagaaatgaaaataggtttgggccaattatatgcaacatacacaactgtcttcactttccacgacattactcaacattaattaattttctaattaaaaacatccatttattaaatcatataaattaatatgaaaataaaaaatgatccacatgggaaattgcatttttgttaacccaaattataataaataaataaataaataaataaaaggacactgtataaggcttgctcatcaagtaacggtagtgactcggatactgaaactgagtcagaacaccccaaactcaccgagtcatcattcatgctcatctctccccctataaataccactcaatctcaaatcatttctactcaaacttttctctctctcaaaaaaaaaaaaaaatggtgagcccagctgataccaaatcgtgccagcagccgaagccgaagccgcagccgaatcctcctccgaagcgcggtcaggtaaagatcagaatcatcaagaccatcttcggctcaggctcagccgtttgtgtgggttaggaaaggatgttgagatggctggctcggctcggtgccaattgagctggattatggctccggctttgaagccagccactatctttactcttctaacaaacaaacacccaaagccgttgaagtttcttcattcggatcttttgtagaaaaaatttattttttgctttattttttaattcaaaaaattatttatattatggggatgtggctgagttgtagtgaaatttttctctgtaattttttttttttaaattaaactatactggtgttccccaaatttcattatatttaattatttttgttgattaattactgtctgggtaatataaagattatctgtaaatttattaaagtgaatttgagtttgtatagtttctataattaatattatttgaatatttcaaactattatgacaaacaacttttgtttttttaatgtaacttttattgaattattaataatgattcaatcatatgctgatgacgccacaccattaaattttactttcttttttttttttatttggttgtctattaatttggcatattatatcttagattaatttgattaaattttaagtttatggactaaattgcgcataaatagagtaatattttttttttgatctaatatgctttaataactaaataagcatatgtaatttcattttttttatataattcaaaatcatggtaaaagaataaatgaaagcataaaaactcgtaaaattatttgggtagcaaggttatggacagccaaattcaaaaaccgaaacaagaaaacaaataaaaaaaatactcgtcttgtttaggcgaccgagtacaatacttcattgactaaaacttaacaataaaagcaataagtgaaggagccaaattacctgtccccaattcctgtcccactccctgtcccagccaatgaaattttgccacctcaactaaaatt

SEQ ID NO: 115721 - DNA, 1222 bp, Cannabis sativa
  modified_base (1189)..(1196): a, c, t, g, unknown or other
tctcatattattttgtattaattttgatatttatttttatatatatttttaaaaatcatgtattattttttttttctaataaaattttgaataattttttattatagtatttagaatataatttatttttgtttgataggtatattttttaagaatatgaattggaagatttttttttaaaaaaaaaactaatatataattaaagatatacaatataaaaattattaaaatatagtgaatttataaatttttgagatacaaatatttttttttatttaattacactaaaattattagattatattatacatgaaataaatgtaaaaatattgagttaccacactcgtcactatttaattcttgttaaatgaaaaatatgatctaaattttcttttctaaatgtacattagttttaacttttgaaattcaaagtgaaaatatatagaactaaagcaattatttgtgtatacatttaagaataaaaggaatgtaattaaagaaggattaaattgaagaaataattaaccacttcaaaaggtgctttacttatttcattatatatatatatatatatatatatatatttatattgtcggtaaggattattggcgaagaaaacggcggtcactattatacataaatagctacctatataaatataaatataggtataaactattgtattaatcattgtatggactacttgcttttactactttaattaattatttaagctcaatataccttacaataatcaaacataattgctaaaaaaataacactgtttcttactaatattttctcattattgtattggtttaatagcatattggtatcatataactttaaaaaataatttaaaaaaaaatattactaactaatcataaaatactacctataaaaaatagatattaaatattagaaaatgctcataatctaagcccattcactatagtataggtataaagaaaagtagagttaattaagcaaaagtatgattaatttatataatacacacatgtaaaaatatatgtatattatatagccggcttaaaggtgggggagctcacgcccaaggctcccacccaagcctaaaacaccttttaacaaaaaggtttcaaattgttttttttttgttttttttttttaaatatatattttttagcaattttttccctcgaactttgannnnnnnnaaatcatgctccctgaactttttttg

SEQ ID NO: 115722 - DNA, 1446 bp, Cannabis sativa
tgagaaatgggagtgggatttttaaatctatttaaataaaaaaaaaaaaaaaaagagtgtttgagatactatacaagtaactctcattttgataacgtcctcattataaaataagactgttaacagcattagctcaaaagaaaaggtaaaactaaccgagtcatacaactggaaagccctgccacctccttcaatggcgacagccacaggctggtttgcaaccgccttctgcaatgccttctcgtcgttcacagggacatcttcataagaatcaattgtgaccacccttgcatttttctgcagaatacacacgatcaaaactatatgagcacatacataattctttttcaatctccgtttaaattaaatgcataccctgtattgatcgcattttccatcagtagctttgtacggataatcttcttcactatcgataccaccattgttaattatgaactcataagcatagtccatcaaacctccattacatccctcgttgtaagaagtatcacagtcaacaagctcctgttcggatagtgagatgaggtcaccggtcaaaatctgatttattccttcaacagcagaaatcgttgagaaagcccagcaactccctacacgattatattcaatgttaaaaaacaatatataatacaaggaatggaaaacaaatcatttttgtattacgtaactgcaacaaaaacatcttggatttcagaaaggaaaattataaaataaattctatcattaaatcttaagaaaacatttttcttctctattaaatagtattatagtatatttaaaaatatctaacactttgcaccaataaactgataaaagtatttatatttcaattgtcaaattctactcacatgacggaatttaatttaatttagtctaatagctggacatggagctgccactgccaattagttttttatttttaaaactagaaacatgaaaatattttttaaaatcataatctataaaaatgttagttttataaatttttagttaagaattaaaactttaaaagttttaaaaacaaacaaaaaattacttttaaacagttttttttctttctaaatcaatactgtacacttcgatcccaatttaaactatgtaatccaaaccccgatcccaaccccgaactgaatcccaaacccaaacctggaccccgactcaggcccaaggccccgaccccgtaccctggacctcgactcggcattggacccgaacccgttgctagtcccagacccaatttaaataaaatcaacatataaaaataaaaataaaatttacaaaatatttttgtttctagttttaaaattgaaaaataatattgattatagaagggaaatttgaaattgcatgcttataatatcttaaattttttttcctaaattcataattaataaaattggtcaaatatgaccacattattatttt

SEQ ID NO: 115723 - DNA, 2810 bp, Cannabis sativa
  modified_base (79)..(85): a, c, t, g, unknown or other
tcatgaaataaattatttgaaccacgcaacataaaaacgatttctgatcttatatgaattagtaaatctgattatattnnnnnnngttttatttagggcacaaaactaaacaactacaatccttccatcctgattgacggaatcgctagggtgatccacttaaggatggaaattcgggctatttttgcgggtcgggtaaggcccccggcccgagggggcgacttttgcctgattattttgggtttttatcaggctctaggcctggcccggcccgttacatattttttttggtcgggcccgacccggcccgatttcaaatattaaaaaaaagaccaaaaaccctaaaaaaatcattcccaatttcttgacttctatgctctctgattcaaaaggccatatcacacccctcgccctctaccctggcaatgacacagtacagctgactctgatctccgacgacgactctctcatctctgatgatggctgacaaccacctctgctctcttctctggttagttttcttgattttagtctccatggaattcttcaactattacaaaacaccatttcctaccttcgcatagaaaaaatttattatgggtctgtaagtgttacctttgctccaagatccttcagatattaaacaattaacactcaaggaacttcagttatgatgggtctgtctttattggttctgttttgcatttattaatcacttttttagtattttttttcctttatcaagttttcctctttgatcaattttcattcgactatgccatcttctgaaattttcgtgggtcattcttattttaatcgaattgcaggaataacttatctttgatttatttaattatttatttctttctcgtgtataatcaaatcatacattcttgttgcataatagcaatcaaagagctattgctaccctatgctgatccaaatttaacaccaaaagatctcctaactggtgtgtgcacagtactttgctgttggtggagtaggatatgatccattgaatttgtggtatatatacatataaattgaatttgtaccctttaaatattaattgtttattattaattttttatttataattttgttagaatgtatgtgtacaattttttattttttcttttaaaataaataaactgatttaaaaaaaataggggtcgggcctaacctgctaggccaaaggaaggagtcgggttgggccaaagtgatatcgtgccgggccaggtctgtggcgggtcgggcccgacgtggccagattgacaatcctagatccactcatctcctacaccggggaactccactgccggtgctttcggtgaagccctgtttcgaggatcagaagggcatccaggcccgaaggcaccgggagctagccttctgcatccttgaggtttctccaactagtggtgtctctttttggcgaggtttaggagcggtcctacatgaggcttcgcctactttacttttacccttatccgtgcagggattcttggtccctgtgttagtttgcatctacgctcgctcttcggctaccgcttctacaaacggttccccatctattccactcaaaccattgaattttttttgtaattgctcaatggtctctttcatcttagcactcagcctttgttcctttactaggcctcctgtgctgccgccaactcttcagctacacgcaacaaattagggtcgtgctcgtaataaagatcatccttatagtatccctctttatagtagtcactatcaccatcctcgttctaagtctcagtatactggccatcctcgcaaccttctccagcatttacgtcatttgtttctggattccaagcagtggtattctcctctaggttctcggtagcagctacgccttctctatcattttccacctgtgaaccgactgcacgagaggtgccttcctccataaccgtatctaaaggatttcttttactagagttttgtcgcattttcaccatgattgggggatgatgaacaccatcaagcttccttcggctctcaatgaaagcaccaaactatttatcgagtttttcgaaaaccaaatattatgagagaataaaggaataacaagtaataaataataagaacaacagatttttacgcggttcaggcgttaatgatccttagtccacgagtcaatatgatgagcctctttgggcggatagtgtttgattagagagtattacagtatgaaactgttgcatagaagaagttactacttagattttagaagtgtgacggcacatgaaaagtctctctctaccctttgaaagaacgaggacatttaaaggcgcacatggggtaaagggcataccctttacctaccttgggttttgtcctccacacgttactaaggtctacactacaaaaggacaatctaaccatccactggggaaactttcttcatcgtgcagtgtagagcaattgatgaggaccttcgtacaaccttggacacgtgtcgtctaaaggtctctactttacgaaatagtctctacccatgctgttgagcaaaagtgtgctcgaaggtgcgtacacgcactatcatgaaccggtacaagggacaatatttgatcatgtgtccgagaaagttgtagccgtctatggagtgcaattttgtaaggagctaacttgttcaatgtctttcggaacctgcactgctttttgggtttccttagtggaggatgctgctcttagaatccattacctcttactgccttctcggttcaggagtcatttcttttaattctcttagatgcgttgtgtagaaaccgtgtccccac

SEQ ID NO: 115724 - DNA, 2121 bp, Cannabis sativa
  modified_base (1635)..(1654): a, c, t, g, unknown or other
  modified_base (1895)..(1915): a, c, t, g, unknown or other
tggatatccgattctattggatcggttgggattgaatttgtcggttgggattggattggatgactttctgcacacccctagtggtaggaccaaattaatgaaatgaaaaaaaaaatattttaaaataataaatactttgttttttatacataaataaatacctaacataatattaactaatctatacttgatcttaccaactctcacccataaccaattcattaaataaatagttgtaatatagtatattataataactccctaataaacattttagtaattaaataataatattatatttggtatgattttattaaaaaaagctaccaagtaattatttttgcaatttgtttgactaattaaaaaagatcatattattattttcgtactaaaaaaaattacttaccaagaaaacagaatcacgagcagcaagagcggtaatatcagcgcaagaaacaactcttccacacttcttgtgaattagggctcgaagatcgttaatgatcttgaatgcggtggctctcaaggtgagattaggtggtgcatctttctcacttggtccacttgctgacccatctaacaacactgaaccatcacatccctacacaacatatttatgtatatataattagtaacgacacataattaactaaatccaaacatatctaataatccatttatagaaattaattaactacaaacaacatgtatatatcccaaacttaataagcaaaatcaagactacaccactaacatatcctaattttaacaaagtttatcaagtacaacaagacataaaagtacctaagaaaacctcccaaagtttatcatgtcattttttataagaagatttttatagtcgagtgatatatattatgctgttaaatacaaactcggactgtaggaatgtcaatcggatcggatcgggccagtcctgacccgacacgtttttggcccaaaccggcccgaatacttttttcagtttggcgggtcggaccaaaaaagtattgcggcgggttgtgtcagactgaaaacctagaaagtgaccagaaaacatccgggttgtggatctgcaagaaaaacccattttgctattcgggccgcgccgaaggtaaatagcttctaagcctaataaagtgattaaccctctctttttttatcaatgtggaacacttacatatattctttgagaaaagaaatagttattatttctgtatatatatatatacctgaacaaagcaatcatggaaatggagacgaagcaagccagcagcttgggcaatatcatttttgaagattttcttgagttcttttcttataatggactcagcagaaggacatgattttgcatagaattgccatgagaggcctttggttaaaggaactgttttctcagctgggccttcaaaatttgcacttgacacactaataatactactacaaattagtacagcacaacagattatcaaaaccagatttttattactagtagaagaagaagaagatgatgaactagccataaccatggtagacttttggtttttgtgttttggatgttgaaatgtcttagtaccactcttttatttatagccaaatctaagatatatatcattgttgtattattattattattannnnnnnnnnnnnnnnnnnnattattattattattaagggatatgattttgtcttaggaattgtaatccgtgatatacagcagccatcagatgagggagttatttgatttgacggctgagattgatataagggtaattaggattaaaaagtagaaacgtaccctgacattcatttaatgtaccttgagacccataccacggaatacattccaaaagtatattacgggacaaaatcatatccctattattattattattatnnnnnnnnnnnnnnnnnnnnntattattattattattatagtatagactacttttgttgaacatccacgtggtgaccacatccctcttaaggatttttaattgattttgggttatgtaaaaacaaatatatatttactaataataattagagcaatttgcggcgaaacccccttatgttttgatttttatacacttaacccccttatctttatttttggtggcaaaa

SEQ ID NO: 115725 - DNA, 1562 bp, Cannabis sativa
tttttatacttttaaaataataatattatgtgtaccaatataaatttgagacatgtacaaaagtgtacacataagcagtctatattagcaactaactgtaaataatagataacaccttaaatttgcaagcagttcagtaatttggagagttttactgtcaaaatttaaacttagagggttaagtccaagtggaataatagttaaaagggtttaactgaaaaaaaactactgtattttcaggttttagttttcaaaaaactattttaaaagtgagaagggaaaacaatttttttgttattttaaaaagtaaatggttttcagttaatgtttttaaaaataatttttaaacaactaaaactgaaaacaagttttttttttatatgaaatagcaactttattgaaatattaacattctaaatacaaaaagacttttatatcaacccagccattatgctcaaagatgctacgaccagagagaaatcgagaatatctagcaatagcatgagctactcgattttctgaataagtaaagccaaagtggaggacatggcttgattatttcgaatggtctggacagaaagcaaactattagtttcaatttttacattaagctagttcttactcttaagagcttccttaattcctaaggcttctacaacctcaactggataaatgcctccttgaaagcacgtcttggcttctattaacttccctgagctatccattgccactaaaccaaaatcatatgaactctcttgatgaaaaaaagcagcatgaatattaatcttgatttgattcaaacctagtttaatccaaaactcagacccatcaccattattttcaatcaacaatgataatagagtggaattgtcttgagccttcttccaataatcaaaagtaacagacaatgaagcaataacatcatttatagtagaggttaatttatcccaaacagcttagttacgggctttccacaccacccaacaaagcatggcaatgcgataaatcaggtcagtatgcagcaaagcctcaacgaagaggagatatccatgtttagaggtgtaccaaacacaaaccagcatgactacaaaatcataagtgagcaaggcatgtgtggttgtttaagcatgagtattacacacaggacacatagataaaacttgcacatgtttggtgatgagattaagacatgtaggaagacatttagagatggcacgccataaaaaattaatgactttgggtgggatcttcaagtgccataatttttatcaaaaactagagttgttggggcttggatttttttggttttttctgttgcagcagcaagtaagcactacgaatagtaaaaagtcccgatcgttcctctacccaagactagcagtcagcttctgcagaatcacataatggtatctctaaaatcataacaacatcccaaactgagaacatgtcatgaacaacattagaatcccatcttcgatcatcaacttgaaatagagaactaactgtgttattatacaaatcaggatgtgtagaggttgttggaagttattttaccaggaact

SEQ ID NO: 115726 - DNA, 1353 bp, Cannabis sativa
cagtgtaattacatggtcagacaaacatgccaaattgtgtaattacttccaattacacacaaatccaatcacattgtgactttccaaacgccctacatgtacatgcgtgtaattgtccgtgatatttaacaaaaattttagatgaaagtgtaagcaaaataatgtagggtttagtaagttttgctataaaaaaaattgagtttatttttaaatattacaaaacataaaattgagatgattttagcgctaataactaaaaaaattatatagaaaatttattttgtaaaacattaaatggaggataaatcaaatcacatgtttgcctccgcccgcctcccagtgtatacattgccacaattttctctctaattaaactcatagtcataggctataccttacaataataatgatatgtattgaaatttaaatttaattgattagtctcgacttgacttatattatttagcccttataataatttttaaattttatttttgtaaaatttcaataatgaccattagtgtcaaagaaattaacatggtcttactacgttttctctcgtaatatattgataaagctccttaaaagtgttactttccaacaaataaaagtgaggaattaaaaggagaaaatgataataatatgctgataatattaattgtgagtaaaatgtaacataaaatttaaagctaaaactacgtaaaaaccaactttagaaaaattcttttgaaataatttgaataaaacactattattatctataaatttatttctttatatattaaaagtgtttatttaatggcatttcttggattaacagaatatactttaaaaataaaagaatattgtgttaaatttaacgatattagtaggtttgattctcccgttaactttcaaaattatataaataattaacccaaaaagttaaacattcttttttttaaacgtttaaaaccaataattaaatccaaaaaaaattaaacaatcttttttttagaattaaaaaaaatcatcttatccacatatctctctaatataacaaaccgtatatcccaatttttgatattttttttgttagttaaacgttaacaaattaataaaaaaaattaacaaatattaatattgttacacgattagcttaacagattaggcttacctgattttttttttttttaaacccaaaaaaattaaacaatctttttttaaatttaaaaaaactacgccgatacccacccttaataacaatcatcaatataaaatttaaactctatataaaaaatcgtttataacataaaacatttgaataacaatgtgtatattataggttagtttatatacacaattatgacgttc

SEQ ID NO: 115727 - DNA, 5900 bp, Cannabis sativa
tataagatatatatacatggtttgttaccacaaactaggtactactattttctattcacaactacttttttttttcactccacactctcttttcactaaatattattttagactaatattttacaaaagttattagagaccatctccaatgtaagatataaaattcgtgctaaatttggcacaaaaataaatttacgtgagcccattacttgtaattgtgctccaatttaaaaatgtaaaaaaatataattattattgattatcatttaatattttattgaaaatatacaaacatcattatttatttatttttgttacacccaatttttgaagagttaaaaagtcaaccctgcgactttgaccaagactcgcaaagaccaaataagttaaaacattctacttggaggcccataacacctctaaaaaactcatgacaatattgagcaaccatttcgtgcggggatccacacccaagtgtgcccaacctattgtttattggcctgcataagggttttcacccttttcaccctatatatacctcagttcgacaaggaaattaacaatgacttgagttatttaagcatgaaatggctaaaatttgaacataaagtcaagagtgcacaaggaggccattccagcatggccgacctgagccatcttttggcataaaaagatgacacgggtctctactctcaagacaccaaagaagacttatccaaaagttgtccttcaacaccaaggattacaaaaccagtaaaagaaactatttttcactcaaatactaacctaactgacctgtgccatctttgtgcacaaaaaagtggcatgggtcagcaaccccaaatggcaaagagatttttttttccaaaaatactttttcatcatcaacacatcaaaactaagtgaggaaggccaccaagttgtgtagaaactaccttgctgacctgtgccatctttgtgcacgaaaaagtgacacaggtcagtcacatcaaacggggaggagtttctttggccaaagtatatttccaacatcaagggaacaaaagcaagtgagaaaagtcacaaagaggtgtagaacacctatggctgacttgtaccatctctgtgacctaaaagatggcacaagtctgtcccactaattagccaagaactaatgtgggcaaagtgttttactagcatccatatgataaaactaagcaagaaacaccataaaggtattcccataagccgtagactaccaatggcatcttttggcactaaaagatggcacaggtttcccgttagggttttcaagtggagatgagattttggaaccccaaaaccccaaaaatatagctcaccatcgaaaaaataagttaaaacataccctgaggtgtccgagaacatgtatgaccaacctgggcaaaaatgaggtggcccgaatcatgatgacatggcttatgtcagatttggaggtgaaatgtacttactacccttcaataaaatagatataagtttctcaattgttatctaaaaggcttggttcaacttgaatttgaaaggtctattcaagaatgttctaggcgtttctcatggtcatagcatatttctaaagttatcaggctcaaaattaggttaaaagacaggttggcccactttacttgggaattaattggttttattaagtgtggaaaggggatgttaggagagttgtgtcaaaacacttgtgactcactatttaccttactcgatgtgtgccatcccatggtgaactttctccaatttaccattcacaaagcacaatgccacataaggaagttcaaaagaaaatggaaatagccatcttcaatgacaaacccaataattgtggaataattgcctatgactatgggatatttccatagatctttatttgtttgtattttttattcattattttggaaaatgatatgggattagaagtgagataccccgaattgtgggggatcactaccaaatcgtaggcctatataaagacaacgatagactagggtttgagacgaccaaataaaagacctttgactcgacctttaatcatattctagatctggaagctctttctagtgcctagaacacatcatccctaaagaccttcactcttcaccttttccttcagttattcatattggtacgacgccaagcttccatacaattaccattagcatatacacacttaccaaaagttaaagaccattctctaatctcgcttctaattgtgtattgttcccatgaacattaacaccaccattattatcaagtttatggtattgggtctcccatgagccttttattcatgcgcttcgatatggattttgcctagaaatctacttttgtactattatccgcacactcttgagaacataactctggtgtgctaggactgaataataaaaaataaagtagacgtagccccattaccatcgcgacatggggtgaactactataaatttctagtgtacttttttatttattgcgattttatttagcaaaattaatttagcgcagtcctattattttttttatcttcgtagatcagttgatgaaaaactgcgttaacatttttattgcttatataatggtaatgtagtaaataaagaagataaagttatgtaaaagttcatgaatcataataattaatgacactatagtaaataaaaaaggtgaaatttattatgggccaaatttggtacaatgctaaatcttgtgcaaaatttggcttaatttttagcatgtgccaaatttaccttgggattagccttccaaaacccataaaatacttctgcggcaatagactcgtgatgttttatgtctttagcgtgggcatctatcttagctgcaatcacctcattaacttattttttctcctcttcaagagttgacttctcattctagtgggatccctccttttccatgagagttctagtcagatccttaatatttgtctcttaattttggaggagtttctaaaggccttctctctcgtctgtaagttcacggacctttttttactcttgttccaaatcttcttctaacttggtcgcggacaacatgttgtctaggtgctaccttaactccttgatcttgttatttgcgatagttagttgcttattcacctcgttaagttgggtgcttctctggtcaacttcatccttggcgactttcaaagctttttccagctcggtggacgcaaaatcagactagagagcagtagatttggctcaagaataagcatatccgagcttaatgtaggtctgaaaaataaaaaaaaaaattaaaaaaaattggcaagttaaaaagattgaatagcatgtaccatgcaaaaatttaaaggttacaaactcactaaagtatgttccttcagtaggcctccaatcagaagttcgaggggtaggtgatcacctcctttcaactgcttatttacctcaaccattacacagtcttaataaacaccgatcacctcattggccttttccgtctcaagctgcaccaccatggtagtcttatttgattttccaaggtcaccctcaagagcaggcgtaagaaaattaagcctctgaatgttaacaatataaacaccaaaagtgtccttggatgatttagcaagcttttatcgagcaactgtgggtgagcatttgaagattttttgtacggggttcactctgcagaaagagagtttggtacctccagatccataatttgttccacctctagggttgaatcagatgaaattttttatccaagcccgagatggaggaatttgagactcaagtctaaactggtcaaaggaagggtgtcttcctgcctatgttgcttagtaggagacttctcttcgaaagagtaacccaacttcctcttcagcatgaccttaatcctgctcgtcataactacacagaaaaaaaaaagtagttaataaaaagaaaaatctggcaaaggaaaattcatcaaagagcctagtagtcaataccctgactctccacgagagcattttccctaagagttatgcttagagcattgtggttggaggagtaatctttcaactcctttcaataacgtccttgcctttgccgtcaacggcgacatgttaggaagataagggggctctacaatttgttctttgatgctcacagggactttgcggggaggaacaacatgtcagacatctctttccttgcccgggatatcctgattaaaatgttgatccttaggcatgaaagactttttcttggactttttggacggatataatctatacttctaaaaattcacctccgtgtccatcatagatatgttccgagcttttccagaaagccctaagattgtattggccctatttctgagtgccaaagtgaataaggggcaatagaagtgttcgacatgctgtaaaagaaagatggtctgcctcgaccccttcaacaatgtagtaatcaacgctatatccagcaatattggaaaccttcttgcgagttgtatcgatcaaccatgtgaattccagctggaaaaaataaaaatacctgaaccatttgtgaggtttgtttgacataaggttaaacaaccaattaatgtcatgaggagaaggcactcccgatccctgctcagcataaagcatgaataatgcggatagatatgttattccctacaaacttatatatgtcaggaagatcctgtagtagttggcttccttctagaagtaagggtgacggggcagcagagtagggctctaaacaggcacaaagcccttcaccagggttatgagccaattggtcctccctcgataagaatgttgcaacatctttgaccgagccattgggacaaacattgtttagatttttaacagtatgcttggatggtggcgattcccaatgtggtagtggcttagacctaggcggcattgatattgcctccaccaacactcgtcaatgtaatcctcacccaacactagtaactcgcaggatgaggaaataagttaaccagccttgttgaatcctccgtagggaaattcttcatcaacgtcaagcattagttccccctcaggagcctctgggttctcattttcctccaactccgtgcgctcctcctgctcctcaagatccatgggtaccgtgacttgcctgacaacttccgtataccgcaacttgcctgacctcaaaaattaatctttgactataacgagcaaccgtgattgctacttcagcctgcacagagcttctctttaaaggtcttagttgaccaatatgcagtgtatcttgtacatcttcccagactctgtacatccacaagggtggaagaaattttctctaacatctttcaactcccacataaaatgcctgtactcttctttgtcaatttggtcggagtagtggtgatgttatgtttctagttcaggggaataattgctgactttaaactcagagaaacatgaagtataggaagaatttctcagagatgaggatgtgtgctcaaagtcgaggtttattcttattaagaagttggagcagatcgtcatctattcaaaaatcacctcctcagaagtcacatgggtgcatgtatgaagaagaagaataggttagtatccgaacaggtttggaatgtccttacaaaagaagaacatcctaagtacttcaaatagaaggaaaaaaacaaattaaaataaaggaaatccgccctaatgaagaaacaattgcgcaaaaactgagcttagggttttaaaacccagaatctctgaagagcataaataggggaaaatagacaattattcttgcaaatattcctcaccaaacattttcgagtcaacaatactacaatatgggcctttaacttccctttttttatcccattttataaaaagggaagctaaagggtgtgagaacacccaccagattcga

SEQ ID NO: 115728 - DNA, 2661 bp, Cannabis sativa
  modified_base (1027)..(1036): a, c, t, g, unknown or other
tgtgtttattttcattgttctagagaattcatatttaggatgttaatgaacatacttgtcagtaaatctagatccttggtaaaatattcccaacaaaatcatgaacaaaaattagataaaaaacttttttaaatggtgaaatgaaataaatagaggtttattagaacactctgaggtatacaatagattttctcctaatgttatatttttataaaacataaaatactgaatagatacacccttaatttaaactaaaactacagttcattatttttttaactattgcctaactaaaactatacactatgttctctctctcaaaaaaaaaatactatacagtatgttatttttttaactgcttttcttttagtgattcagggtctcacacgctttgtagaaatagaaatttatgaaaataataatattgttggagtttgagtaactattttaggaaaatttatatggtatactgacttttgacatttttttacaaaaatactgtcaggcggtattttttacttttctactgtgtatttttataagtttcatactgtagtatactatgtatactttttagtttattttagtgttgttttacggttgttttccataatttattttttaacattgattcactgttcttacttcatctttctagaattaatgattttttttctgaatattctcgtggttcaattgtggttctatccgtgggtgggaagatggaggctataaaataaatttcttcttccttctctatggttattttgtagttattttttttattttggttctcctaaaaatacatttgacgagctcactagaaaaaaaaattgaagtgtgtagttcttctatgtttttctaagtggttatatctgcttattgttttacattttttttttatgttatttaagtaatttttttgttctaatttttaagattgggcttacaaatataactgctattgtattgggtattgaggctgtgcagaacattttttagttttttaatcatgttttcctttctnnnnnnnnnnttgttttagtgttgttttacagtttttgccatgattatttatttgacgtcgatttcactttttttttctcaatctcacctgaattaatggctgtttttcgattgttctggtattcatgtggtggttctatgcgtgggtgtggaagatggatgcctctctttttttagtgtttacagtataaaaagaaaaaaaaattggccaagacagtataaaagtaatttctaccgtatagcactatttttataaagattggagcaaaattcagtaaatttttaagtttcccctattttctctacaaccaaacatatgatgacgtctttatcaaaatcattaaaatgtttggatcatagggtaattaaaatagtatccctaatcaaaatggaagtctaacaaaaggattttctatttggttggattagtcttgggagtaattttctttagtcatctttttaaatgcttataataggcttttatttgtaggctctttatcgactattcagcagaaacgattttattattagtaggtttaagatggattttggatgttggacttcaaatgagtgcttttctctcttgactctttgtcactagtttctgctctaaattgtgaatttgtgtattataatgaattatgaattatgaattttattttcagaaattaaagttttagcatgttaacgcaaatttttgctaaccaaaatttgagcctcacaatgataatctcacacagaaaaaaataaaaagcagtaaaataagagatatggacacaagcgatttttttacgtggttttgcagttaaaattcaacgtagtccacaagtcaatcttattagatttctaatagttttctcaggaccttttttgtatgattttttcgtctcccttttgatgttgcttgccactatttataattacatagtaggtagttaattacaaagttgattgtaatctttacaacgattatcccctcaaatcatgggatctaattacatatcacgttaagtaaacgcggttttcatttaaatttcacacagctgtgaatatctcgcttttactaggtcaaaatgagcgtgtattaaagatatatggtaagccttatcgtattggaatgcctcgctctgaatggagtcgagttaaccttgacggcgagcttgagctcatcatatgtcttcccaaggttgataatgcttttactttaactctaacaactgtagtttctggtgacgagatgttccttttcgcgtgcattccttcctacggtgaggtggacgcctcgctgtctcttgctttggttcacccatatttatacttagcttgtataccgtacattgtacgctaagtatctccattgtcattatatctcttccacgtaacgaggttagtgcctcgtcttgtacacctaaagttacatggtttctcatcgaggcacaagacaacaatgtgtacatttttatctcacataagactgttcaatcagttgaggtgtaaacatactctgttaattatgcttttaacgagttattccatgtcaagtgtaattatgattacgtgtttgagttctttattcttctcaacttgacacgtgtcttcctctgatgtactagccgaatttcgggcataacagag

SEQ ID NO: 115729 - DNA, 5652 bp, Cannabis sativa
  modified_base (3965)..(3965): a, c, t, g, unknown or other
  modified_base (5622)..(5626): a, c, t, g, unknown or other
aattgagtggctaggcttactctcgtattaatttcaaaaaagtaaatgtttactctcatgacaatcttgtctcactgacataacaataatcataataatgttagagaactcaaagtttggaaccaaccgaaactttaagcattatctttttaagtttgttgtcacatcttatccgagtgattagagtagtttttaaaataatgattcagagcaggtggaagggttgattcaaattcttagtattagtattagtattataattaagtgggatattatataatacatggtacaaatttaagagctaaatggtatcatacattgattggatccttaatgctatgaaaggccggtcatggtttgaccaagttggctcttgataagagttctgattgtgtttgttgcctgggatagttgtattagcactattagtgatgctgatttgtgatttcaatgaagttcactactttttcacaaacacttaaagataaaagaaatatagtgcgaattttttgcctaaaagctcaagagtagtctcttataaaattgatacgtggattcaatcctcgaggaaatgatgacctgttaattaataactctcgaatagtcagcctcgcttgatccgaactcgagagatgatgcaatcttgatagggtctaatcgcatactatgtcttgcatagtataaaagtgttagataagtgggaccgagaggatttttatacaagttgcgcatatatatggaaatatatgtgatgactaagtagtcttcgctcgcgactaagtaaagactgcttctttacataaagactggtcttaatgacaaatcgtgttcgacgactcgacaggcacttgcatgtcctatattgtcaacacgcgtgatgtctgtcaatgcgatttaaggtgagcgcaaacatctaaatgataggtccattaatcgtttagcgaatatagaacgcacctaaaatctgcgagcttgtgcgggaatatgaataggaaactcgcgttcaataagtcacatatgttactgcacttaatacaacaagaacaaattaaaaaaaaaaaatcatttatttttttacgtttattctaggttaatattatcatttattgtaaaaacgtttctaaaaccgatcaatcatgtacaactaaaaggacacttactttctatataaaggaataatctaaataaaataaactaagcagaaatcatttgcaatagtggactagcagaccaagatctgactgaactactatatttccttgtgtccttaatatttccagttattcttttgttcttggtagctcattcttgaatactcactactctaattgagtgtttgcactgttttattcggatcatttaatagctgcatgaatttcggtgttgtccaaattcctctaacaacatttagcaccgtctagagaaactttatcaacatttttggaggaaaattattatggctgccaatgaaacaaacgtgaacaacaacacagggtcttttaatgttggaataatgaacatccctatctatggtgatggaacaaatccaacacaggtggtatgagtcgatggactaatgtcagcctctcaatctgttcctagaaactaccagccatgtaggagagacttccacacatgcagcaatggtagggcactttccaccaatcacgcaagtagtggcttctgaaggcattatccagctcacaactgcaaagtacacggccatgaaggaacagattcaagctttgcaagatgagatcgatgaaagggagcgagtccaaacccaatgtcaaccctgagtcccaagttgatgtcaagacgacactcaggtaactaatacaaattgacgtcatactgaacgtcctaacaatgctcgtaattgtagggaatgagtaaataggaatgacaaagaagggctagacttaaccagtctatgtgcgactccatatgaaatatggatcctatcgctccaaacatgggtcgtcagcacaaacggagagacaaaatgtcgcaggaagaggaccctgggtgacgaaactcacagagtcgagctcaaccacaaactgaggtaaatgaaagtgattctcattgatcctctactaatagtcaccctactagtgtttataaaagatcagggtcagtgcaaaggaggcatggagggagatgtcacgtgcatataggtgatctccgtgatcacctcaacaaaatattttgggcgctatctcaaacaccaagaaattatgatgataatgaggagcctcgtagcgatcgaggcatccaaaatacaaataatgtgactaatccagcaaacccgccaatagcaccaactaggaccggagaagtggtaattcttacaaatatagcggcagtagtcgctatacctacggtaaaccataccaatcccatattgccagggggaatcgattaagaaagcctcttgtgatcattaagacaaatcgagcagcagagaaagcccatttataagtttcatgggacatcgccttttatagaagaattgcgagaagccagaattcctagaggttttaggctttcaaaattgcttaaatataaaggtaccactaacctaatcgattatcttgataaatttaatatgattatagaagtagaccaggtacctcgattaacaagtgtcaaatactgattgtgacttaggaggacaatgctcacgactggtttagccagctgcatgaggcgtccatatcgacctcggagacatttgtggacttatttctaactcattttcaagccacgatgatatacaaacaaccatacacgactttagccaacattaagcaggactttggtgagtcattacatgactattttaaatggtttaacgcggaaataaccaaagtcgagagggcccttgaggcttttctagtttgtatattaatcacaggtgccttgccaaggatgaacttttagaagaaattgcaagcacgatggcctaagtcgcttgtggaactcttggccatggttgaaccgcataagaggattgagaatttattggtggaacttgaaagaaataaggataagcacgagtcccctatgccaagattgcgatcccggagcccataaataaagaattttagaggacaaaatcccaagagacgcagtccaactaggcgacatagcctaaaactcgcaaaatcaccaacaaagaagtatacttccccgaagaggaagggaggcccacgttttgtcaactataccatgcttttggtcccccacaatcaaatttgtgcgattaaggagaacaacagttttttaagaaaaccaccaccaatctaaggaaattacaataaaagggatcccaataaattctgtaaataccacaaagatattggccacactacccttgaatgttggttccttcaagatgaaattaaggaatttattagacgagaaaagtttggtcaatataagaaaaataaagaagtcaaccccgaatggataagacaaaaaattcaggggatgcaagtagttctagagccccttgcaacattttaacctttattgggggcccacacaatggtggagactccaggaaagtgcaggagtgttacgcgaaggaggctaaggaaaaaccctaacaaatgtgaataatttaagtgaaagaccagagaagttgtttgaaaagaaacgcaaagacatcactttcatggaaagtgatgcaagatgggtgcaccacccacacaccgatgctttggtagtggttgccaacattcgtagtgacaatgtacattgtgtacttgtcgataatggaagttatgttaacctcttgaatctgtaagcgtttaagcagattgggttacatgaaaaagatttgaggccagtaacaccaagtaactacggtttcatcgaagatacaattgaattgaaagggatgattaaactacccataacattagcgacgacagctgctaccgcgaagtctaagggtnactttgtagtaattgattaacattttacatataacacaatataggtcgccctattttgaaggagatgaagatagtcacctcgatttacaacctcactatgaaaatccctacacccttaggtgtaggatcaatacaaggagtgtagtctgattaagggaatgttataacactgcattaaagatcgcagaaaagaaaaagtcagtaaatgtaatttacttgctcgagacccctccacctcgacatgagtcatttaaaatcgaagaagtgcgacatgtagagaaatccaatttggacccaagaatcttcgactataccaacaccgcacaaaccgcagaaaaaacaattgaggtatcaataaattcatttaataactctaaagtattagaaattggttctaaaaaaatttcaacagagagaaaagcttataacttttctcaagaaaaatttggatgttttttccttgaagcattcaaacatggttagaattctacccgaggtcatgtgtcatcgtttgaacattgatcccgacgtgtgaggagtacgatagaagtgttgcaaaatggaccccgtgaggtaccaatcgcttaaggaagaagtagaccgcctactggcatgcgacttcataaaggactcattttacccaaactagttagccaatcttattttagtaccaaagccaaatggctcgtggcgcacatgcatcgactttacagatttaagtaaagcctgtcccaaaaacaactttcctctaccaagcattgaccaacttgttgatgccatcgcaggtcatgagctccttaacttcacggacgtgtagtcagggtataatcaaatcttgatgtacaaaccgactagaagcacacctcctttatcacagatcgaggtttgtactgatataaagtaatgtcatttggaataataaatgcaggtacgacataccaaaagttggttaacatgatgtttttagatttgtaaagaaagacaatggaagtgtatgttgatgatatgctcgcccacttaaactcaatatttaaaatccatggttccaatcgaggtaggagctagctccttgcgacaagacatttttaacattcaagataatgaaaagaatcaactactttaattagatttgctggaagaaaaacacgatcaagctcagataaaaaatacagcctatcaacagcgtaaaacacactattttaactctaatgtaaaagaaagaagtttgcgagtaagagacttggtattgccaaaagttatgcctaatacctgcaattctgcgcatggggtttttggtgacaactaggaggtcccctatctaattgctgaaaagatagggagtgtaacatacagactctcaaatctcaacgactcagtcttcgatagagcttggaatggcgagcatttaaagttttattatcagtagtaccagaacatatataaacttagccaatttttatgaaaagtatctaagtataggggggatacatgtatatatataccactactttatttaataaatattgtactactgattattcaatgaatcgttttttttttttttgaaatttttattgtgttcgcagttatgtacttagaaaattttacttaaaatatggacaccgagatgttcataatgttaggttttatgccctannnnnaactccatttcaatgtaatctatttt

SEQ ID NO: 115730 - DNA, 997 bp, Cannabis sativa
  modified_base (47)..(49): a, c, t, g, unknown or other
  modified_base (946)..(972): a, c, t, g, unknown or other
tcatattaagatgttaatgaaacatacttgttaataaatctagatcnnngtaaaataatttccaacagaaaaaacaacaaatgatgagagagataaaaaaaaagtagctcttaatactatgtcagaaataacagaaaaaagagagagaatttgtgttgaaaatgattactctattaacaaatgagcaaaaagctctataaatagtttgttaaaaatataaatgaatgtaactaattacagttgtcataagttaactaactaagctaatcataactaactaagctaatcataactaacttaacagtatgataaacctctttaacagacctacattgcattttaggtcgtctagtgtgttaaaggacatatatggcgccgaacacttcccaattgggtcaaatttatgttaatttaaaatatgattttcaaatttaattaatttaaaataataaatctaattaaatctaaatgcaaatttgtgtaatgacaaacaaatcttattgggacaatgaagaagatctagatgtgatttgtgtgtttggaaattgaagaagaaagcatgaggtcaagggcaaaattgtgtgtaggatttagagttgttcacatgattcgtaattcataattcaaaattttaaccattccagaccaaaatatctaagaccggactaaatgaatatgatgttgtcaatggtttggtcaatccaaaaaatttctaattttttgtttgatcagtcaggattttacatttggtacatattagggagcatgatttggcacattttaaagttttggagacacaattgaatacatacactacaaaaaatcttactttagtcacaacaaaatttgtgattaaaagtaaaaaaaaaaattgtgactatctaataataaattatttttcatatgttgtgactaaaaggtctgtgactaaaggtattagtcacannnnnnnnnnnnnnnnnnnnnnnnnnntatttttagtcacaatacttgttgt

SEQ ID NO: 115731 - DNA, 2028 bp, Cannabis sativa
  modified_base (52)..(60): a, c, t, g, unknown or other
ttagcaaatatttataaattgtctgatttacgtgtccctgtccggttggtcnnnnnnnnntgggcgaaatcaggggcaacaaccttcatcacccttctagaacttccgtagatacttgaccgtaaactgccaagtcaaagcctacgtggcagctcctaattggtttatgtcatttaatttttttatttaatcaactatataaaattttaaaaaataaataaaaaatatttaaaatccaatagaaataaggagagttaccttatatattattttttaactttttttttaatttatagtttgagttgctttggtagtttctatatgatttcatgagatccttgtgaatttgcctatggtttgcgagcgacgaattttcttctcaatgataacaatttaaaaatgtgtggccttctcgggactgcccaatgcatcatgaattataaagatcccaagtatccaacttggcaacaagtcccaatgcccgagcatgaagaagatcataattttgtcgctcgcattatttgaacaaccttgccactcggaagccgtcgataccacagatggatggtgccaacatgtctagttaagtttaggaataaccaatataacttttatatctggaattgtgtcgacttaataacccataggtttgatagttggtatcctcagttccatgtttaaacttcgtgcaacaactcattttttggaatcgcgtatcagtatgggacaaacgatttgtgagttgatgagtgggagttgtcgcctttgaattttttgatatttatgatataattgagtctagggaacatagtggtctccttattattgagtctcctcgcattgatgcctcgcctcttcgagcaacttctaacctttctgattgtagtttaggttgaatttcatccttatgtggagaatgtttgtgtattctttcctctctttctttgttttttaaattttacttcattttgccttcgcatggatgaatgatttggagaaccatctttgtagccctggtgtctcggttaggcgaggcaaaaacaaagcgccttcgagatacaaaattcttaaaaatagcccaaggtttccagtaagaacgagactagcaaaaataatgcttcttctacctctagcattgttctagagaaggacaatgttacccttgctgcccctacctcgacccctgaatccgtgagcacagaaaaacaaaccttggggtctagagccaaaccaaaggttatgctattggaccccatttgccctttgcctctggacgctggtatcgagggatcaaaagcctgctcgcgatatctaactcagacatgtcgctattttaggacttataaccaaatgagtggaatctgatcaataatggcgctcccagtgatctcttggcaagaagtgtcgagctcatgcaatcgattagtttttgattttcttgctttatcacaccttttcttttctttctttctaactttgtattttatgtaggcttcttttctggcagacctgggtcgccagaataatttttaaaatttaaatcatctatccatggagccttgcaaagctaaagaacattgtgagtggctcgctagtcaaaggaatgatgtcgaggcgaagtctactcgccttaagaaaaaagctaaagatttggagaagtttgagaaagagttgaaggcaaaggtcgagaatctgaaacaactgctgcttgacaccacccaaaaagccaacaaagaccttgaccaggcaaaagaagatgctcgtgcaagggtcactttaatggccaagcgctccatttacaaggcttggttggcgaaaaaaagcatggaccttagttttttaggtgacgcagttgagaagattctgacttaattttataataaaaactattaaaacgtgaaaaactaagattatatatttacttatttttaaggtgtgatataaaaatttgagtatttataagtaaatattcaaattctatattaatatattttttttatataattatctgtaaaatattgttcaaaa

SEQ ID NO: 115732 - DNA, 2463 bp, Cannabis sativa
atttatgttggggtttcaaatttcaatatatgtaggagttgcattgggagacagttggatatctcctgaagattttgtggtaaaaaaactatgatctgaattctcaatttgtttttgattttacaactatgggaatcaagtcatttcaatgtttgattttacagttttcatggggccctcttcttaaagatgtgtcaagacttgatgataatggatttaagcaatcacaaaggttcttcttttaattttggttcttatgtttttgagtttagaaaagcttttctgatatataatcaaaaaccccatttcaaaaacagtttatctgagaagattaggcaacaaattcaggagggtcaatataaggaagcaacagattcatggggtgaacttgaaggtgttataagctctaacagcaatggagtggtacttatgaatattaaatgtggaatcatttgtatgaacattatatgatatcatgaccttatttcttttcttcttcttttttgttgttgtgatcaatttcaggacttttataactttctattggattcaggaatggactcagtttcatcatcttcaacatcaatacttgaattgtcaaaagagagtgcatacaagagatactcaagatatcttagtgtattgagatcatcaacatcatcatcatcatcatctacacctggtggtgatgatgatcttgatgatttgatgaatggtgttattaaaaagaagcttaagattatcccaggaagtgtaacgtgagtgttatttatttatacattaattaacttatgttttatgatatagaatagttgaaaaaattgtgatttggttaataggtggggaggacaatctgaaggtgtatttgttgctatgcaaggagattttatgagaccaaggatggatgaggtaattatacaaattacaaagtttgtaagcaatgaaatcatttttataataacatataataatatagtgtaggtttacagtatacccttaaagggagagtttcagtagacttttgatctattttgacatttaaatattttttttagtttatattttttttgataatataattattaggactacttataaatttttaagtagtttacaataccaaaaacaagattacatattttattgtacgctcaactgttttttcttatatactatttaaatcttatctttagcattgtaaattatttgagattttctaaaaatttacaagtggtcttaaatagttacaaaatactcatcatgaaataaaattagattagaaaaaaaaatttgaatgctaaaatagataagaattgtattatagaaatttccaataatatatacatatttatttattggtggagaaaaaaaaagtattttaattgattgctatcaaaggagaaagattccaaaataggcttttaatacagtttgacttgttggccaccaaatgggaagaataatttacagtaaatcctacttttatttcttcttcctttgatattatttgttattctattgggaagaaaccaaaaggaaaagagaatataatttcttgcaattttacttatttctcatcattttggttcacatgaaaactttattatctcagcctaattatgttttatacttttctttttattgctatttaggccctacttacctgtttcccaacaattttagctaattatgttgtccagttgtctttcacactttaatttcttttttttttgttttattacattataattttattaattaatttttaagcttattgtcattcattcatacaggttgatcaactcctttctaaaggggtcaatgtgaccatatacaatgggcaagtaagtaattttcttactccttcacaatactatctatggattactcatttgaataaaatgaccccttgattagtttattggctaagctttagaaattgggtttgatcccatttggaccaccccacttgtgatgttaccatttttggctttggatttttttttgcctacttgacaaaattgaagcatgattgatttggattaatatatgaaataatattaataataactcagagaccattttggattaggtgactttcctttattgagccatatatgcactcatatttttagcatatgattcaataagagaaagttactcaattcgagctagtacaagttttaatttactaagatgacatttacttatgagataattttggttaaaagaataataataactccgagattatctcaagttaggtgacttttttttattgagccatatatgcactcatattttttaggatatggttcaataagaaaaagtcacttgatttacaagtttaaatttactaaggtgacatttaattttggatggtgattataggttgatctcatttgtgcaactaaggggactgaagcttgggttaagaagctcaagtaatctctctttctctct

SEQ ID NO: 115733 - DNA, 1585 bp, Cannabis sativa
ttaatagaagaagaaaacttaggaagtcatcctataattaccaatatctacatttatagtgtccaaattttctgtcgatggggacagaagaggattttcttttttcctttcccaaacataatcatacatgcaagttacaactacttacatgaacatatatgtatatatatatatatataaattcaagattctcaaactcaaacatcactgtacttatgaaaagaagttatgttcgaataccacttactctcaattattaacattagtgctcataggtatatgcaagaaaacaacatgttggggcagaataatattctcaatttctacatttgtcaaaggaaagagatccaaatttgctattaagggacagttagccaacagtcaacttccaactgcaaggctcttctctccaatgaccatccatcatttgatgcttaaaaatagccaactaactattttaggcccaaataaataaaactttttcttcctcacttggggggcaacaacttctgtttccttgtatgtaattggacaatttatcaaacatttgaacacgtaaaaaaaaagtaagattaactttctttctccaccaatcaaattggaacaaaaaaaaaagtgactttggtattgagatgctattttatctactacaaaaggtccaatcaaaaagtagaaagtgcttaggccttggctctcctcgaaggcacggccatcaatcttactattatgtactaggtaagaaatattaaacaaagcaaaacaaacgttcatttatggttcacatgttgccatcctattgggcaagccaagctatttttaatgagcaaaaacaaaatattatgatttttgtgacacttggcgaaatcccatttgagagtagaggccattcaaaatgtgttgcacttttataacacctttcgttctaagaaagctcttagaagtatgatggtgctgattcagcaacctaattttgcgaaaggaccctccaaaatcaaaatcttttgtgcgtgtgtgtgtgtttgagatacaaaaattacaaattgccaatcctcgttagctctatctctcttacttttttcaacttttttaatcttaagtttaaaaaagcactgtagtgctgttagtgaaaatctgaatcagtgcacacaaaaatggcttgacaaatcatcggtagagaagagagtagacctaataataataatagaaataaaaataataataataaaaaaatttgctgcagccgtggagacacgagggcttgttgttgttgttgtagatacaatatatatgataatgagcactaaattacactatatactttttttatattgtccttttttatttttaccttttttttaaaaatctattatttttaattctttttgtaaacattgtaccaattttgttcctatcatttcaagatactctctatgtgactctcttatttcagagtattttgaatacaaaacatataaatagatgtatgtttttgaattaaatataaaattaggggctatttacaaaaatatgggaaaataaagataagttttgatatatatggcataaaaacttaattacactaaat

SEQ ID NO: 115734 - DNA, 650 bp, Cannabis sativa
tttaaaatttgtatgcattattatatttttaatattttgtataaaaaaattgataaactaatttataaaacataaatttaaattaattgaatctaaaaatcaaaatatatatgattttttaaattttatttgatatgaaaatattttgtaacattatttttgtgtttctaaaaaaatccaaggatcatagacaagatacaaaagaatcttcattgttggagcagtcggcatcttttctttgcaggtaaagctcaactcattaactctgttttactggggattcgaagttattggatgagcattgtcatcctgccacaaaaagtttcgaaggagattgacaaactctgtaggaacttcttatatggggtaactcaatgaatcagagaaagcttcatttcacttcttgagagaaaatctgtttgcttaaaacccatcggggtattggttttagagagagtcagaaacggaatgtagcaatgatggaaagatatatttgggttttgtccacaaagcaagatagtctttggattcgatgggtggatgctatttatatgaaaatagaagacttttggtcgttcatcccttgccaagatatgagctggtacttcagaaaacttgttaatcttagggataagattgacaaacaggtt

SEQ ID NO: 115735 - DNA, 1293 bp, Cannabis sativa
aatcttaaatttaaagcaagatccaatgcatatataggccgttgcttaaactttacaagaaacttttcacaattattgattctaaattcacaaataaaaactaaaaagaactcagttgtcggcaatatcacacttagaaaaactctaattaagttgatgttggagttataatgataagtactcaaatgatcgtagtggttaattctcatctcatatcagcaatcatgcaaatccctggcccaaacataaatataataaaattaccctttaatctttatggtccatataaagacacagatagaagcctctaatgcatacgttttaaccaaagcaaagtaagcacacacaaaaatacaccagaggcagaagaatatatagaaggagtttaaattaaagaaagaaagaaagaactttattaccaaaatgtaattgggtagttggaagtgcttttatgaagagttgtttgctatatttgattctttaattataatgttggagaaaccaaaggtgtgaaaggaaggtagttaggttaggttaggttacctaaggaagtaattagaaagagttttgtgtgactgtgaagacaataaagccctgaatatattccaaaagatacaccttccctttctttattaaacaacacatcctttgattacggacactctatatattatatctcatctcattttgttacacttacactctaccctttttttaacactttacaacaactttaaaattaatataataattaccatttttaatgcactataggtgatgacttggcagagcagcttatagtaaataactcatgttatttcttttgtggaaaaaataattgttaaagttgtttggggtatatatatttaagtttaatttttagttgtaaaaaaatatttaagttaattttttacgataataatatttaaattataattttagaacttctataggtacctattaagtcttaagtaaattttcacgtgtcaattcttaattggtccaaatcataaaaaaaaaattagtttatatatactaataaaaaattaacacgtggataatgacttaacatttaatggttaagtacatgcagagttcctgaaatataatttatatattattaccgccaaaaattaaacctaggttttttttttcaaccgagagttaaacttaagtatttatatcacaaattactctaactcttatttaataaccactatatattcagggtcggccctaggcatagacggactagacctgcgcttagggtccactcattttaggggctcaaat

SEQ ID NO: 115736 - DNA, 875 bp, Cannabis sativa
acatacacaaatgaatgaaagatacttctgtttctttattgatattgaataatgcggattacgttgaaatagagttttatttagggtataaaacccaacagaattggacctcaaatactgggggcagaagtctttgttcaaaattgtagggcagttgggtactcccatcatggtggatgaggtaacgaaagaaagggatcggctcaactatcctcgggttctgctggagattaaaatgaatcaggagcttcctggtttgctagagtttgatgatgaatatggtatgcttactcgagtaggggtcaaatacgaatggaagccaatctcatgtagtaattgctttggtatggggcatggtgctgctgaatgtagaaagagctcaaaacctaagcaggaatgggtagttaaagatgataaaaggaagaatgttgataagaatcaagttgatgatgaaggatttcaaaaagtgaccaaaggaaaaagtgtggcaaaattggaggttccatccagagtggttactgggaacactttcagtgtcctcactgaaaataatccctctcaagatgaactctccaaggttcaaaacatggaaattagcaatgatgcaaagaagaatgagagcaacaacaagtccaacacaagagaggggggaggtccctctcttgttaatggataaatttctttgttggaatgcccgaggagccaataatcaacaaaacaaaggctaatcaagcaattcattagctctcaaggtgttggttttgttggcctcctcgagacaagggtcaaagctccaaaacttggaaatttgtacctaaatgtgtttgcaggttggtgtttttgttgggttttgtgccctaaataaaacccattac

SEQ ID NO: 115737 - DNA, 4111 bp, Cannabis sativa
ttaaatggtttattttttggaaatcgcaaaaaaaaaaaatctatatcttaaaatgttcacattgaagtggatcacaatgatatatttctaggctcggctcatctaagtaatgatgtgatcgtgatcaaaatcaaaaattatttttaaagtttgagagaagagagataaataaaaaaaaagaaagagagaaaggagggagagaaaaaaaggtatagataagggtattgaaacatacccaaataaaaaaatattatttatacttaatcaagttatttttgacaattagataaaagtaaagtgtgaagtgcaaaattctcctaaaaatcattctaaaaaggtatttggttaaaaaataaaatgttttttttttttaattcgaaagttcttttttaggagaagttaatccaaaagtacttttgagaactatttttttaaatttaagtaatatacgaaaatttctaattgttatacatgtttttacattaatgacacgattacttctagtgcccaaagttagccaagacatgttcattcctggcccaattaagttaatgaatcatcccacaacagaaccaagctatggtttcagatccagatgcaagctcaacttacaggcatgataaagccagaccactttggtccgggaaaggatgtcttgcccagaagatcaaaggtccatcaggacatattcagacaccctcacagggtaatcgaaaaaagggcgaataaagaggcacccagagacattcagaaagcatcctatgtgtcatccctttgacataggacccaaccaaatcagggaccttgtcccctatgttagaccaaaagagtaagtgcaccatcaaaaggaaatcacctttttgtccaacaccgtattctctgacactcattgtaccaacatagcaacacacaacacctgtcatgaccaaacggccccacatgtacggttgaccgctatctcataaattaggtcttacctaaccaacccaaagctattatgaattatattttaccccaccagtgggcctagttgacacctttaaagacccatacctgactcaagtctataactagaacattatcccttcatgcaaagggttagaaaattatttctgaaatcatgggctaaagattagggttcttaaactttggcaagaacactgttgtgtaaaaatacttcaaagcttttccagctcaataatattgactcgtagaataaggctcattaatatcccaattacgtaaaaacccttatttctctatctttaatttacgctactttaaacataagactaagcaccgaattgaaatcctaaggcttaagccgtcagaactggagcctcaaggtgtccagaaataaattcacttagtaagaaattcatctaaagtcacaacacttaaggaatttaaaccaagagcaattatgtgaaagtaatcaaaagaaataaagagagcaaaagaaattaattacagcataaggccctacggttatggtataaaccattgtctctacaacatcaaaaagggaaccttaagtcccccaatgttaaaataacaaaagggaaagaagaaagataaacgtatcagttggattaaagcagggcacttgtatcggtgttgacaaaagcttaaattggttcttgggttggaatatcagtggatggttcttggaccagaagctcaaaagttggtacctctatcgagagtattgcttttggtccctcagtagggggtcaagagatggctcttcagccaaagggtcagtttccaactcaaaagaatactcttctgcctccttagccttggctttaagctttgcttgttatggggaaagaagttaggtgcgcctgtcttcctcctcgtcactaaacgctttcaaagaaatatccttatctctctgccagacagagtagagagcagtaaaaaaggcacctctcaagtcttcgagccttctttcatcagcctttacttactcttccttggcttccgccaacttagttttggtctcttccagatcttgcttcaatccatctttcaccttcatggaggtgtctcaagagtcggtcattaggtgaaggtcttgttccagggtatggacttggccatgcttgttctcgagctccttgttaagatccatcactcgatccccgacatgctttagcttactctttgccaccttcagcttctgttatatcacatttttactcttctccaaggctatgattcaactagttgcatgtccataattgtctatgaggtcctgattctttttggccagcttagagtaggcatcattcatctcctccctacgggtgcaacaactgattgaatgcttctctcaagctgttctttgacatgttagtctacaaccatttgaaattgtgcctacatattttagttttcgatcacaatattggttgtatatgttttaaacagcaccagctcgaatttggccttctcgaagtcctaaagattcttcttttcttactctagctctgttctggccttttgtatgtccactaaggatgcaacctttatgctctcagaagaatagtcttcggctctaaggttctcaatcttgaaagccatctcagctgtagactcagcgcaatgttcaataagtagtgcatcctaaaaaaattgaaagagttgagttagcataaattggccaaactattagcaaagaaggactagtaaaatgtatctggatgctcactgtgatagcctgataacgaagggcattggtgaggtatacaagatctcgattcacaaaaatggtccacttttccgccttcaattggcccatggaagcggctacattttattaaaaatattattctttaattttttgtatttatattaaattgtttcacatttaaggcatagaagttataattttaatgcaaagatttttttttagaaaataataagtttaattactaattaaattataagaatcaatataaacataatatttgtatatacaattaaccggattctgaacccttaataatatccccaaatatcattgaaaatatctgttactatcatttttactgttaaaatagtttattttattttgttaccaaaaatctcatcattttcggaactaggttagaattttaatagcttagattaaataagtattttcttcgatctcacgcaattcccatgggttcgaccttgttcttcacaatctctacactataataaaaattcgtgcgcttgcgagttgataaatataaaacgtactatttttgtcacaatatatactaataaaaatatttacttctttttacgattcagggataagaagacatacgatgcaaaaattgagttgttatcgttacaatgtcagtagatataacaattacttgcggtgattcacgaagacttgcagtgatgctaaattgtataagaattttttcccctatttctctatgtttaattaaataacttataaattttttttctttatttttctatgtttagttagataataacttataaacacttggactaattttaatatatttgtctaataaatttatttagaattatgtatatatatacatttagttatatggttaatttactttttaattatatgaaattaatatttaatttaaatacattaataaaattaaataaacaaaaatatgctaaaaataaacaaaaatatttgaaaatctaattgttaggagaccccctatggtgttagttatttgctaataactgacgccatatatgcgtctaaccccatttctccacttctatgtcattggttaacgacataggatttccttatatcgtcggttaatgggccccctacagcgtcgcttggaacattgtcagtagcaaattttgcaaaaactgcactattagaaaaataagctttctcttcagtttttaagctggtttatcttcaattaaaaaaattctcgctaccgaagacatttgaggcaaagatgtaggttccaaaaaatactaaatacgtatgggacctatgtcgtcggttatttcaaaaaaatcaaagacataagctacctatgttgtgacagtcagagtcccgtgatctgaaggggaaagaccgggagctgtacaatcccac

SEQ ID NO: 115738 - DNA, 1623 bp, Cannabis sativa
cataaaccaagaatttcagttatatagacacactttatatagaatagatataagtaattaaaattttaaatttgtaaacatgataatgtttaattttagctacataaaattataaattttttttttcaattttgttatgttttgaatttattaaaaaaaatatttagaaataactaaaggtttttatctaaatttaataatttaaaatttaaactttatatgtattatatttaagataataatagagtttatattaacaaaattataattttaaaaaagtatttataacactattattattattattattatatataataatagagctgtctctgaaactctggaatcaaatcaattatatttgtggcaccaaatggaggagtgcacactatcgaataataataatagaggaaaatatcaaagttctattattggcacgttatggcttctttgatgcaatgtaaccatgttcattttttttatatatatatatataataaataaatatattttgagtataaataaatttattactgtctattaagttgtactaattataacttttttataaattttttaataagttactttttttactatttattgaatatttttttatcacatttttttttaaaaaaataacttttaactttttaaaacttattgattaatttgggtaattaaataaaataaagaagaaatctctgtaatcacaaaattatttactaaatatctaggtgagatatgtgtgaaattaagaggccatctttaaaggtgtagtcagttttcagagatgtgaggtgtacaaataatgattaatcaattccacttatatacattttgattaaattatctatgtatctatctaccttatctatttctcataaatatgcgaaagctctatttgtagaaaaaaaaaaaacaaatatgacaattattggattccatatatatgtgttcccttttcacttgcaccaaaacccaaaaaagaaatatcttcacacaatttactacaaatatgtgttaatttgtgatgttagttaaatattacttttaaatattaattagatggccattgtatatatctgtatatataacagtaaaatcttgaagtcgatacaatagggttccaattaatatttaacagtaatatctaactaaaattttaaatttacaaagaaaaataaacttaaggggattttgccataaaaaaaaaatgataaagagattaagtgtaaaaaaattaaaacataaagggtgtttttccacaacaataaaaaaaaaagaattaagtgtataaaaattaaaatataaagaagtttcgctgcaaaattgctcttattttttatgcatctacactgccccgactcataaaacttaataggatgaggcgaaaagataatgagacagggcaaggctgaccgatttgttactggtcgagaacatttacatccctacaatgtaacataaaagttgaaggtaaaataaataaatgaatttttaataagattttgtaaagatgaaagtagataggaataagttgagaattatttttttttattacacattaattaaatataattttaaaataatttttattgataaatagatcggaagagcgtc

SEQ ID NO: 115739 - DNA, 919 bp, Cannabis sativa
  modified_base (871)..(881): a, c, t, g, unknown or other
gctctcatctcatccaactattcaactgaactattgccttcaaccaaatcaaacctaattttctgtgtcagacaactagtagacgagactctcagtcatggaggacagcaaccacaacaccaacaattgatcttgcacctcccaattgatgaagatctggttaactctattctgaacacgatcctcttcaattaagaactcagctggaggttgttctttgatgaattttaggagacgatttcctctaatggcagcaagaccttgttgtttccataagaggaaattgtgatcattaagacgaattgagatgttatgattgaagtacactggttcagtaggaggttgagctctggtttgagtagcttgagctccattgaaggtcgatccattgttggagatcccagcagcaccagcagtggccatattaacattgagtggaggaaaatgctctgataccatgttaaaccttcgagccatgaagaatgcagaacaagaaagagaaggaagagagaacaaaaaagagaaaagaacaaagagaaataattggagaagaaagaaaatctcattgaatgaataggagtacaccgtatttatacaccttcatcaagcttaactaactaacaacggaaaaggaaaaggactaacaaccaagacagttggcacatgaaaataacagaaacagttacaactaactaactgtcttaacaccctagtatacctgaagtactttgagatccaaacagatctccaacaagtatttggaaatgtgcgatgtcgaatcttttcagaaactctatctaaagtagcccaacaattgtattttgtaacaccctaactagcataggcgtgtttacgtgatttttaaacgtannnnnnnnnnngttgctaatcaacgaggtttatcgaaaacgtgattaat

SEQ ID NO: 115740 - DNA, 2157 bp, Cannabis sativa
gagagagagagagagagagatgtacattgctaagatggtaaagagtgcaaggaaaataagagaaagagcataagctgtccgggaatagccataaggtcttctttgtttacaacaaaagtaacatagaaatatgatagataggcagagtccaaagcccaaaaaccagatgacagcaatggcaaacaatgggactgcagtgtaacctacagactgaatatccaaagaatacttagatacaaaaaagagtagccaaaattgtaagatgaacacacaattaaattgttactacaaaaaggtaaaatggattaatgacttggggaaattttctaagtaattttaaaacaagcaagcctctaaataaaaatcttgccgaattattgagattgtttgatttaaggatgtttgtctaattctgttcaattttactaatggacccttgatgtggacgaaagtttgggggtacaatttggtgcgtggacagtcgccacattaggcatcacttagtaaaattgaacggaagtagacggaagttcttgaatccaacaatctcaatctcaataattagtagagaatttttaacgacctaaaaaatttggggagcataaagtttagagaaaaaaaaatattaagtagcctaaattttattggaataaatatcaagaaaacatgttctgtaatcagagttgtaatatcttggcatcttcccgagcaaaaactcaaaaagtatttcaacttttcaagggctaaacaaaactgtaactcaatcaataaccaaatcgaggtcttatttattatttgatataattatttctaagttggtcaatagctgtaacagaaaaacaataaaagataataaaaaaggacatgagatattattagagagtgtaaatgtacttacagcccagtaatggtggtcactaatattccatcctctagtgtacaacttcaacccatcaagtggatctttccggcgtgttcgctcagcagctaaaacaaccgacgagtaatcctccacaggagccataaagggtccttccacaaacgacattgtggggctttttccccacaacttctctgattcccaacctaaacacaaaaatatcaagccattatttttatttagtaaaacaataacaatcctggattggaaaaaaaaaacagaaaatgtgacctgaagaagagggtgttggggatatttgaaagtagtgaaaatctccatgagaaaagggaagatgaagaagaagaagaagtagtgttgtgagaaatgttaggaagagtgaagtggaacttgacattgttgttataatgaatgagttttaagtttgagaatgaaagtaagagtgaggcagtgagctaagctaagagtgagtgtggtaactggtaacggtttggggtaaagtgggaacagagggagcgttggtggagacgaagtccaatgattcccatgctcattttttctctctttcttttttgactttacttcaactggtgtcatatgtctgaaccaattgtgggatttttttctcctcacaataatttaaaatactgttaaactctttttaatttcagacaaaaacaaagcaatattatataacaacattaatgtgtgtttgtagaaataagaatgtatttctattaatgggataaattcgattagacatgtgtcgtttttagagttatatactctcttgggaaattttttttgtcaaagtattgaaatttagtggaaaatcttccaattatatataattaaacaaataatcgtactacattaaatactatatttattattctctcaaaaaaaatactatatttattattatgctattatgttattatgttattattacgttcctctgtatcaagtttctatttatggcaggaaatgttaggtgtgtataaattggtgggattagacacactgacaaaagttacagcttaattcatcaattaatattattagacgagtttaatataatggatataagatagattatatatagttttttttttaaggaaaagattatatatagttcatacatactaaactcaacaagcgatacataattctaagattaattagaacttttttccaccaaactttgacatgtaataaatcatactccttgaatttttttttgcagttaaaaattctcc

SEQ ID NO: 115741 - DNA, 3217 bp, Cannabis sativa
  modified_base (3150)..(3186): a, c, t, g, unknown or other
ccgtagccatatgagttgtcatttgggaagagagccgcatctacattaatcttgagattgttaattgcaggtggtgtccaaagctcagccccatcatcactatttccaaatgatagtgataaaagagcacttttatcttgagctttcctccagtgatcaagagtaattgaagatgtagccaaaacttctttaacagttgaagtgcgtttattccagacaactttgttgcgagctttccacagagccctacagaaagtggctgctcgacagatgaaatccttgtcatctgtgtgctgtagcagttcaaaccaatggccaaaggaaatagaaagatcagtttcaatcggccagccaaaaaatgcccagtaggatcgagcaaaagcacaggtgagaagttcatgtgttgttgtttctgcagcagcattacagaccggacattgagaggagattggcacatgttttgtgactagattaacacaagtcgggagtgtatttgcaatggctctccacagtaagttcaggaccttgggaggaagcttcagatgccagaaatttctccaaaaaccagagttattcggtcgcacaacaactggtttttgtttctgcagcagctggtatgcactctgtacagtgtattttccttgatggtctgttgtccatgcccaactatcaggtctagtgttgcggccaagaggcatggataagattaaatcggcctcctctggaaagaaaaggtcattaactacctcatcatcccaacagtgtgcatttgtttgaaataaagagtggacattttgattgatgatgccaggatgattagaagtaatatacctgttgttctaagatggtagccaaggaaaacccaatatgcttgtttcttttccatcgccaataacacgagcagcccccaactgaactaggtcctttgcaccccaaatgctacgccatacaaagctcgggttatttccaagttcagatgaaaggaaatcagtacaatttggaaaatattttgctttgtatacacggccggcaagagattcaggcttacacagtaaccgccatccttgtttggcaagcatagcaagattaaaatcatggagatgcctaaaacccataccaccttcttctttgggaattgcaagacgatcccatgacatccatataatacctcgcccattacttgattttgttttccaccagaaactagccattagtttctcaatctcgttacaagttccaatcgggataaggaatacactcatagcataagtaggtagtgactgaattactgtcttgagtaggatttcttttcctgcacaggacaaaaatttgccatcccagctgttgatacgagatatgactttattttttatgaacccaaggacagcatttttatttcgaccaacaatgtttggaaggcgtaaataaaaactaccttcaagagcttctgacatttgaagtacagaacagatgtatgcacgggtagtagcatcagtattaggactaaaaaagatggatgacttggagtagttaaccttctgtcctgaagcattttcaaagagttgaagaaggttggtgatgctgtcagcagccccttgtgtggcttgactaaacaagtaactgtcgtcagcgaagaacatatgagttaaaggaggcgcacgttgagcaactttacaaccttgaataagtctgttagcttcaaatttctgaatgagagcagagaggccttcagcacaaataatgaacagataagtggagagggggtcaccttgacgaattcctcttgttggaaaaattggatcaaggacacgaccattatgaacaactttgtaccgaaccgaagagatacatgccatgattagattaatccattttctagcaaatcccatccgagccatcatagctgcaagaaaactccattcaacacgatcataggccttactcatgtcgagttttaaagccatgaagccttttttgccactttttttccgcttcagatagtgcataacttcaaaggcgaccataacattatcaaaaatgagatggtccggaataaaagcgctttgagtttcagagatgatacagtcaatcaagtccctcattctattagccaaaactttcaaaatgatcttgtaaagaacattacacaaagatatcggcctcaagtcactcatcatagtaaagtttttctttttggggatcaagacaaggttggtatcatttaatccttcaggtagagcctcagtttcaaagaaattcttcaccaaattagtaacatccgaactgacaatatcccaatgatgttggaagaagccaggccccatgccatcaggcccaggggctttgtcggggtgcatagagaacactgccaattttacttcttcatcaagaatcggttgcaaaagggctccattgtgagatatagtaacagagcttctaacattatcaataatttgaggagaaaaagaacccatggacttgtagagactttcaaaatattgatttattactgtagcaatctctgtattccaactctgccaattgccgtgaacatcttgcaattggtggatttggtttgatctttttttagcactagccgtagcatggaagtatttattatttttgtcccccgaatgtaaccaaaattgtttggagcgttatttccaatagagttcttgttgcgctaaaatctcgaaatagttgttcttctccaccatgaagttttcagcatcaaactcattggctgaatttttgtactgagcaagaagcttcttgcttttcttcaatcgggatttaaagttcccagtagtagttcgaccccaatcagcaagatgcttagcacacatcgcaattttccccataataccttcagtcgggttagaataccagacattcgacacgatttggtggcacaagggctctctttgccaagcattttcataacgaaagagagcagtagtcataataccagcagtaatttcagggagtaaaaataagggggagtggtcagatgatgaaaaacaaaggttagtaagagatacctcattgaaaacatctaaccaactttgagtaaccattgctcggtccagacggatttccactgcattggttgtccctatgttaattaaacatacttggtagtaaatctannnnnnnnnnnnnnnnnnnnnnnnnnnnnnnnnnnnnccatggtaatgatttactttcacgtaatatg

SEQ ID NO: 115742 - DNA, 2244 bp, Cannabis sativa
aaattaaaacttttatattaattaataaactacataatttattaaaatatttacaagtgtcgggatcccgttttcaaactttttaaagttaatatcccaaagtacaaatattacaggtcgcacaacgattacaaaatacaatccccagatgtcccgaggccgaacactccaggccgcgctgctttgttagccaatgcaatctacctgggtctacccttattcaaagctgcaaaaagaacgaaagattacacccaactcattgataaagtcttgggtcgagtcaaaggttggaagacaaagcttctatcaagcgcgggtagagcatgcttaatcaaatctgttggctcccccttgggaaactacttagcttcatctgattctatccctgcctctactgctaataaaatagacaaaaccttaagggaattctggtggggtgatacggatgagaagagagttatgcacacaattgcatgggaaagactttgcaagccaaagaatcatggaggattgggtttccggaccacaaaagacacaaacatggcgtttttaatgaaatgggcttggaaactcctcgtggaggacaatagtctctgggctcagattatgaatgccaaatatatgagaaacaatgccttccttgatatcgaagctcaaccatcgaactcacttatgtggaaagccattctcaatgctagacaattcattcacaaaggaatttgtagaaagattggaaacgggaatggtacgtccatttggttccacccttgggtcccgggaggagaacttcaactaaaacctctgagagaggcaacataggggattagcatggtaagtaactttattggggacaataggtggaaggaagatctggttcgccattggtttcaacaggacgatgccaaacgaatactaaatataaccttgccaaactctcctgtgaaagactcatggctctagctaccggaagcaaatggacaattcagcatcaaatccacctatagaattaccaagaatctcgagccaaattccaaggacaatgagaaatggcgactggtctggggcgccaaaatacatagcagatcaaaaatgatgtggtggagaattttatcagactgccttctcacaagaagcaaactcctcaaaatcttcagcttacaggatccctattgcccactctgtacaatggcagtagaagactctctccacctcttctaggattgtcatgttgctagagccgtatggtttggaagcaactagcacatcaagacaaccgagaaccaggtcacagattggagtcaatggataaacaggttcaagcaaaaggataaaagacctccgaatctcacttttgacactcttcttgaaggagcagctataattatggaaagaatatggaacctgaggaattatacaattcataaaaacactctaactccgattaatattattgtgcataacatcaattccaggttagctgaactggatgaaaaacagtatacgcaatatcccttccaatctgaatggctccccctcctaacaattggagaatgtgcaacacagatgtagctattggcaacaggtgctgcagtattccgtaatgaccagggcattttaacaagtgtgttcactactaaacttctttatagttatcctcttgctggagaaattgcatctctttgttatggtgcggaagctgcgattcagcttgggcttaagctggtgattttccaaagcgactctgcaggggcggttgatgctgtgaagtctaataatcacaacaattctaaactaaaccataatatcaaggagctcgttgcaaaattccaggcattggctgagcagctagacttatgggaagtctattggatacctcgaaaactcaacggtgtggcccatgatttggcgcaatgggcagtccgatctagcatctttggtagaataggattgcccaattttgacagctccctggcgagtgggacggcggatggctgatttatgttttgtttcatttctggtttatgtctgttatgtagtagttactttacttaggcgtttgtttatgttttggtttcccttgtgtttgccgaactctgttctgttttgttgggtgcttttttgggcaggttttaataaaaaaaaaaaaagcatgtacatattatatatacaattatttttgtaattttatgatttgattattttaaaaaattgtacttaatgtattattattataatatattttaa

SEQ ID NO: 115743 - DNA, 819 bp, Cannabis sativa
aaaaaaaaaaaagataaaagacaacgaacatctaggattaaatctggaaaataagataaattcttagatgtagcattcaaggcatcaacaactcggagcgcatccgtctcaatatcggtgatgtgtaattgctcctgtagtgcccaattgagactgtagaaaagaactttggcttccaattcttccgaacaaaaacaaccttgtactaactttaaaagggtagcgataacacaaccatggtgatcttgaactattgctccaacacccagtgttctagaagcatagttgagggttgcatctacgtttagtttcagtcattcacagacggtggctgccttgggaaacaattattatttaaaataataattattattacttttttttaaaaaaactattattattaaaataatttgttacaaaagctttctaatatatttatttataattatttgttatttacatcaagcactaattaaaatcataacaaattaatcttacctaatatataaatgtctatcagattttattatgaacttaacaaattgttatgtatttaacagaagataccatttaaaaagttaactttaacagatacacccattccattccaagtacagtcaaacacccattccattaacaaaaaaactattattaacgagacactctccctcagaaaagacacccattccatttacaaaaaaaaaaaaaaaacccattattcacaaacgagagactccttcaaaaaagacaatcgtggttatctcaataatacccaacaaactcaaatcaaataagaagtaatttaaaaaaaaaaaaaaa

SEQ ID NO: 115744 - DNA, 1472 bp, Cannabis sativa
  modified_base (1421)..(1433): a, c, t, g, unknown or other
aaaaaaaattaaactaaaaaatttcgtgatgtacgacagccattagatgagaaagttatttgatctgagggttggggttgatctagaggtaattaaggttaaaaaattataacatattctgagacccatctaatgtaccacggaatacattacgtgaaagtatatcacggaacaatatcgtgtctcaaaatatatatatatttatatattttattatttatttatatattgctaaacatttacatgtagatttatatataagtgggaggaagacacttgttgtggtatgcctttgataaagtaaactcttaattatattaagcgacaaataatgggtgtgacatgtcagtatctgaatcatagagacacttaactttgttttcttttctttttggaaattagaaagaaaataaatacacaaaaattaaattcatataaaaataattgaaaagtaaataaacaaattacaaaataaaaaataaaaccccccacccacgtgtactttctataatgggttgggttaattatgatggaaattttgagtttctttggtggtaattaataagaataaaaaagcaaataacaagtacttataattttaattttatgagggtataaatttaatattttgtagtgaatataagtatttaatgtttataaaattatgttttaaatttattaaaaaaaattaaaagtaattgatattagatgtttctatgcagacgaaacaatttaaaattttgaccttatatatgttctcattaaataaaaaatagtctagtctatgacgaaattagaaaaaaattatacttataaatattacatacttatgttgctaaaaaattattaaatttatgtcatttaaaaagtcaaagctttaaattgtataccctatctacccaaagaaaaatatattatcaccgatctaatgataggaattctttgctttgtaattgaaggtaaagattcaagtgggatcaaagttaaaatttgtatatttgtgtatatgttaattgtgtatttgttcctcttttgtagtgtttatctctcaaagtagtagtgatgatattcttccctctccttcgttgagatttcactcttatttctcttcataggtattcttgaaggattgtgttgggttggaattaattgtatttagtggctattatcccaaaaaaaaattggtaagatgaagtgaacaatattttcagcacgtaacacctagaatgattctaaaaaattatcaaacgactccaaaaaatgatacacataagtactgcccaagcagggtaggggcacccaagtccaattttcccaatagttgatttcaggcttatttccttcaacaattcatctataagatcatgaaaatacattgacatcaacaaacatatccataatagtgtgacagtcagtagtcnnnnnnnnnnnnnggggaaacaccaggtaagctgtgcaatcccacaccgcct

SEQ ID NO: 115745 - DNA, 3465 bp, Cannabis sativa
tacttaatccaattccctgtggtttgacctcacttgcgtgagatactacttgattgcgtacacttgcgtaataaacataattttcgtaacaaacatatccatcaagatcgtaagctcgaacgactaccagagcaagagatctccaaatcgtgtagttagttcgatctagtctcagatttatgggtagcacggttgttgtttggcagagcaagtggtgcattcctttggttttgttgttgagcacgttcttgctcaggtggatccactcgacattcaccattattgagatagctttgataccatgtaagaactttgaaaaatagagtaatggagcagaaagagagagaaaaagggaagaagaaaaaggatgaacgaatagaatgcttaatcagaactgattggctttactgttatttatattgaaataggaattacataacagagttcgttagtaataaagaaagaatgaaaatactctaactaactttctattaaagaccagtttagccagactaacttactaaagttaactcactaatctgttatataattccaacaatatcccaacaaaattatttagccaatgcttatgcatacatacaataaaattatacataaataaatgcataaatcgcataacataaataaatgcattgaagctaaaaaatgcacgggcaaaattattgaaaggaaaataaaattctaagttttagaaaatctaaatttaataaacaaaatcaccaaatcttcaattaattcaacaaatatggctctggtaccaattattaaaatttgaaaaacattccaaaaatacacagatttaattatatttctaaaagtgctttaatatagaaaccataaatcatattttatagaacctttgctaaattaaaaaagaagaatatgaatacaatggaagtactaacctgaagctattgtaggagaatgtataaaaaattatgatattattttaagaatacattatttcttttatgtattaattttctctaatggggaaagagagaatacaagaatcttagtggtttttggagaccactatagactcatcataaaatgagttttaagtatttataatttgatccctcaataaattataaattaatttatgatatttacacattattttcatgataatttagtactcttttttatacctattatataattgttcacttaattaattttttatcatactttacaataatatatacattatacatgcccataggattttaatccaacaaagtactactactgtatgtaatattatgtgatttatgtaaaagtttcatgttaggtttttgagctccacaagtaccccaaagggcaaaggccatgaatacaaaaatatatggagtgatggaacaacactataaatgagaatatatgtatcaaattatatatgtacataaatatagctcttcgataaaaatttgatcccacttctttgcctcatcaagaatatatccatttttattgaggtgacctttgaaaatatagagcatatatatgacacgtagtagttgcagaattttcagccatttattccaaaacgttatgtgattgcatacgtacgtaccttagaatcttcacaaaaggcccctcaatatatatgtggatatatatatatatatatagatatatataactttgtttaattatcaatacatatgtcacaactttatgtcaaaatattaaactacttttaggtgcaccacccaaaaataatacttttaaaatttaataatatttacatgcactttctctaagtattaatttattgagttataccataacactttgttattttggagcttataattaattataataacaatgccaacacaagtttatatatgagtaatactagtatatatatttatagctagcatatacgtacataaatatatatacatttttagactcataataaatatatatattcatttctgcacaaaatgtagtgacatgtcctaattaaagccgcctttcttccatcacaaaatcaagaagatcatcaaaaagatgatgaaatcaagattgaagatcaaagttaattaatctaataaactaaaagccttattacattaacataacatatataaatatataattaattatatatataatcaaagccaaatagcaccagcgtccttgagcaacttcttgagagagccattgaggtgaagggtcatgacggtgttggctgagccgacgaacttgccgccgatgaagacggctgggacggagggattgcagccgaggcgcatgagggcccactccatgtccttgcctctggaatagtcctcgtcaagctcgtatattgctgggctcactccttgctcgtagaacaatctctttattgcatgggacatgcaacacgagctcttgctgaatatcaccactgccttctgcgatgccaatttccccactagatccatatataatataactaatgcttttgtttatattaataagccaaaaagtggtgaaagagatgtataatgtagtagagaggaagctagttttgctatatggggaaattagtaatattatagtgattttggttttggttgttgagatgaaattggacttgttatgagatttatatatatagagaggatgaaaggataaacattatatattataatatatgcatatctttttgttttgttttcttcatttctttgttaataaaaataagaataaaaggaatggattggaaaagttgaaaggttcgtttagattgattcccaaaaatgccctaattgattttggaggtgtggagcttatgctataggaagcaagctttagattttattttattactttttttctttgtgctatcatatgagtcatatagagaatctcttatgtatgagaagagagtagataaggccccaaaacgtatttttgccgaaagttggattgtactatctaagtatggaaaaagaaaaagagtaagagaaattaagaaaaaaaaaaaagggtaaggtacggtactaaacactttttttaggaggacgaaaatgcccctggtgaatgtggagggagaatgtcaactttggctatatagaaatagcagagaattaatgataacatgggaatagagaaggtgatagattcagagacgcccttgcatcacaaatttatgcatgtaattaattgtcctttgaattgtgggtatctcattagcttgttccttttaattattctttatttatttcttttcaaaaaattaataaatgcatggtcgttcaacaaaatttacaaaccgcccaatccgaataaatcgcctaaactaaactgaatgaaccgataaaaaatacaacccgaaataatacaatgaaaatgcaagccacccaatgaatatattgggtggtttacaaattattctaaaccgcccaattaacccgatttatatatttttatagaagtgtatat

SEQ ID NO: 115746 - DNA, 1347 bp, Cannabis sativa
ttaaaatataatttatttggtcccaagtgtattcttgcatagaggttctactgtattataattttttttttaataaatcataaaattttaataattgtaattagctaaataataatttacaatttaaacgagactggattggagacacgattaacattaaaattaaaaaaacgaatcaaatgtgcttaattctttgatcgtttaataaaaataattcaaataaattcaaataaaaaatgttacagcatcacaattaactttaagaatacatatattatgtttcatctaccgctcggaagctataacagtagaaactgttgcagcaggttcattaaatctcatagcttggagcactcaattattgtgtaagatacataactgcactactaataattcttttagtcgcagaaatttattattacctaccactaacaatgatttaatggtgaaccatccaagaacaaagaaaaaccaacaacgaaataaaaccatgtgacacagataagattaaaacactcaaaatcatgtcacaaaaacaagactaatcgcagtaacaaaaattaaattgtagttgcaaaatacaatccagactaagtcgtacctaagttcatagaagacaggtaggcttgacagaaaaaaaaatcttcgttaactataaatttagttaaacaaaaataaaaaaaaaaaaaaattatttaagtgaacaaatatgaatttaatattataaaattttagttaatggagaaaataaaatgtaatgaaatttggttatcctaactgaataatcatttcccttatttttttttttatcaagaacaaaggaattttattaatcaacccaacaaattacaacctcagtgaacttttctaaggagaaacaacaagaatacactactaataattacaagtcaatctttgaagtaagtttttctccactcttctccttatctttaatcaagtaaagtctatatttcatattttttttttaattttgttcactatacaattgacagtatcagaatagtgagaaaataaacaattatttcgattcctctaaatatgatagatcgtggctgccaacactagcacccttattatgtcagtcaagctcgacctgatattgcacagtcacaaattccaactaacaaaaattttggactagccttcaaaaaacaaccaatgaaagatcgcactcaacacctggttagacatgttgcaacagaaaaaaaaaatgtgttgatggctcacacagttcatgtcggtgacttgaatgttaaaccggcttacactacaagaaaaccatcttttgccggcgcatttttgcgccggcaaaagtacaccaagatc

SEQ ID NO: 115747 - DNA, 3541 bp, Cannabis sativa
tatttttatcgtcaaaaatacgacttaggtatttatctgctactcggcataaaacttaggtatttatgccgcaaattactctttaatatttggttgttaggaacttgtcatgtgtcgtccaacctcttttcctatagccacgtgtcatcctatcagtgccttaccactcgagtaatttttgagatttgaatttatattttatttctaaattttttaatcattaaagtaaaaaaggcgaaatgtatttaatttgtatttagttatcaactatactcaacgtgtcattcatttcacgataaaattgaataaaatatgatggaatgactatgtcaccgtaaaaattatattctgaggagtattatactgagtcttatactataggggcataatttggtagtataaaaagtttagaagcaaaaatgctaattattctttatattgagtagctaattacgctgcaaaatcttaaaactttatgattatattaatacaaaacacaactacctaagaatgagattatttttgggaggcaaacagaaaaataaatgggtttgaataatagtacattctcaatcaagcttatgattaattatctatattttttgatgttttgtgagaaattagtcttggggattttgtgtatcttaaatccacagttggtataatgcctgtttgagtgccatcactatcattatcgatctccccttctatgctcatgaatccttctattcttgctgatatcaactcccctttattataccttccatctacacacatatacatgtataaattataaaacacaaaatgtacttaaaatcaaaatctctaaaactttcaaattatacaaaagatattgaataaaactcctcacatttataccatttaattaattaagaaactaattttttctttaccatactagtatacagattattattaaaacgtttgtctttgaaacaaaaaaataaattatttgatttttctaaaaatttgtatgagatttactataattatactattaattaaaacataatcatgtcctagtagagtatacaataataattttgtattcatttataaatatattttatttttacaaagaaataaaaagtttcaatatatttattttttactaggattgtagttttccatttattaacatatttatataatttatatatgtacctggaggtgtggtagagaagaaccaaagaataaaagcacaaaaaaggagaacaagaggaataagatggacagcattttcagccaacttgagacgagccctctctttcttggccatatcacccatttgcatatcatacaaaggaagttgctcatcctcctcctcaaacgacgacgtcgttctcattgaaggcggcgactgaactgtgttatactcatccgaaactcggttccaacttgcagatctatacatgttcttatatatttattaataattagttactgcttctctctttaatatgttaattatatgtgtaatacttatgaaatagagaaggagttgatgatgatgatgattatgaaaaggtaggagtaggattactattagtgtaatttgttcaagagagaaaataaagtagtgatattagggtggagagtaaaaagtggctggaaattgggagattttattgataatattgactgtctttttttgttttggtttattgatatgtacgtgtttagattagttcattatattatgtctttataaattcacacttttaattatcctttacattataataacattttttttattaccatatacttttatcaattaatatttatttacgtacacataaggtattagagttagtcccacattgttaatgtatggaaataaattgtgatatataatataaatgaactactctctcacattgccaattaattttaagatgaatctcatcttatcccaaaattctaacataacaaaaaacttgattacctacttatgatcaaacctggccaaaacatcattacatttaaagtcctcataaaacacatctaatataaacttgatttaaaaagactagacccattgtataaattccaaacaaacatatatgctacaataaaagtactaagaagatacaataatgtataaattacattcgttaaaaccatctcaaattagtttatttgtgtaatcacatctaaacttcatatatatcatatggattattaaaactaagtttgaaataataaggcctcatggaagacctcctcaacaaacatagttcaaagaacaatcctgcaattaactcaaccaaatttgctactaccacttcaaatcttaacgaaaagaatatcgaacttaatataaagactaaatctaaaaacaaccatcttaaattgataccatccatttttattaacccagaagtaaataacctagttactaatatttctattatttattaaaaacgaccagaatacctcgaataaattgtgaaaatttgttgtatgcttgctgagcaattgtttataccaaaatgtggtacactttatatttatcaactcgcaagtgcacgacttttatattgtaatgtagagattatgaagaataagatcgaatccatgaaaattgcgtgagatcgaagaaaatacttatttaatataaattattaagctctaacctagttcaaaaaatgataagatttttcgtaacaaaacaaaataaagtatttaacggtaaaaatgacagtaacatatattttcagtgatatttagaaatattattacgggttcataatccacttaagtatataaaaataattatgtttatattgattctcataatttaattagtaattaaagcaattattttctagcaaaaagtagatttttcttcattttaaaattataatttctaagcattatatgtgaaataattaaatgtaaatatgtgatcatagttgtaaatacgtgtgtgtcgtgttagcttggtttatatttttaagactttttaaaatacggatcgtgtcgtgtcttccaagaattttataggataggtccgacacgacccacaagttcggtaattttgtgtcgttctcgaattcgtgtcgtgcttttattcaggtcgatccctttttcttaaatagatcaacctgtttcttatacaggatcaaattcgtgctctatatttttgtatttttattacaattgatgagttaaatcttaaaatatgtgtattgtatagttttaattacttttataccttttttcaataatagttacacacaatcatataaaaaataattataattattataatttgaatattgcttttattttaatattagggtttataaaacactcaaaaaatatatataatcacagatctaatcatgtttctaaaagtgctttagtataaaaaatcataaatcagagtttataaaatatttgctaaatcaaagaagaaaaatatgataacgagatgtgtggaagcactaacctagagtcattgttggagattgtacaaaaagttatgatctttcaagaatatactatttctcta

SEQ ID NO: 115748 - DNA, 3711 bp, Cannabis sativa
acatattacaaatattgattccgattatttttcatttattccgttacatttctccattaatttattacgattttgaatactgtatagtaaacgtgccattagctttagtaatctcagtttagcgggatcaacttatgtttagtcactattcgtggcgttcttattggtagggcattacaaaactcatctccgagaagacgacaaaaggattatggaaaaagttagaagaattatacttaaagacatcaattgctagtaagattaatttgctagaaaggttatacgattttagaataatttattccctttctttagatgataatattgacaagttaatgagattattgtaggattggctaatataaatcacaagattgatgaagaaagtcaggccatcctttttttgagatcgctcctaatcacatatcaagaagttaaggctgccaccaagtatggcaaagacataattgcattggaggatttcttgacgcactcaagtagaaatatttcaaattacaattggagaaggaatctaagaaaaaggaagtgcatttagcaagaggaagatcacccaggaaaggaagtttgaagagtaaacaccatcattctcaatcaagatcgaagtccaaagagaaaaaaaactcgaaagcgttacttctgtggaaggtctgaacacttgcaaagaatttgcaaaagtacaagggcaacaagacttcaacaaatctcatattagagataggaagaacaataggcaacatcaccacatgaaggattcaactgtagtcgtagaaaatcgtgacgaatgctcaacagatggggatcattgttctctatcttagaatctttgataaataggaagtggattcttgacttcagatgcacttatcacatgagtccaagtcgagagtcattttttgattatagatcagatgatggaggtggaatcaaggtgttgacgaatgtaaggcacattccggacttaagatgaaacatcatatccctgagtgcactttaagataaagattacagatacaaatctatgcacggaagcttgagaatcaccaaaggttcgcttatattgatgaaaggtgaaataatcaatggtttatatgttctcttaggagaaattgttgcagtcggagaagcaagtttaataaaagggctacaatcaaatatgcagttgtggtatcataggcttgggcatatcagtgaacaaggcctcaaagaactgcacaaacaaggtataattgaaaatttaaattcttgtgtcttatcattttgtgaagcttgtgttttagggaaacaacataagctgaaattcacttcggcaaggcacacaactaagaagatacttgaatatgtgcatgttgatatttaggggtcatacaaagtgtctactcattctggtaagcaatattttatttatatagttgatgattatagtaggtgtgtttggacctattttctagcaactaaggatgattgtctgaaacagtttagaatttagaaaactcaggtggagaaccaaaccgatctaaaagttaagaactttaggacgaacaatgggttagagtttgttaactttgaatttgacatgttgtgtcaaaattatgggatcactaggcataaaattgtagtaaagaccccgaaataaaatagtgttgctgaaaggatgaaccgaaccctattgaacaaagttagatgttagttgtttagttcaagattagacaaaccattttggggggaatctctagcaattgatctaccttataaacagaagctcaaaccgagttataagcttaaaaaccccttataaaatgtggtacaacagaactccaaacctaacatatttaagaacctttaggtgtacaacttatgtacacctatctattgataagttggaacctagatcagttaagggaacttttccaggttatttcttaggtaccagtgggtatagaatctatattttcaagaaaggtagaccaaaggttgtgattgctagaaatgttatttttaatgagttggaatattctcacttaacatccgagaaatgtagtgtgtctccgtgtgatgcaggaaaagtaggaaacaagaaccctacacacatggaaatggaatacagaatgaaacatctagaagaaagttcatagatggaagctattatggaaccagaagatagtgcgctgacggaagctgattctgagctagaagataacaaagaccaaatagaggttccagaaggattcggacaaacaggtctagaagattattagttggggcgtgatagaaccataagagattttcaccctctggcaagattcgttgaagtagacttaatagcttttgcactggcaacagtgcaacaaactgaaattgaagagtctagaaactacgaagaggaaattttaggtggaaacaagtcaaaatggcttcaggccatggatgaggagatggattctttcaggacgaacaagacttgtgtagttgtaccgaatccagagaacaaaaagattgtggagtgcaaatagattctcaaggtaaaagagagaatcaatgaaaatgaactagtgcggttcaaagccagattaatggctaaagactcttcttagatggaaggaatagactacactgaaatcttctcacctgtggtaaagtgcaagacgataagactgatgttatctttggtaggtcaaatggagtttgaagttaaacaacttgatgttaaaactgcatttttgaatagtttcttagatgaatagatctacataaagtaactacttggatttcaggtggaagagaaaggagttgaattagtgtgcaagcttaacaagtcattatatggtttgaaagagtccccaaaataataaaataaatgatttgatacttatatacaacaaatcagattcaaaagatcaacatatgatcactgtttatgttttaagaatctaaagcaatttacaacagtgcttttattgctctatgtggacaatatgctcatcatgagcaaaaataaattcgtgatcaaaagtatcaaaaccaaacttaaaagagaatcaatgagtgtacatgatagacatttttcacttgtaattggtaaattacttaaattcaataatcccagaccaaatggaagaatacttgatcgaaatctccaagcactggccatgtatccggcaactgattccaacaatgaagtcgcggctcatcttcagcatttgttctttgggagatcttcatgcttacactttttaagtcatgccgccaacatcttcggttaagagagacgcagcattcacttgtaattgctctctccaataacacacgaagaatctaaacaaaatacacaaaagaattttatatatttaatcaatacatgaacaaatgagagactacatctttacatgtgtacatatctatcgtgtcattaccagtatgcagtttctttggtatatggaatccgagcaaatagatacttttttggggtaacaactccagagcagcccatctatgagatttgcaaaactggttattgatctcgaacatttcaacactaaatcctcaatttcgaccaccggaggaatagcaacttcttgcaactcttcaaccttaaagctaaccttcaacatccacaaattaaccaattatttataaaaatttcaggtactaatcaaaatgatataaataatattgttttatatatatatatat

SEQ ID NO: 115749 - DNA, 3657 bp, Cannabis sativa
  modified_base (57)..(60): a, c, t, g, unknown or other
aatagttcagggggcatttttaacgaccgtaaaagttcagggggcataatttggtannnnttaaagttcgggggaaaaaatccttattagcctacttaatattagtattttgtgctaaactatttctttattcaatttatatatatatattaactcttgatttcttacttggtttatatacctttttgggcactattgctagttccagcgagatgtgcccctccagaaataaaccataatgtcctcgccctcaattgggggaggttgtacaccttggttttaattctggttgttgggctagttttgttcatttcccctatttctcacatacttcctaagatattctcgagaaatgagtccttcgatctcatctttcaattggcgacattcatcggtagtatgcccaatatctctatggaatctacaatatatgtttggatcttgcttactccttgaatttttctttagctcgggccttcagaaagtgacccaatttttgtttgcaagatagatattctcaagagtttcatttagttcttataaatagagtacatgaaaacataattctcgtgtttcttttgtttcttcttatcatttgatgaatcttttcttttcccattcaacccatttttgatcgaatttcccactttcattgtcacggtactagcagcagcagtactcaagctaagtttatctcctgagcctgactgagcattttcatttcatttcgcacaatgattattgctctgtcattgaattcattaattgttttgactgggtgaccctacagatcatcccacaatttgcctcccacgatcgacaaatcagtggttattccagcttggagcgttgttaactgaatactatcatttaggtttcttacttctattgttgttgtactaaaatgacttagataatcctttagcaactctcctagttgttgttcgatatttgttagcaaggatgcttctggccttctgtctcttgcggtctaaaactatttcttaaattctttggataacttctctcatgaggtaatagagtggttggtgaatttatcaaaccaactactcacggccccagtctgagatgttgggaataatatgcaacgcaagttattggagacattacttgctcgtattatagtatttaagttgttcagatgtgtaactggatcggttgtcccgtcatattatgtgacatgtggattcttaaatcctgtagggaattgagaattaagtatgttagggtgaaaggttctatttccttgtcggaatcataccctaacagtttcccatattccctatcttgctatcgtctgaacttatcttctaactaaatcacccttaattgaataggatccatggctggttgctcgacttgttgctggcgaatagtgttcagatttaacaagtctcagagatctggggcattatgattcagatgctcgtataagtcaggttgtctacagtttaaatgatcatgaagatcggggtcacgttgcctttcatgtgcttgggttctggtcgatctattctaaccacgagtccttgaccttgacccactcaaaccagtgcttgatcctatttcttggggttcttctcgcataggcctccatcttcgaaagagatttgacacacgtcccctactcaactaggtatatgtgctatctctgtcattttggtttggccttcgtgagtgtcttggtggatgccctaattcgggtcgtccccttgcaccccttgcatctgctgagtgaatccctattccccaggtcgtctttgtctggcatccatattcatgcgagatgactctgggttgtcaggttgcacattcccatgattcgtgttaccgtgtgaggttcttggatttttgggttaaatctccttattgttggtgtttcttggattttggggacatcatgtgtccactgcaagtatatcccttgtactccctagttgatcacctggggattcataagatttccatggttatcacctctaggagtttccccatgtctcctggtcctcgagcctctaggtcttccccgaggtcgcttagtgcatgtgtttggttggttaaggggtgtgttgctgcacgtagcccttgcaaccgcagcctcgcgttccaactcagcattcctctgatttgacttttccaatctttgttgaagttgtctgttttccaattccactaatggttcgtatcttgtgagattggacgcgtcctcactacgtctttcttggatttcacccttagtttgttcaaatcctccttcactatttcctattcccgagtgaggagccttaattgcatttgtcctgtgagaattttgatgttcttttcttagacgctgagttgtctctcctggttgagtatcttcattttgaggggtgtcatttaccatggatggaaggtttgaatattcttcagggagggtatttttttctgagttttttcttacaaggctctcaatgaaagcaccaagttgttaacacaagtttttattaaccaataaatgagccttaatgtaataagtaaactctaaaatcataatgaataataataataaatataagtagcaagaaggtttttaacgtggttttgaagttaaatcttcatactctacgagttcatcttatttctgaaattttacaaagtgtatacagaatacagaatacagaatacaagatataatttgtgaattatattctttctttctaaaattggtcatccttttttctttaggtcatgtccctatttataggagtcttagggtttcagttattcccttggtattttatccttgtaaccgctcataaaatatggacaatccccacgttttatatttacatcacatgtgataaaaataaataattgctataatttctcttgtctttatctatatgaggttacgttgactccacttcttcatctggcaacacaaataatcatcttacgatgcttttctttgaagataactttttgtgcctaagtataatctaggaagtacttctcgcgtccttctgtaatgttatgagaggtgaacgcgagacattatcataatgtgataactccgagacaaattatattgtgtgtattttccttagtctttcaacatactcacgagtatgtaggtcaatgagctaaatgctcttaagaactcattcctttcccacatactgtcgttctgtcatgtactttgtgtatctcgagatggagcttctatgttgattgttcatctcgctggtcgtacaaaacaataattatttgtgattcgcttttatctttgaaaggattaatttgaatatttctaccaattgtatttttcgatgcgagtttattgaatgcatctcaaccatagtgcttgctcaaaatatgagtataacaaatataattaaagagtttaattatttagttctaatttattggagcttaatgttataggtctatagtcctcagacagctcaatcagaaaatgacaaaggtaaatacaagtaatgggcaaaaaggacttatatgatatgtaaataattttactatgcagtaaacataattattagataattatgagtatttaattaattaagaattaattgaatacatgaatataattaattatgaattaatttattttgagatatttaatatttaatt

SEQ ID NO: 115750 - DNA, 997 bp, Cannabis sativa
tttttttttttttttttgcgattgagggaggaagcttaaaattattctgattgatgggctcgatttttggatttctaagattgaaatttttaatcactgctgagtccaatgtgatgaaatcaatgtaaattctgggtctagtaatggagcagatttgagtttgatggagtaagcaacaacttagccgattagggcattgcgattgattgttctccttcctttattattctttgcgattgatctgtcgagttttgaaagaaattgtcatagataataagagcaaggagcatattccgtcatggccctgtcccattccttttttaattaactgagctaaattaattttacaacagcgaataatttattttatttacttttttttatgggtttatgtttgaaaaaaatataaagtgaagaaatttcagttccaagaggaataaaatttttaaaggtcaaatggtgaagtaaaaaggcccaaagggttgaggtctttaacatctcgctaatcttcctcaacccactaacacactgagagaggtctttagggtgagagaagtagttgaaccgcacatgtggagtgactctcacattgttgggcgaagccaaccatagagagccactcgacaagggttgccttagcttctcacaagtgacggccatacccaaatgcacggtggaggacttagggtacacaccattatccaatcacctcgacctcaccacaaccacaccacttattagatggataccaacgtggttggacctcatcacctcttctactcaatgtcatccaacacatggttaaaaccatttttgtgccacaatgagtatgatggagaggcggcatcaccttggccccataccgagctttgaatgtagttgttactaatacatatgcatatagagagagagagagagaagaatgttagagatattattacaatggaagataaaccaagatatatacaactcaattgtaaaaataatacaaggacaa

SEQ ID NO: 115751 - DNA, 1984 bp, Cannabis sativa
aatttcttatattgataactgatcagattgtaaagagttttatttagggcataaaacccaacaaaatctctattagacgcaacgtcctgcttccaaagagttttcctaatgactaactatatcattcttttccttttcaattttggcgatccacataggagcacttgcactgacactttagatttataaactcaatcattagacttgcgtgtgacctcaaatatttgtatatcaaatcataaaagtgcttgactttgatgtgcaaaaaatacaaagcccacgtttaccatgtcttatggatagctcttgtatactatgtctttttaattgttcatgtaacatacatcgctctcgtataccatgattttttgtgaatgctcatgtaacatacataactctcatatactatgtcttatttgcctcgcgagtgatcggcgaaatgccttcattggctactcagcatacctaatctcgttgggctttgttgatcaagggtcttagggagttgttaaatgtgtgagcactcatgcactcatctagagatttgtgggttggcagtgtttaactaactaaagaaatgcttgtagttacctcaatacaaactttacaagctttgttcattgcttgagagcggcgttaggtctgtgagttgattaataatagtgaagtaccaacaagctttactcagtgcttttattcattagatattaaattcaattacatcatcattgtatctagattgaataaaaaagaaataagattctcaaatttgtatttttatcaaagaagctaagttgatcccctctacactgatgctctaattgactagaaatgtagggaccataacttgacaatggacctcttgacctatagatgacttcactacatattttcggttcgagagccaatcgattcacttgcacaaggtaaagtgaatctcactgtgaagagaactatcttgggaacaattgctttattaatgatattgtctcagattctccctgttacataacttggtaccggcgctggatttaagtggccgtcatagcgggctccaacctatttgtcccaagttctaatgcttttgtgacaatataaggtccatccctctcattgggagtcttcagtgtcattttcttggtcaatatctttatgagactcatagaacacatcttcattggtgctccattgttcttgattattatttgaaatagagggagcatcttcgtcactaccccctctcctgagtcattttgggaagtaggggaaattcttcatcaatgctctcttgctctagatcatcttaagaaatagcaggggattcatcatcaatgtctctttgctcgagctcactttgggaaataaaaatgaggaatctattttagtggaagaatttagtgttgactcttttttaccttcatgatcagtgtcttttgggattctggaagaggataaacattgtattcagttgcttatgtttgagaaatctaccgaccttcttaatggctttttcgagcttgatagaactatcaactttctctaaatactcttgagcagtgtctactgacttgagttttaagtctctcaatagtggactcaaaattgttagtacaacaaccatttccattaccttggcatcttcactgagtgttcttgtctatgtggtttcctctaaaaatcattggacgcaatcctttagaggtctgtcttcttgctgcttgatgaagaccaaattgttgggctcgattagtttgtgccttgatggggagaattggtcatagaattcttgcttaagtgtctcccaagaattgatagatctcagggaaagctagagataccaatgttgtgctgcttctgataacatggctagaaagattttacaatgagaatcatctcgaatgccttgcaggtcagtttgtacttcaaagttgtgtatgtgagagagagggtcttctttaccagtgtacaaatgccacattggatt

SEQ ID NO: 115752 - DNA, 1385 bp, Cannabis sativa
aatattatttcaattccaatttgaatgagattgtggtcgttttgaagccctggtacaaatccaaaagaaacggaaaattgaaggaaaaagaaaatgagctgcttctcctgttgtatgtcacaagaaaaagtcgatagaaagtctttgaagaagagcattaaggaataccaagacaccaaaattttggcctcattcgctaacatatccttcaaaagtggtaagtctttctggtatgtttttttatctttgtatttttatttatttatttatttatttttaaggttaaagaaatcatgtattgatgcaagaatgtatgataatactctttttgtttttttttttggctccggtgcttctatgcatggtttcagttactacaaaaacttagatttttcatgggattaaaattatgttaagtcctttaagaacattttttataatgttggtaaatgtggtgctaaaatacttttaactatattggataaatgttatgatgatgtttttttttcaaatatgaatgatgttgttgtacaatattttcacaacaatgatataataacatactttataatgtacatataaattatcatgtaaattattttgacaacaaatattagtatgtcttaatcacactaaaataatgtcatttcaacttaaaatctatatatttcaaaagtgggaaatttttttataaataattaaatttttttatttttaattaataattttattttcaaaattaattacatgatttgtttttattttattttctttataaaattcaaagcatgggattggtaacaagttaacacttaacaacacacagcatacactaaaaaatcctaagcaaaaaataaaatatgctaaaatatatgcaaaatacattaacactataaaactgtattaattgtataataaatgttcattattgtctatataaaaacgacactgttaattatgacttgtacaaggctactcaactaatatagttggttacaattatatatataagtatatattactatgtgcattgcacatatacagaactatatttttaatttttattttgttaaatgtatttttaaaattttataagttaaaagaaattatttattaacttttaaaatttaaaaaaaaaatgtttaaaatttttaaaatttaaggaaaataaatataaagtttaaaaatattaaaattgaacatactctctatattaaaattaacaataaaaaaaataataatattacaaataatatattcatattcatatttaagtatatttaaattatctaaaattggtataattttaattaacctataaaataatattaatatttatttaaatttaaattaatctaaaataaatgatattaatatttatatat

SEQ ID NO: 115753 - DNA, 1754 bp, Cannabis sativa
acacaaagatttttacatttttacaatatcaagtttacaaaaataccttgcgagtaagtgcaccaattcaaacctataagcctatgtaatgtcatctataaaattatagctaaatgccttgcgagtagactaaaagcttctctaacaggagttatcttagagaaccagagtgcctttgtcggaggtcgtttgcttcaagacaatgctatcataggacttgaagggatccattgtatgaagaaaaatatttttcgaaatggctcaaagtttgtgctcaaactagacatggccaaagcatacgacagagtcgaatggggattcatcgaaaaggttaatcgttataagttgtccaagttgccaagaaatagttccttgataaagcttgggtatgatagaagttgggttaataaaattttgatgtgcatcagttcagtttcgtattcattgcttttatatggggaagtcaaaggtgaaatatttccccataggggactgagacaaggagacccactctccccttttctcttcttattttgtgcagaggccttctcggctcttatcctcaaggccgaaaatgaatctacatggattgaattttggtagatctgggtttgtaatatctcatctcttcttcgtcgatgatagtcttgttttcttcgaagcaaaagaagaggaatgctattgcttcatggaaattttagacaagtattccatggcgtctagtcagataattaattttagcaaatctgaactttgctttgggaaattagcttcgaaaactctcaaggatagacttactggtattttgggagttaaattggttgagcactttggaaaatacctgggtcttccatattcgatagggcgcaacaagaagggtgtcttccaaaccattatcgacacagtatggaacaaacttaaagggtggaaaagctccctcttctcaacagcgggtagagaagtactaattaaagtcgttatccaagccattcccactcacactatgagctgctttaaactcccaaaagatactattcgcaggattcatgggctcattgcaaaattttggtgggctcctctaaaaaaaagaagaagacccattggtgcaagtgggagaggttgtgcttgcctaaagaaaggggtggtctcaacttttgtgacttagaattgttcaacaaagctctactagctaagcaagtgtggcgattcatccgtaatccagagtcactatgtggaagagttttaaaggagtgctactttcccaatgatcatatcgtagtagctaagtctggatatagagcttcggcaatttggaagagccttgtttggggtttggaaatcattcgtagtgggtacagatggcgagtgggagatggtaacgatgtgcaaatcctaaaagatccttggcttccaagaccaaacagttttaaactctacgacaaacctgatattccgtcgaatttgtacgtgattgaccttaaacttgaaaatggtgcttgggatgagacttttatcagaagaatcctcaatgaggaggacgcaaaacttgtattggagctcccttgcagcgagtctcacctgaaagatagggtgctttggtactactccaaaaatggggagtataatgttcaaagtggctataaggtagctgtccaagacagagttcaaatggaaggttcagatttgacctcctcagaggggtggtggaccactctttggaagctgaaaattctcccaaaaattaaacatttcac

SEQ ID NO: 115754 - DNA, 1060 bp, Cannabis sativa
ttttcaacaaaacaacaaaacaaaaatgctcaacttatacaatcaagaatatgaaatatatacaaatattctcttgttaattttggagaacacaatttcatcactattccatttatgtgtatgagtgtttattgcactggatccatttggaatgttgaggccatttttttctcctctgattttttaatccatttcaaagtttccaaaacaatgactgagagaagaactataccaagaacaaatccataaccaattttccaatcattcccagctcctccaatttgcatccccaacactatgttcaatgctccgaaaagaagggccagtcttcccattgaatggtggtaccaattccagtacctacgaatctttgcttccttgctcggtcgaagaaagaatgccaaaatctgcacaaacaaacgagtaaataattaaacaaaaatcatttagatttttcgctttatttcaattaggagtgttcgctgtgcgatttaaattccttttgatacactaggcttcattagaatataataactattgctatataagtattaagaaatgacttgaaaccttatattttgtgagaacaacccaaatgcttaatttagactaaaattatttatattttttgcttaatttcaactaagagtgttcgttgtgcattttgaatcccttttgatgcattgggcttcatcagaatataataacaattactatgtaagtaccgaaaggattaaaaactttagattttgttaaaaaaaaaaggcctaaccatttgagctaacattcatgaatactacattttgatattagctcaaatggttaaattttgtgagaacaaccaaaactaaatttttgaaaagtaccggtccttatgtattgggttaataatcaaaaaggtagtggaaagaaaaaatctctaaataaataatgtgaaaggactcaaaacctttagattttgtgagaactacccaaatatcattcatcattattactttaaatagacttaatattaaatagaaatttacatggtatactaatttttgtcatttttttacaa

SEQ ID NO: 115755 - DNA, 1700 bp, Cannabis sativa
agtggttacagaacgcatttttgtgtttcaaaaacaaaaattttaaaaacaaaaatttgactttcattttgtgattaaaaaaattaaaaaatataccaattttacaaaataggtgtaattgagagtttctttgtagtcctcaacttttaattatacattaaactttcatccctcgatatatatatattatgaaattaacaaaactagtgctgactttagtgatacgtaaactaataataaattttttgggtttactgtaattacaaaataatgtgtataccatacagattgaaaggtataaaggtacgtatgccatttggagagagagtttgttggaaaaaaggagagcaagatattttgtgcagcaacatggtgtactttgtctatactcaaaaatcattaattaaaaaacagagtaaaaaaaatcattaaaaaaatataacaaaaaatagaaactgtgcgcgcatgtcgtgcacgagcaggaaacgtgttcgtaattacgtctacctacaatgacacgtgacagaatttagtgccacgtgttggactttaagaggtcactctgactttttttttgagggaattctgtctctgactctttcaaattcctcataaattacatttcaaagaaaaaagaaaaaaaaaaaaaactcataaattaaagtggaactttcgtagcaattgactaaccagtagaataggattattcgtttattaaaatcaacaaaaggctattttatattgttttctaccaaacctaactcctccgataatataccacttcggtattaaactgcattatataatagctagccttaacttaaagactcaattattttttatttatttatttttatatatataaaaaaaaaatacatgaaaaaagaactaaattaaattaacttctcttattcaattaaaataattataacttctctaacacgttatctagataatttaacatttaatatagcactaagatacaaaattaccttaaattttatatcgtagaacaaaaaaaaatttatatataccattcaccaaaatatatatattaataataataataaaaaaaatatacattactaatatagatatgtgtatactatactaacaaaattatatcctataattgaaatatatatataccatgacaataaaattatataccaccagtctatataataaaatgaaaattaattaaatattatttaaaataaatatgtatcatacaatgaaaatatataaaaataataattaaatatatatagcatgctaataaaattatatatatacattaaaatatttgtattatgctaacaaaattatataccactattatatacatagcaaaataaaaaaaaaatatcatctaagaataataatatactatacaacaaaacagaaatatactgtacaacaaaatctatataccaataacccacaacaatttataaaaaattaaaaaaaatcgacctaacttttttttttattgaaaaaaaaaattcgacctaacttttaaataaaaaatttttaacaaaactaatattgatataccataatcttttagtaattttttttttatgtggcataaaacaatataaataataaataaactaaaagagtcattttactacaagttttgaaatgaagatatttaggctaattaataatttttctccccgaactttgacatatac

SEQ ID NO: 115756 - DNA, 1305 bp, Cannabis sativa
aactagcaatacgtggctcggcacgtacattcacctagtatttttaaacgtatatagggattttggagtaataataataataatatagcgtcttaaataaaatgtgtgaaacatgcatgtaagagtttatgaaatatttgaattttatgaaatgtaccgcatcatgataatcattttgtactcattcattaatattgtaaaaagagtgtactgtcctcaacttcttatttaattattcagtcaatttttatatttaaaaatacatgtgagaatattcttttttatgattacatttgttataattacaaaattaagtatctaatttttttaaaagttatgattagtttaccgtattaataattaagttcttgatatttcaatgtagtatattgtttaaaaaatttcaaacttatttttgacactctatactattcaaaaactttttaaaagtttacaggaatgatattgtaactataaggataactgctatgaatcttttcttttctttttttatttttaaaaatttaaaataaaaatttaaattagcactcactctgaaaatataacaccatatgtcctatactatagactattgtatatataaatacaaaactagactaggtacatcaaaaaaaaaaaagatatgtaatatgtggttgagttattactagtacaaatagagttatgagaggctatatttatctaatatgtgtgtggtgtggacttggtttgtactttacaaaacctaagtaccttatatttttttttattattttttatgaattaagtgattaaaatcatattaagaattcatgataaaaacattaattcatcagtacaggaatctctttaaaccaaataaattaattcatcatctaacaacctatgattaaatgagcatccaaatacatctttgaagatttatcagtccaaaatcaaagagaatagaaattgagcagagagaacatatatggatcaaagttaaggaaaaggtgaagctaccacgtgcaaaatacacacgtatctagttttcttatttcattttaggttttaagatttttgcccctgaactttgacatgtactaaattatgtttcctgaacttttaaggttgataaaaatgcctcttgaactattgagattgttagatttaaggacttttgttcaattttagtaagaaaagtctaacatggatgaaaattcaggggacatgatttagtacatgtcaaagttcgaagggcatgattttatagatattaaagtctgagaagcataatgcagtacataaacaatcactgaaatagta

SEQ ID NO: 115757 - DNA, 2207 bp, Cannabis sativa
gaaatgtttaggggggccagggcctcctctactcctaacatgcctccgcccctggatagagcaagaagttggttgcaatctatgcagccaggctccattaatacatgggatgaaatggccagaaagttcatggtgaaattctttcctccatcaaagtctgaacaattgaggagtgagattgggcaattcagacagtttgattcggagtaactttatgaagatgggagtgattcaaagacttattccatcgtttcccacaacatggctacgagaactagatgcaagtttcaattttctataatgggttgaatggtccaactaggactattattgatgttgttgctagaggagcgttattgtctaaacctgcaactgaagccatgtatttactggaggagatggccattaatagctataattggcctattaaaataaatactcaaaaaaggtggttgggttacatgaagtagatcctatgacaaatatagcagctcaaatttcagctttatctaatcaagtggctgccttagttgctcagaaaaatacatcaactgtagaaaatgttgttgctgcatctacatcccaagggcctaaaatgagtatagaacaagcacaatatatggccaacgaaccttataataataactatcagggaaatccaatgcctaactactaccatccggggttaagaaaccatgagaatctttcttatggtaacactaaaaacctcttgcaaccacctcctggatttaatgctcaacaacaacctgaaaagaagtcattagaagatattttgggtacttttatgatggaatccagcaagaggtttaacaagaatgaagtgaggttggaaaacatagaaactcacatttctaacatggatgcttccatgaaaaatattgagattcaagtaggacaactagccaaggtagtgagtattaatcaaaaggggagagtaacaccgtggtaaacccaaaggaatcatgacaggcaattgcattaagaagtgctaaggttgtagatggtggtcaagcaaaagatgaagatgagtttttgagaaagcaagatgagccaatggtaagagaggtagacaaggaagaacaggtcataaaacagaatgataatgacaagtctgaaaagaaaactaatctcccaatgtatcaacctcctataccgtatcctcaatgattccaagagaagaaaaagatgagcagtttgtaaagttattagaaactttcaagaagattcatataaacattccctttgcagatgccctttagcaaatgccaaactatgtgaaatttagaaagaagttatgtcaaagaaaataagactagaagactttgagactgtgaagctcacaaaagaatgcagtgccattttgtagaaaaaaaatgcctcaaaaggtgaaagatcttagcagttttaccataccatgtaccatcgaagggtcctcatttgataaagcattatgtgatcttgaagctagtattaatttaatgcctctttcagtatttaagaagttggggttaggagaagtgaaacctacaaccatttactcttcaattagcagatagatcactaacttatcctcgcagagtaattgaagacgtattggttaaggttgacaaatttattttccctactaattttgttgtgttggacatggaagaggaccgtgaaattcctattatcattggtcatccattagttactagaagagtcctaatcgatgacaaggtggccatctgacagggttaacaatgaagcggtcaaattcaacatttatcaggcactaaggcatcatgataacacaagtagttgtcactgtgttgattccattgaagtagtggtagaagagacgatgagaagggagttatgttcaaattcattgcaacattgtctaaattctgctcgaggataattacaagcaatctattgagtaccatcaaaggttgaatccaactttaaaggaagtagtacgagctgaaattttgaaacttttaaaggttggaataatttatgctatttctgatagtagttgggtgagtactgtgaaagttgtactgaagaaagaaggaatgaaagtagtaaaaaatgaagccacgtgccctggctctagacctctacctcggccatagatatttaggggaatctgagctccctgaccaccacttgttccaaccgaatcgccctggctcctggta

SEQ ID NO: 115758 - DNA, 1518 bp, Cannabis sativa
  modified_base (58)..(58): a, c, t, g, unknown or other
ttactaaaattagacaaaagttcttaaatttaacaatctcaatagttcagggggaatntttaacgaccaaaaaagttcaaattgtataatttagtacatgttaaaatttttggaaaaaaattactaattagcgtattaaaaaactaccaaatactttcattaatgggcagagatattattaatagtctacgtggcagtgacaaaccatgtaagtgttttggtgacccatcatatatgccgtttaataagagaaaatattaatatattattcaaatatattgtagtattttatccttttacgtaatattcagtacaaactaaattaatgcactaaaatggctgatatgaaagaaagatcatttcactacttctctactccactttagaaaaagaaaaaagagattgtcactattaaaggtcaaggactacattgtaggcagtcttaggtccacacatactataatattttcatttgttatcaactgattgttgtatgttcctttactggttttatttatttttctgcatgtttatctaaaaattaaaaaggtaaacaaagaaaaaagttctttctcatcaagttgatgatatgtaagtttttatatgactttggaactcccgtagggtatatccctttgctctggtagtttaccagctcttttcgattgtgatgtaacgccttattaaattaaatatgttatcgtaattttaaattattatgcactcttttactaataaaagggtttaatgaaaatcgtaaataattaaaaattttataaataaattcaaatatataaatacattacatgatccgagatcctgttataaagttacaacagttttttataacatataattaagttactgttatactgaatttaaaacaataaaactagaacgaattaccgatggaagattctggctgattcccggacaatgtcgctttcttattaagacgtttcacagttttgcccgaagtgtgcacgacagtctagcaaccacggcgtccctaggataaaacagcctctgcatataaaaagttttgcaccgaactatatcgttcaattacaccgtaatttttttgctttgagaaaaatcgtaaggaagaaaaaaaatgttgttggaaaggatatattcttacgtacgacttatatagtgaaatcgatccatgattaaacggtaatttaatcgcggaggagttggatcatgacagtgaaaagcggatcattgattgatcgctttttactacttcatttaacgttaaaaataattaattaataaataaaaaataactatttatttaattaaataatttttctttaaaaaagaagtgacacctcacctgccagcccagctcggatcgatcagacggtagtgcgcgtgtgtggtgatccagtgtgtgagtcatcacccatgcgcaaaaaactgggtaccccttggggcccaaaaccaaaatctcaaacttgcacattaaatacatttctaatgaagtgtttctatcccatgtgggactccatt

SEQ ID NO: 115759 - DNA, 1573 bp, Cannabis sativa
aaaccgcccaaaccgaccgatgtacagccctagtgctaccaatactagtacgccagagtactgagtgcatgtcgtagtatggctggttgtacttatagtatggattgatgctaccaacactagtacgactagagtactgagtgcatgtggtattatgaccaatcgtactatggtcaagaacgttcgagactcagttatgcatgtttcacatggtttacacttgttgataggtttatgggcgtctggccgcatgtcggttatatatttatgttttgtgtttttcttactgagtctgtcgactcatagatgctatgtgatgtgtaggtaaaggcttggcttgaactggttataagtgagtctggagttcagtaaagattgtacatatctcaacagttagacatggagtgttcaatttttcagaacaacatgagctcacaatttatcatggaattatttgtagaaacgggatcccgaaactttgtaaatatcttgtacaattactttttatttataaaattttaaattacatcacatttttaacaaaaccctttgattaataaaagttgcaccgtaattaaaaaaagtattgtagtacgcctaaactagtagggtgttacagaaacagtgcattcatgctgttcatgtcatatcattttattagatcttctatatttgttataagtataattacttttatacccgtgagattatttttatcccttacaccaatattttattttttattttgtaatcttttttaaataaataataaaatattattttttccaaaattaacaaaaaaaaaaaaaaattagataatcattagactttgaaaccatgaaaaaaaaatgagaatagaggaagaaatactaaaggaatagagaaaaactaaacataatattattttttttatattaaaaaaattatgaataaacaaaaatattgtgtatattacgagaaaagaaaacgtttgaaacaattttttaaaacatacaagccatgtgagtaataatgtcgtgcactagggtaaaaatttttattgtacaaaaaatcttcaaaaatcttatgtttatgggttttgtttaactatattattgtataaatttgtatttatgtcatatttttattttaattaaagttattgaaattagaaataattttgttatttttcttatttatataattgttttgaatgacttatttgtaatttttttacttatgtattattatttttatattatatattatatattatatatttattttattttatattttatttgtttttaataatttattttaatttttaaattatgttatttttatagaataattttttttttcacttcgtttgtgttgtatagtgtacttttttaggttaggataaggtatgttttttattttattttctcccttcaatttttatcttttattttttaaccttatccttaacttttttttttttatgggtagaatttgaaaaaaaatcaaactagatttagtcggctattagagtactcttttaataatagacatatatagctctgttataaatattaataattatgtggat

SEQ ID NO: 115760 - DNA, 2693 bp, Cannabis sativa
aggttctttacaatttgaagttaggaggtgtttggtttgatgtaatgtaatagtaatggtaaaggtaatgtaatagaataagaatggtaatagaaattgattacaatatttgatttgtagtaggaataaacattgtaatcagaattattatgcttagtttagtataagaatgtagtgaaataaaatgtgtattgactaaaataatcttattgattttattataaaattataaaatattaaaaaaaaaaaaaagtaatatagactttggcttttcttactatatttttattaaaattatttttttttctttataacagtgtaattgtaatgagaattactattacgattaccattacgttaaacctattcattgcggttacgattaccattacaataaaccaaacatcaccttccaacaaaaagtttccctaaagaaaaaacattatgcaagacttggaatagctcgtaaagggtgagccatttgtaaagtgatgccaaacttgtcatccatatcaatttcttctggtttaagcccattttcaagcttccattcaaaagagtggataagggtccccaacattaatggcagcattctcatagccaaaggcaatccaggacatattcttcgacctcctccaaacggtatcagctcaaagctccttcctttaacatccacttccgacccaataaacctctctggcttaaacaattcttggtcatcccatatgtccttgtctctacctatagcccatgcattgaccaagatttgagcaccctttgggacagtgaagccattgatttcgacatctctttcggctttacgaggaagcaataatggtactgctgggtgtaatcgaaacgtttcttttaaaacagcttgtaagtaaggtagtttagaaacgtctgattccttaactggttttccttttccaatgatttgatcgagttctgctctggctttggacatggtttctgggttacgaagcagttccgccattgcccattggaaagtggcagcagtcgtatcagttccagccacgaacagaacctgttaaacaaaattccgacaattaagaaatcaagtcactaaatagagaataagataaaatgttctttaccaatatcaaatgtactatctggtgtcgattgatttcgttatcatttcctttcatgatgttcaaaagggtatccaaaacatcatcgttcttaacaaaatctgaacattccctttcgttgataattccctcaacaagttgtaatattctactgaagtgaatcttaatacgacgccttataccaaaagggtcaatctttttaagcaaagggaaatagtcactcaaatttggtgtaccagcttccttcatgagattccaagtaatatccttgaaatctctagccaattccgattcagaatcagccaaatcaaaagaaaaaatggtgtttgacaacaaattaagtgtggtagtaaaagcagcactgccaatatcaacagctgcaccactcaaactactctgttccactttctcaacaagctctttcactttgctcaacctgagtttttggtttgtatccaaaactttggttgcaaacaattgagtgttacagatctttctaaggtttctccacaagttagagactggaatccatggaaggccagagctttcatgaccgtgaacatagagagcatcaggaatagttcggttggagaagtattggtcgtgtgtttgaaggacttctttggccacagccgatgaagaaaccacgattgttgtgacttgaccaagcttgaggctcattaaggggccatggagtttggcaagctcagtcagggacttgtggggtttgtcaccgagttggtggaggtttccgatgactggtaatggttttggtcccggcggaaggttgccggaactgggttttgatctcatcaaagaaaggattgcccatgtgaggatcagacagagaatactactccaccaaaactccatcatcgatttgtgtttatcttccccaaaaatccatgtttttaatattattgatagttttgcagattctattattaattgtaatctttatgttattgttgaggagaaataattgaagtgaagatataataaaatatatatatatatgtctagtcatcgcgcatacgctatatttattaatacgttatatgtcactatctaatattgtaatttaaatttaaattaattgtacatatttttttaaaaaatatttatctattatttttttttttaggattatttactacaattcataatcaattatttcaatatatactcaaataaaagttgcttcttttaaaacttgcaaaacaaaatttctagaagcaaaaattttcaattttttttttttattgttgttaatacttttaaatttcggtatttatgctgacgtggcacatcggtatttgtacaaataaatttgttaaaaatatttttgtaaataaaatcaattttaagtataatattgaaaaaagaaaatttcttttttaacccaatcacatatctaacacatgagctaactcattatctagtcataatcataacttggcaactttatgagttaaatcattagagcatctccaatggtagcattctttgaagatgctctatatctccacatcatccaaaatataatattttattttatttttcttccatatcattttt

SEQ ID NO: 115761 - DNA, 1446 bp, Cannabis sativa
  modified_base (47)..(53): a, c, t, g, unknown or other
  modified_base (1413)..(1416): a, c, t, g, unknown or other
aaacaaagaaaataaataattaaggtgaaattaacaatgattaaagnnnnnnntgattaattttgattgcatctactttatatggtttaatataatttaatatttctcaaattctaattttcattttatagcagatttactaaaaaaaacttaaattcaagctaggacatataaatctcaacatatatgcaaattttctactctcatgataaattttagcacataggaggcattgagcataaaatcctaaatgctacacaaaccatataggtactctaatcctatataaaaatttatatctatttcactatagcataatcaatactcacttatcaaattttatattaaaatcatgaatcatttaattggtgatcaagcaattaaaaataattaagtacaaatgaaatatgcacataaaaaattgaaaaataactaaatcatattaaaattaaaataaaatgtcaaacaatctccattaacaccctaataaaaaatctatactcataatcattgaaaacatctgataacaatcaagaacataagaaaaatagagaaaaagaaagaactatttgaaaaataaatattgaaggtctttagagccacttctcgcttctaatttttgtactccaaaatcgtctactaaaaagtgttgaaaaatttcctttatatagctagctaaaaaaggataaaatcctaaatttctcgcagtttaaaagaggtggaccgcgacactacgttgtggtgccgcgacccgtgtcttctaggcacacaaactcccttcaaaattttccatagcgggccatagtgtcgctgtgcttgaaagggttccaatgtctcaacattggatcccaatgtatatgccttcctttcaacttgctaaacacgaccttgctggcaaacttttgcatttttagtgtcctgacattgaattctaatgttgaggcgctactctatactttccaattctttacaagctccagtcgcatcagatcttttggatttctttcttgaattattttcttggtgctctagcaacaaaacttcattcaattaatcatttttgcacattttttttctcgatttttttcggtttttctctaatactaaacctgaaaatactcacaaccaaaggtataaaattgcacaaaatatattaaaagctaattaaaaatactttaaaaatttatataaaaaataagtactaattaagtcttaacaataacaatacatcacatttttggcacttcgagatgctttgagatgataacattatgagaaatgaaccaatctaaatgatatttattattcaattatgacaaatgttaaaaggtatactattggtgcctaacactaaatatcatatcgctacagtaatgtaattaagtatcagattttatataatttaatataatnnnntttaaaaaatattattaactaatagtaagg

SEQ ID NO: 115762 - DNA, 1090 bp, Cannabis sativa
agcaaagaactatccaatcaacccaagttttaataaaaccaataaaatttaatgtaagcccaaataaaagtctaacaatatgactataaaaaaaatagaccaaaaaattattctaaatgctgaaacaaataaaaagtgtatcaatacaccttttcaagagtgtgcattataaaagcatccaataatatatatatacaattaattcaatcataataattagttacaataatttccatgaggtttggtgaattaatgggaattaaaaattatatatatttttattaatttaaaattattgttatttaacaagataatcacacaatatatatttataaatattttctcgtaagattacatatccctagtccctacacaataaaaatcatatcatattaatctttgagtataaaataattaataggttgattatgaaaacactaactatatatgtacttgtaacttatttaacattcatgtaataatatatattttttaggaaatcatgtattaataacttacctttttttttttgaaaataataattttttttttttttgagataatgaaaataataacttacttattaggatatataaatatgctataataaaaagaagaagtaaacgttattatatctcaaaaagattatgtcacaaaaaccaaatattacacttaacctagttaaaatggcaaccaactttccacatgtcacaaatattatgatatatatatatatgtatataaatatatacatataaaaattcttttccaaacacaccatcttgcccatactttgcctttttcttcatcttcttcctctattaatatttatttatttattaaaaagtaaaaataaaacattaatttttttagggttccaaaaacaccacggcaagtcttgggtgatggctataacttatttctttaattatcttaaaaatctttaatatgataagggcacacgcaaattctactctctttcttactacaatataatattattaccttattatatattattaggtatttttacaatatactgttagacttttatttgggcttacattaagttttattggttttattaaaa

SEQ ID NO: 115763 - DNA, 954 bp, Cannabis sativa
tagtactttaagtaagcttgttgaagaaatcaaagactcatcatacctgatcataccaccactaactgttccacgaactggatcctgccatgtcttatacagatcttgtattagttcctgtcggtgagcctgggcacaaactaatccagcatatttagtcacttcaggccagtcctgagaagctactacctacagtaagaccaagatggattagcaacagagatttcttaaaagttaattattatggtggcataaaaggtttctagaacagtaaaatttatagtcgtacagcagctattgaagggctcgagtcttctccattctcggggtgtgtcacatctgctccaaaaattatggtgggcacatcactaactaatggtattctacagctaatagcatccaaaagaacagtgtttctaccgcccatctgcagaacacacaaaacaaatcagcagaatttaactagctcaaaaaataaatcaaatggaaccaagtctatgaatagctaacttttgatgataccgaataaatagaaagcatataaatttttcagtcctagacaggtgacttgtcaacttgtggttataattaaaagcctatcaagaatcaaaccaattctataatctttcaaatgccacatgaaatgtgaaaatcatggttaattgtagtgatttaacaagtttggaggactgctcagaccttcacattaatcttcagggacacgttagccaggtactgcttgctaattttgaagacatgtttggtaagacaacactgtgacattaaaccaagatctgtctcacatattcgtttgagatcacctaaaacgagataaagaaagtcagaacaaaaacttcaattcaaaattttggtttcgtatgaactcaaataatcacaaggaaaggtcaattgagtaagcttagctgacaaacattaattatgatttaccatata

SEQ ID NO: 115764 - DNA, 1837 bp, Cannabis sativa
gtaaagtttaaagttgttacaagtttaattttcattctgtttcaaataaagtttaaattttctgcgcttatccttttagtaatcccagattaggggattaggttttcgtaatccgttagcgtagcatgcctaattgttagggcgttacataataagtccatcttgggatagacaaagtgcataacaaaagtgttcaagacaagatagtaaagagcttgtagctcattgacccacatacttgggaataagagcttgtaactaattgatccacatatgtgtacatgaagataataactacattcatccatctcgccatttatacgtagaagtaaccacctcgctaataccatcaaagtaaaagagtattgcgaggagaagtatatatatacttagcttttttttctacaaggacggtaaaaaaggacaacttgtacttagcaagaaacaacattcataatcagcatgaccgtttaagaataaagacaaaagagcggttgggtagttattaaatattatcccatatgcatagaaatgaaacgtggggaatgtccacgtttcatgagcagttatgaatgatcagatcccaaggaaaataactgtcaccctatacatctataaataaggacagaatccagggtaaaagagacgacaaatttgagagaaaaaactatctattatattgattgtactttgtatccagattaacatctctaataagatagactcgtggagtatgtagattttaactacaaaatcacgtaaaaatatctggtgttcatttattgttatcattaattctgtagtatctttattacgtaaaaggtttacatatttagttaacgaaaatctgcgttaacatatatttttcttagcttgttaaacaagttgtgtggaattaggctttctaaatgatattgcaatgggatttgtggtgggtcgactggggtgtgggcttgtttagttatatcattaattttttttttcagtatacattatagggatttatacaattgttgggccctaagtatgggcctagcccgccttagcctaaggtccggcctgagtgtaccttttgtgtaatgttgtaacattatttaataattattttgttctattattcttgtcatagagttgtatttcttggtttgttatttctattacaaaaaaaaaaaaaaaactccaagagacatgttgtctaacattggcacaagacaacatgtcactagtagcaaaacatttgaatcctcgagatacattgaataacgttaaaaaaccctctatcacaggtttagacgacttgttgcctagtaataggcaaaatgtcgcctgagatagtttcagcacacatattttgagtttcaaaactcctcttcaagccaactcaccctccaacttctcagtaaacattcatatgatataaatttgtattgtaacaggttttaagagctaaaaaattatatttttgaatccataaccctcatatacatttaattacataatatcaaatgtaattctataagttacaaaacttatattttgatttgtagctcctcatattataattataattgtttatattaattatattatatctcatagggttgtacatcggtcggtttgggcggtttattctatatattttctaacccaatttaaagttcgggttgctaaaatttaaatgtaacccgcccaatttaaaaaaaaaaatctataagccgaccaacggtttgggcggtttgggcgtgtaacccgcccaaaccggtcaaacttttttttttttttttttttttagttttaaagtaaaaatcaaaaaaaattaaaaaaaaaaattaaaaaa

SEQ ID NO: 115765 - DNA, 2402 bp, Cannabis sativa
  modified_base (219)..(220): a, c, t, g, unknown or other
ggtattattgtaaatgagatttgttaaggtatttttgtaattagtttgtattttaagtatattattgaaaaaatccctttttttttttatgataacacctatttatctacaatgcagggccaaccttaagcataggcggattaaatttgtgcctagggcccaaataaaaagtaatatttttttaaaaaatatacatatatttttaataatttttaaaannaccatttatctttatagtaaaggtttaattttttttttttgtctatagcccattttaactcagggccggccctgctacaatggtatagcattcttgtgttttgccaaataagcaatccacataaataagcatccttcaaaatttaaccattagagatgctcttacatttatgtaagtcttaccacaattttaccatatatatctatataaattacatatacgcatataatattgtatgattcaatctggctatgcaattttgctagtattttttgcctgatgatcgtgtattctacattagagaaatgattaagatggaaaacttgaaaattgggatcctcattcttttgttcttgatgatataaatgtagagaatacctaattaagataagactaccgaaaaatgattgaaaatttgaaaacgaaaacttgaattttttgaggagttctatttgcatcttatatattggttgaaaattagaaaataaaaaccttattttttttttttttgagaaaattaaattatatatcaattttatttttcatgttttaatttttacctttatttttatattttttttaagatgtacatacttttatagatgatgtctctattatactccttaagttaatgtaatgatgtgttcgatcaaagtaaaaggtgagggtacattaggcaacatacttacaaaagcaggtatataatataaggacattttttattaatgaatacaaaaaatgtgtattcctagacttatcttttttttttaactgattcatgtagtcaacaaatacaaaataaactaggttgacattgttaatttgaaaggccaaaaaacaaaattgttcaacttgaataatggcatgattttctttttttgcttcgatgaatatagattttagacgtaaaagtaaaacaagaattgagaattgagagaaaagaattcctttatttctgatgaacgaatggtttcaaatgaaaagaaatgaaatgatacaaggcccatcaatatataggtagctcgtaaagagtaacaagatagattacaaaacagttacaagatggtaattggtaactgattaattaaaaatacctaactaatgtaacaaaataatagactaactattttagctaactctaataagacgtacggaaaataagatgaaaaactgaaaattggatcttaaattgatttttttttatatatatatatatatgattgtgcagtgtagattgtaaatcaagttgaaaacaagaacacgttcctaaaaagatttgtatttataaccacttatttaaatttgtagtgaaatctgaaaatactcacatttgattttccactgtcgattactaaacaaaaaagtgaacaattctatccataaatcagaatatgtatatatactaaatattacattagaaaggtggtattagtgtaacttacaaaaatgtatgtatttttgtaaacaatatttacaaaataatttatagccaaaaaaacaacacatttttgcaactgatggttacacagacactaaatttgcataaaaaacactaaattgcataacacaattgaatcaataatgaattttttttttagaattataacaaaatttccaggaatgggagttggcggcgagtgggtcaagggggcttattaattggtaggcattgaacacatctgacttctgagtaaggcatgtcaatgttggcattgattgaatatatagaagaagaagaagaatttaatggtggatgatgggcagtacgtaatccaagaaagaaaaggaaaatgacagaatgaggaattgcacgcgtatatgcaattatcgttaatttattttatttgtgcatactttgtaaggttctttatccttgatctctttgttatttaatttggaaagttgtcatatattaatgtgtataattataactaagagatcaaccatatgttttattataattaacatgaaaataacaaagagatcaaggataaacaaaccttacaaagtatgcgtcggataagtctccactactacaaaactcgtcgtcattctcttcggttttggataggaaatttacatggtatactaatttttgtcatttttttataaaaatactgccaggcggtattttttacttttttactgtgtttttttgtaagtttcatactgcagtatactg

SEQ ID NO: 115766 - DNA, 3440 bp, Cannabis sativa
attggatcagttgtggggatgggtgggacgacatacatccgatcgatccatccaataaataaccgaaccgatccaattattatccagttatatttttatatatttaaaatatatttataattctatatatttaatatattttattttataaaaattataataattgatttatttttagcacatgcaaattattcatctattattaagaatagaatttttggcggctaaactctctcaactgttattttacttgaacttaacttagcaaatttaaattttaaaggtaaaactctccaaactattaatcccttagcaaatttgaaatgtcatacatttctctcagttaaaatgtcaacctaaattgtttatgtgtacaagaatgtacacatgacacatttatattagtacacctaatataattatttaaaaacttttaaaaaataatctaaaattaaaaaaaaaatcccctaattaaaaaataaaaaaaaaaccattaacaatttattttttttttctctatcacactaattttttttcttcaatgaatttattttcatggtctcccaattgtgcctcctctctcctcaaggctaaggagtcattgtcatcgtttggtcgtgcatctagcatctatggtcgtcgtcggagtttggtcatgcatttggagtctcattaaaatgcgcaggtcgtagatggtctccttcagatggtctttgtgtttggagttgtggagatctcagatctgagatctttgttgtccgtcgaagacgtacggtggttgctagtgtgtgtacaatccatgaggggaggtatttgtgctcgatggagtgggtcgagttacagatctggaatctctagtttatgggctttgagcgtagctcagtgggtgaccttgctcgccggttttaatggtggacgaagccaactcctctcgtcgttttgatacaaacatgatggtgcatgagaaagtcaaatctggaaagggcaagctcaattttgtggaggttgatgtttgtgtttcaaatttgtgatatttaggtttgatctttgtgaaaatttcagattcttttttcgctatatatgattcagatgagagtggtggatggtagtttcaatggtgattggtggtggggtactatgaagaagatgaagaataaagtaatataaactaaaaaaaaggcccacttattgggcctagcctacttatgttgagaagaaaagggccctagccttattgaaagcttttgtagagttctgtatatcacgtaatataactttgaaaggttagtcatatgaaggatccaacccattgccaaaaggaatattaggttttcccgacccactattcgaaatggagaaagagttctcactgtcttgaatgacatgtcccgctatcaactttccaccatgcaaatcacaaatctaactaggtgaagcattgggaacaacctcagtttccatttgaatcctctcctagtaatcttctgccataagaatcgcaaatccattttccaaatgggacttgaatttcagccaaggaccatacaaggggacactacgtccatcatcaagaatcatcatctgttttttggcagagcacatctcatccaggtgaccaatcaccccatatttataacaaaataggggaagccttgaaataactccaaacttttttaccatcttcatcctcaagccccacacccgccagaagaggtttggcaaggttcaggctaacctaaaacctcatgaagttactgcaaatctctccaatattaatgcgagccttattagtaagaataaacttgcccactctgttggctacctttttcatatttttgttcgagaagtatctataaggaacattaagagctcttacccaaattctcacatgttataggtcagccgacgtccatttaccatcctctgacatcatcgttaaaaggagaaaacctccacatggcaaccatgggccaattctagcaatttttagggcctctacttccttggtgaactgaaagatataagttttggggtgaatctcctgaaggcaccaccccgggtcaactctgagaggatggagcgaagcctaccattgcttatcttctatttcacaaagagcctccccaccagagacctacgaatgaggtccttcgcagcagagtcatttggaacaaggtctagggaaaagtcatccatctccacattttccaccatattcaccacctcgtccaatgcaactttagtggtagcattagccaaagattcgtccattagggaggttaagcagtagtgctagaaccactccgaaaggtgatagcgaaacttcgacaagaaagagtagataaaactaggaaaatagtaagaacaagtaagatgcaaagagatctttcagagacacaaaaatgagggttttaaaagttggaatatgggaaaagttgacccgaaaccctaaaaaggggttaaaaaacaaagtttttccaaacaagagatgtcgagacctcgctgtaccataacatttccctaccaatctgtacccaaaccaagggacgtgcaccaccatcacgcacatcaggaatgcagcattccaccaactcataagcgtattatgttataccttacaagttatgaagctttcctcttatagaaaaaataaaataagttatcaagttagctattattttgcatattgttacacgagttagctattagtttttcacttttgttattgaacaattttaaattattaagttatttgagctatgaaattattgatgttattggagttataatagttatttagatgattgaatgaatactcgtggatttactatagacattaattacatttgacaagataagtccttttacattttttttaaaaaaaaaattcggttgaaaatatttttgttatagtaactattgttaatctttttttataatttctatctattgatgcttatttagtttatttgtagagaaaataaagtataaatttacaataatatttatttatcatttttatttttcatcccactaatgatagtttgtttatgcatgtgccgttaaaatacaatcgtcccttcaaacttctagagaaaggatagcaagttttcattataaattgtgtgacactaatgacattagattgcgatctgttactaagattttacaattgtaatttctttttctatcgtatttctctactcttataattttaagatcattgttagaaatttttacaagtttgtcatctaaatttctatgagtgttcctaatctgtgttgttcatgaattagttgtacatactcttctgattgatgaacaacttatttggctagatatgaagatccatatattttttgttggatgtatagtactacaacatttttactcagtaccggcggaagtaataccggcggagccaaactgccggtattaat

SEQ ID NO: 115767 - DNA, 2336 bp, Cannabis sativa
tatgatggagaaccatatcaattgtatcggtgtgaactcaaccagatagccaaggcatggctatactttgttagtgcaaggatgctcccgaacaaacagaaacttatgctaacatcattgcccagaattggtcttcgaatactttagctctagatgcccaattaatccaaaacaatactgcttgctctactcaattatcttcttggcatcgtgctaaatttggagatctccccaaaaagataaagattgcccaagataaagtggcggcccttaacaacttaaaagatactagtcgtaatcatttcgacatgttgaaatctagtgaatctattttggatgagctttggctaaggaggaggattattggaaacaacgttccagagtttcttggcttaaatctggtgattcaaacacccgtttttttcaccaaaaagccaacaataggcgttcttataacacaaccaaatcactggtggatgatcaaggttatgagcattctgctcagaaagatattggcaaaatcattgaaagctacttcaagaatattttcacaacggatggtgttgattcgaaagctctcaatcatgttatctccacagttccttgtactattacagcagatgtcaatcaactcctcaatctaccgtacacagttgacgatgttttcttagctcttaaatctatgagtgatgatagcagtcctagaatttatggtatgtcggttatgttttatactaactactggcatattgttggagatttagtgtcaaaggttgttctcaatgttctcaatgatggggctgatccatctatttttattacattgataccaaaagtcaagaaaccaaggagtttgtcttaattaagaccaatcagcctctgcaatataaactggtttctaaagctattgtggttcgtttaaagccttctctattaatggtgatttcagaatcgcaaagtgctttcttacaatccaagctcattacagacaatgttttagtggcatttgaactattacattcactaaaacatcttaaacaagggaaagaaggttatgcggctatgaagcttgatatgagtaaggcctttgatagggtggagtggcattttctccgttcaatgatgattgttatgggttttgcctatccgattattgatcttattcaacgatgtctcaacagtgtttcatattattttttggttaatggatcaattcatggtaatgtcattcctagccgtggtattcgtcaaggagatccgctcttgccgtatttattcatcatttatgccgaagggctttcaaggctttttcaatatgaggaaaatcgtggtcatttacaaggacttagagttgctcgtggtgctccattagtgtcccatttatttttttgacgatagccttgttttgagtcatgctattacaaggtctattgaagctgttaagcgttctattgactactactgccgtgcttcagggcaaagataaaattttgacaaatcagtactttccttctctccaaacacactacctcccattcaaagcaatgctcaacaaacaatgcaaatgccaattaagccttgccatgaacgatacctgggcttaccatcttattcaggaagagacaaaaaagttctatttggggaatcaaagataaattattgaatcttctatcagtttggcaggagcaattattttcaattggtggtaaggaagtgcttataaaagcagtagctcaatccataccaacttatgctatgagctgctttcaactttcaaaatctttgatccgccaaatagaggttatgatgaataaattctggtggcgttcaaattcatcatcttcaggcataaattggaaaacttggaatgttctgtgccattcgaaagtagaagggggaacgggattcaaaagttttgtgcactttaaccaagccttattagccaaacaagcttggctaattttttttaatccctcatcactgctttcccgcattcttaaagcacggtacttcaaaatttcttcctttttagatgttgaattaggaccttatccatctctaactttgagaaacatcgtttgggggaaggaattgctctctaaaggtttgtgttggaaagttggaaatggaacacaaatccaatgtgcttcagatgcttggctgcctggtatctgaatttaggccgttggtttataatggtacagatagaacaatgaaggtctcatagttaatcacaccttctcgacaatggtgattactctgggggtggagtattgattttggagaagtgtaaaaatcgatctgaatctctaactctaccagtgagactgaatgct

SEQ ID NO: 115768 - DNA, 2642 bp, Cannabis sativa
accattacatatctttttaatatggtatgtttttgcagtcatacccatctatgactgactaccaaaagtcagggcttcataaatgggcaggtgatgctaacaacttcaccgaaatggggccatacatagagttgatcacttcaccaaacaacccagatgggtttgtgagacactcttgcgtgaacaagactggtggagcaatgatatacgatcttgcttattactggccccagtacacccccatatcttcccctgctgacaacgacttatcgttgttcacagtctccaagagcaccggacacgctggcattcgaattgggtgagaacaacaacaacattaatccaaatatgctcttatgctcatgttggtactcatttttctaccctcatgttttttgcagttgggctctggtgaaagaccctgaggtagccagacgaatgaccaaattcgtggagctcaacacgattggtgtgtctaaggactcccagattcgagctgccaagatactcgaagttgtagcagacagctgcgagcaatcaggcagctcggattttgaacagtccttctttgagttcagttaccatctcatggaaaagagatggcaacaactcagagagactgtgagtaagagcggaggcatctttagcttgcctcagttttctcctgccttctgccatttccacagtaaagtcctgcagcctcatcctggtaatgaaacaatcaaaaagtgttataatgatccaatactaattttgcatgaattaacatttatttaatgataatgcatacttaacatatgcagcttttgcgtggctaagatgtaaagatggcattgaggactgcgaaagcttccttaaaggccacaaaatattgacacgaggagggcggcattttggcgcgagctcgagttatgttcgggttagcatgttggatagggatgatacctacaaaatgtttcttaaaagactgtcctctatccgctgatcatggtgccggatgccgtgttttcctcctcatgtggagcaagagaagtgtctgagctgcaactgcaatgcaatgggggaagaaataaggtgtcaagaaaataaaatatgaggaaaatgtaaaagaaaaaaaatttatttatttgtagagtaaaagaaattaaatatagtttttagtgtttgtgttatgtgtattagagtttgtaatagttgatatttcttaatgaaattttgtagttcaaattaaatattatcagttttcgatgtatgttcttattactgtattttcattttgaatcattttttaaaaagaatactagggagaggatcataataaaaagtacaaagaacagaaacagaacaatgaaaaattcaataaggccaatatttatgttgttattcaatgaattcatttattaatctaatatatgttttaaaagaaaaggctaaacatatttaactcaaatgcataaattcattcttaaattattaaaagaaaaaattgttagaaaaactaataatgacaagatactaggttgtatataatttaaaatacaataataatatataataattatgtataggaatgatttataacaattatcgtaatttgatagtacaatactatcaattaagttttccttcctaaattaaaagtaattttatacatctaattatcaaaagtatacaattgtaatgagaaaatatgcatttatagagttactaatgagagttagctacataattttagttagattgagtctactcattaaagacttctgtttcaactttatacacatagatgatgttaaacccattaactatttattaatcactaataatatggattaacacaacaaaatactatccaatcaacccaaatttaaatagagaaaattacacttactatgagatttttaaagtttttatgttaaatatgacacttttaaatttgaccaatttatataatattttttaggtctttttatagtatttgatttgtcatatatatgtaaattaggttttcaaatctcatatttaatatttttatttgtttaggtagttttatttgttactggtgcccaaaaagttgccagagtttgctattggtaccgaaaaaatcattgaagtagctgtcggtgccggaaaagttgttggagttgttgccgacgctgaaaaatttgtcagaattggcattgtcgctaaaaaataccaagaaactaatttcttgatgaagaaatgaagaaaccacttttattggtgagttttttggtgacattaccaatcttttctgacactggcagttactctggcgacttttccggtaccgacagcaaaaattcatcgaaattagcatagtcaccgaaaaaattaccaagaaaccagtttcttagtaatttttctggtgattttttggtaattttttcgataatttttctgacgataatgccaattgtgacgacttttaaggcatcgcgcaactccgacaactttttcgacactgacagctactccgacgactttttcggtaccaacagcaaactctggaaaattcgtcggaattggcattgtcaccggaaaaatcaccaagatatttttcggtgattttttctggcgataatgccaatttcgatgactttttcggcgccagcagcaac

SEQ ID NO: 115769 - DNA, 2012 bp, Cannabis sativa
  modified_base (61)..(72): a, c, t, g, unknown or other
  modified_base (1406)..(1408): a, c, t, g, unknown or other
  modified_base (1771)..(1774): a, c, t, g, unknown or other
gtgtttattatcattttagaaagttcatatttaggttgttaaataacatacttgtgagtannnnnnnnnnnntggtaaaataaattccaacagcagggctgagtgacttcacaaggagaatggccgagtgacttcacaaagagcgtggccgagtgacttcacaaggatcatggtcgagtgactttacaaggataatagtcgagtgactttataaggagcatggctgagtgactttgtaatgagctgggctgagtgtcttcacaaggagcatggtcgattgacttcataaggatcctggccgagtgacattacaaggagcatgacttattgacattctcccttgacttggtcgagggactttaaggataccttggccgagtgacttccttgaagccttgtagtccttctatatttttcagcaaaactccattaatattaatctgatgtagatgattctagttcttatagaaaaccaagaaagagatctacaaagctgagatttccttggatgagtgacattctcccttgacttggccaagtgacttcaaggacaccttgaccgagtgatctccttgaagtcttgtaccctttttgtattttgagcataactccatcaatatgaattcgatttggatgattctagtttctataaaagctaagaaagagatctacaaagtcgagatgtcctttgccaagtgacttcaaggtcatcttggccgagtaaccatacacgtacgcttggccatgtggcccatcactatgtgagcatgtaccatgctagtgggcttgcttatttctctgacatagccatctcgttgctaatatttaaagctgaactattttgtattttgggttctcctttgaatacttaagagaattagccttgttaatatttagggttaacaagcacaccaccaatgagcgcaattatttgaagcatgaaattgggaatctatttagagctgaacacttgggctagtggatccaaatcctaattatctttcttggacaaggggttgttcacgagaaattgctcattttgggatagcagggagttgtaaaccctccacagagggtaggtcggcctcaagctttcggaacacaactttcggccttacttactctgccagctcatgttgtagtagcagttctagctcttggaccagggaactcatatcacctaggcatagctccaccaaccattgatgggcatgtgaccacaatctacggaggaccacatatttcaggaagcacctgaaactcacaaaagagatatttgaagtaggagaatgaaggagagatgtgcactttagtacagtcaccgttgcaacgtaaaaaaaaaatgatgaacttgccaatcacttttacagagaagaccctattattgagttttatgccctaaatannnctctatttcaatgtaatcttttattttcatttatcaataaagaacatgatttattttcattacttattcaatgtgttattcggttcatgtgatcatttatttgatttataaattcatctaaatccatagtatattaatattcttgtttattgtattgtcaacacagtggaaagtaatcaagattgttggatgaaatgtattgctatggtttattagtacatagagtttaactgataggataatctacaatttagtttacttgcaccttggataagtgttatgtactttccagtgcattagttaaagtaagcttggattcgatgtatggagtgaaacaccctaactagcataggcgtgtcagcnnnnttttaaacgtactgtgcggctcgttgctaatcaacgaggttattgaaaaacgtgaataattaaaatttgcttatttaattacaaacttagagtattacatatacataatttcgggatcccgtttacaaaatactttttaaaagtttgttatacacgtaaacaaaagtttgtcgcccatcgactatacagcaaaagcctcgatgtcccaaagatcgtacgctctaggcctacccgcccc

SEQ ID NO: 115770 - DNA, 4431 bp, Cannabis sativa
ggccttaacctctgactgaaaatctaagttgcctaagctgcctctaagctagaaacctgatctcaagtatctgataaactctttctcttcctcattctcccccacacgccaccttaaagttgtccaacatcctaggcttccaacacttgagttttgccaggcgtttaatcattaattgtaatcctaagagtactatagcagatcccacttatagcgatctagatagtaattccctcagtataatacaactaaaaggggagtgagacattacccgctatgacatgggggtcgaacctctacaacaaatcttattgtctattgcttttcattcttatttgtgcacacacatggcaagcatcggatctgcacgaacccgctgtcgattggtcatttttcgagatcaacatatatatataaattaactgtcatacacagtcacaccacagacattgcaacaaagaatttatctaaccaattaaggttagttgaaatttaattatattcacattaaatataaaaatattaattttaaaatacatacatatattttctaaaaatttaaccaattgaggttagctaaatcaaatttattaattcaaacatttaaatattagttttaaaactgcatatatatatattccattttttttttttatattagatcactatttttatatgtatttttcgtctaaattttctaatcacaccacaataatgttaacatcaacaatttttttcttagaaaaaataaataaagcgtaatcgaaatggtgtgtatgcaatgattgctatatttctgagaagttttaccaaataaaaataaaaagtttggaaagatttttgccacataaaaattcattagataaaactctgtcataccactagtttagggaaaatttattatttctcaatttctctacaattaatttcgaacatacttaagaagaaaaggaaaaattgagccattgcacacttccttaaaaaaaaaaattgtgtgctatgcctatcacatttacaaattagctcacttaaccttttcaaaattgttgtttctccacttgctttttgggataggttctagttttaaacaccttaaactctttgttgacaaatgcaaccaggaaagggatttgcatagaaattctcctcaagttttgaggagtctcgagagtgtgaaataggccttggttttggtcctccgattctcttctcatgaaagctcttgaccaaatatgaaaacttttcccaacttatgttacccttgtctaacttatcaatcagtttgactaaattttgcctgcaaaaaaccaaaacaataataataataattaaataaataaaaaaaaaaaaaagaagaagaagaagatagtttgtcattgtgtaggtaatcaacttaaaatggtacacagttatcatatataaattgtagaaggattttttagttgaagaagataacctgtcagggctaatggttttcctaaaaccctcatacaccctatgaccttgcaatgctctagccatgttgccatcatatgagtaaacaaacacatcactttccaatgccacaacatagtctatagcagcaagcttattctgtgaattcatgaaaggcattaactcttcctctgttgctaagctgagcttagtagacaaattaggaaacttttgtttaagcgattgcataccgtctttaccataaatttcaccagaaactatgtaaatttgtgtatcagatggatatccaagggccataagaaatatggccacttctcttggtgtcattggacaattcccatggagtctttggaccttagcattgatcttcttttctttccaatgctttgtctcatacctcatttttgtaagctcttcatgctcatttatggtaagcttgtggctgcagcctgtgaaagctagcatatccttttcatatctacaagaaaacaataacaacaaacagatttgatagttttaaggctctatatgtagatatatgagttaattatcgtgatagtgacacttgtttttgattaaaaaaactcaccttaaatgtaaagcaatgtaaggatttttattccttcttaatctttcaactaagatcctcccaagttcttcgatatcttttctaaattttaatgcatcatacattgcccgacatcgaagcctttgaatagaaaattgtacattgttagctagcctcgaattcgtttgcagaaactttatcactttctctctctttattagttgtttttcacgcatgtctctatagtaagagagctgcaaaaaaaataaggtttacgtatcaatatgtgtaatttaatcattcatgtcatcgaaaaataaatcaatgattaaacaaacattaataaaatgtcatatatatatatatatacatatatgtttacctttgaccaagaaactggatttttagtaaggggcttgactgattcatattccggtggaagtgagtctataattgttatatcatcctttaaaacttcaacaaacttctcccagtcaaagatttccttaaagtcactggaaccatcaaagtagtgaattagtagatattcttaatcaaattagcatttgtatttgaacttataataattagttaaaagaaagttatgaaatatcaagctaaccttgaatcattccaataggaactatgatctaaagtaggcatgactaaggttgcattcataacttttgctattgcaaccatgtcacttatctacaatgattgttaaatttcccaagattaagaaaaccccaaataaaaattgaaagtactaaataataattactattacttatatatacaaaaaataaaaataaaaaacaaacatacatacatattaccccaagtttcatttgattcaaacccccattggcatgagctagaataaagccatctgttgctgttccattctctacaattataataacaaacaacaacaataattaatgataatatatgacatacatttcataaatgtatgtataaatagtttatttagtagaactacttactggcttccttctttgatcgattgacacatttctgaaatttctcactccttggtggcttccaaatttcaagatcacggtacggccgatactaaaaatatatatgaaaaaaaaaaacatttcactcatcaaaactaacatggtaacaattatttaaaatatataatataaaaaaattatttaaatataggttccccaacaaattctgtttcatatatttattattattattaccattttattatgaaataaatttgattggaaggtggaagtaatatgttgaaaggtggtggtagtagtggttgtggtggtaacttggagaatatttagaggagttgtggtggtgttgccgttggtgtaactgtaaggaggtgggagcatgaccactaatacatgaaataagacgatgatcgatatgaatgagaccaaagctacgacaccaacaacccctatagcccttcgctttttcatccatggccaccttattattgccggtttcacaaagctatgcattgatttacgtcgaccatttacatgaatcaacatattattattcctttaattaattaaggaaagagaagagagaagaaacacagaaccaaattattagatagttaattaattcataattaataatgatatataatgagaaaagacagatacatgagtgaaggaaggagttccacagaagagcaatgaatacaaaagagtcaaggagataaataatttgagagaaagcgcaaaatacgggcttatatttatgtgttttcataaatatgttttgtttaaatttaaattattttgataaattgagaataatactcaaattaaatcaaaaatcaaagctttaaatctactacagataatttttgtttttttattttccataatggagtgggggagctttttattcatttttttttccttttcaattttttaaaaatggcactccttactatattttaggaaatatttgttaacaaattcaagagcaacagattttataaagttgggtattatatgcttgggtaaatatcattttggaccctgtattttgcaaaagttaccgattgaattctctgttttgttaaatgacaaaatagaccataaattttccaaaatggtaaatttaggaccctgaactaattttttttttcaaaataaaatttaataataatctgatctaaaagtgttatgataaaactatttacattttctgtatctgttcgtattttcaagttggctatattaaaaaaaaaagttgtcaaaaattaagctcacggtcctatttgtgccattttgggaaaaaacagagttcattttgttatttaacaaaacagatggtctaattggtaactgttgctcctaaattcgcctaatatacgtggaccagtcaagagg

SEQ ID NO: 115771 - DNA, 1086 bp, Cannabis sativa
acgctgaaagggcttaaaaaccgcctctaaagggtgtttttgtagtagtgtctctttacaaagccctctaagatctgtaatggggggtttgaacccaagacataacaaacaatagatggcttccagtaactcacctcctcttcaatatcttctggttcaatttttactctactgctatggtttggagaatcaaaagccttccccaaatttcgaacaacagaagtagaatgcagaatagggggaattgtgctcaccttgtgcgagagcactgttgcattgctcattggcatgaattaacatctgaaagtcttgtcatgcactttccatcctttgtagctcctgtagtgacgatctaggagacagtggaggcttgaagaggtcctgcatcgaagcactccttctccctgttaggtcatcaatgtcatttccctcctcctctgaaaactctagtggatctactccaatggcttcttcaatggattcagttcttgtcgcctttgttacagatgtttctcctttcttcttcctagtcgcgatagccttcccacgcccccttccccttgatttcgccatggcactagcaagaagctgcaagcgaaagagagagaagcggctgtctttctttcttgcaagtgttgacaagttcttgcaattaattattttaaactttattttttatatcataaattattcaaaaaaaaaaaaaaaatctaaaaagaggtgggatgcctataacatgtatgttgtagtttgtcatataaaaaaaattaaattataatttttttcaaatgccaaaaatatagatatctctacgggtaggaataaaaatgacaccttactcccatgatatatatttactttttttagttcaattagctaatttattacttttttttagctaatttattgcttttaacatgttggttattgctttcgaagaaaatttgggctttgttttatattgatgtgtaatattttaatggataaatatcattttgcatattttgtaagggttattttattttatttttttgaaaagaagaagaaacttcattaacataagtcatccaaaactaaggatgaaat

SEQ ID NO: 115772 - DNA, 927 bp, Cannabis sativa
ttgaaaaatattttcacttttccacttttaaaaataaaacactaattaaaaaagtgttaccaaacgccaccttaaattttcatttcatgattttaaatcgcgaaccaatcaagctttagtttagaatgtgattgggattataatataaaaagctaagttgatacaaaataaggaagggtagatgattcgtagtagagaatagagagcacacatgtaatccattagaggagcacctatatatcttaatagaatatcctttgcattacaaatttacaatatcacatttttcttttattaaccaaggattgggagtacacatgttttttattaaccaatgatttacaaaaatgtctttataacatcattacaatataacatttttaaagtatgctataactttccttcaactagaaagatgctggttcgtccatatagtactcttttaagtgcaattaatgacatttcatatgtattatgtattggtcatcataaccaagaaagaagagcaatcataaattgttcattgggactaatctcaatttatgcatatattaaaaaaatgcaaggaaaaggagaatgataaaatactttgtctccactacaagccaattaattgtcctttacgattcaactatttttttttttttaagaattggtatttggcactaataaattactttctataaatagatgattggttactaatatttcttaaaaattatttttttcgggtatattgaattcgatatttaattatccgaataacagtatcacatactagagactaataatgtcttttagtaattctctttttctttatatgtatttgttatttaaatggatattgttgtttgataataattgtgtctaacactcatggccggccctgagtaaaggagggctaggcctgtgcctagggcccaccta

SEQ ID NO: 115773 - DNA, 3175 bp, Cannabis sativa
  modified_base (2157)..(2165): a, c, t, g, unknown or other
  modified_base (2252)..(2253): a, c, t, g, unknown or other
aaataaaataatatataaattatataattatataattaaatttgaaaaaattgaaattccctcacttttggcgtcggttcctcaaaaccctttagcgtcgccctgatctgcgtcggtatcaaattttgcaaaaaccgacgctgaaagggcttaaaaactgcctctaaagggggttttcgtagtagtgtaaccttctgattcgaaccgcttcagatcgaagaagacctaacaaataaaataggaaagtataacaaagacccttcgggtgagttattcggatatttatgtaagggcattccaagagacgtcgcaaaagggtattctaatgtggtgatcctctgaaactaaaccctgcaatgttaggaccttcttccctaccgtcagatcataagagtgcccacaccactaaggggaacataccctttatctgacaactctaacacctacactacgcaaaggcaacccacacttgccacctgtcaacatcaggtgtgttgtctgtgttttcgacaagggacacgtggactcaagataactatttaaagcccattcgtgggaccttaacaacaagaattgggctaagcccaatatcaacctggccttctaagaagataattactcagacaactcttcgccaaggctattccgtgtccaaaaggaccctagctatgtgtaaccagaagaaccctctggtgtgtacatggaagacaactggtgtttcatgtttactatttcgtgtagaataaggaaatcattttcctaagatgtcgggcagagaataaatatcaagctagaataaaaaactatataattaaagatcaagtaattaatattgcatttattatcaacaatcatgggacacagtataaatagttgtaacattgatcaacatgccaagttagtatacagtcactacctcatgtgatgggcttacctaataagcccaaagtgatgaacaatttgtaaactccctattactgggaaaaggtaacttaatatgacctattactctataaatacgcattgaattcttcatgcaaaaggttggaattttttagctcacaagcttgagaagagaatagagtgttcatattcattataatcccttagacttttgtagcccctcaatcggtttcaataaatttctttcttcttgaatctgaggatcaagatcatcatccttcttctcgccttcctcaatcatgattgccattagctggtgaccgacctttctattctgcaactctatgtgatagcattcgccagccagtatttggtcaccttgcaccactcccacaccaatcggtgtctaaaacttcagcgataagtgcttaattgaactaattgcccctagtccaattaacactcgtcgacccagcaatatgttgtaggatgatggcaagtcaacaacaagaaagtcttgcatgatagtggtagataaatgtgcttttcccatggttaatgggagcttgattattccttgaatggcgacactgtcgcctgtaaatccagatagatttaccatgcaaggttttcatttggctttttcaagtcccattttcttcagtgtatccttataaaggatgctcactgaacttttgttgtccactagctccctttttatccttttcttggtgaaccaatggatcgacgcgaggatacctcacgtgttttgcatcttcttccgaaaacacaatcggaggttcctcagtcttagcttttttagaaagttctggagtaaaagcacactgctcattcttaacttcctatacatatctcttttggtcattgttactttcccctgcaatatgtggccctcccgagataaccagaatattctctccttcaagaggaggaggttgtaattcttggttgcctgggttattgggcagatttggcttgttttgtccattgccttatcttttcacatattgctaggggtgttcgcggtgtgggtgtgcgatttttgaccattttttaaaccaacacgcacatgcgatttttttaatttcccaaaccgcacccgcaccgcgaaactaaaaaactgcaccgcaaaaaatggtgtggtgcggtgcggtttttgcagttaggactatcaccaataattaatatatcacaaagataataaaccttgagcaacacttgtcaaaaataccnnnnnnnnngaaaataaatatgaaaaaaaataagtttcaataacacagtaattagcgggctttgagttggatattcacatattggacctaaataanntataaaaatcggtatttttataatgtgcggtgcggtacggtttgaaccgcatattaacaattcaaaatcgctaactgcaccgcactatgcggtttaggaaaaatttaaactgcgaccgcacctcaaaaaatttcaaactgcatttttttgcgatgcagtgtggtgcgggcagtttgagcggtttgatgaacacccttacatattgctgaaagtgacctcgcgcgatgagactctctatctcgtctttcagttgacgacactcctctgtcgtatgcctaatgtccttgtgatacttacaaaattcaattgcttctctcttatttctcgcatgcctcatgggctcaggtttacgaaatgcgaccctatgctcatgtgcgagatagatgttttcctgaattttattaagctcagtgtaaacggtgtagattggtacgtatttgtcatgcttcttttgctttttcttgtccttggctgactccttagagttatctttcctctttgaactagaggctcctagattgttagccttggccgagacggtgcttgtcgagacagtgctgggtttacttcccgagccagtctttaacaacttcatctcttttcttgctttctcttttcgaaaaaacacttgagctccttcattgaactcactaatgtttttcattgggcgaccctgcagatcatcccatagcttgcttccagcagtggaaagatcagtcgtgatccctgcctaaagagcagtaagctgggtactatcgtccaagtttctaaccctcgcagaagttgtgctaaaacaacttaagtaggccttaagtgtctcacccaggtgctgatttatgttagtgagacaagacgcctcgggtcacctatcccttgctgcctcgcagactggcagctctcctaagacgacatttttcaatgg

SEQ ID NO: 115774 - DNA, 1129 bp, Cannabis sativa
gcatttgcgtttcataattctactactattcaatattgtttgattttctccttcaaaaagaaaagaaaaatcatttgctttagtcaaaactcttggctctgcttaatacataaatgtacatttatttgggggggaaatgtgtcctagtccctacctcccacataatgcattacattagactaaggttcataataataagaatatgatgaatcttacacatttaagactaataattacgatttgattataaataattgcataccattacctttaggaaacatctgaaagtctagaggagaaaaagctataggttagggtaggtcctaaagcattaagaattggtaatttttgccacaggcccacatgaccaaccagtcaattttgtagtcttttatttatttatttatttaaatgtcaattttgtagtctttaaacttagaaggtttatcattacttcggccaacatggttcatacttatagagctgtgtggaaattaatgctcatgttcatctaccataggattaggagcttaggaatttcttgagttatgtttttcacacacacattcaaattcagtagtgacaaaggtatggaattcctatgcaactttaatgcgtgcatctatctaccctcgccccattattaacttgcatttatttatgggctgttttaatggttgacagagtatggcaggttacgcacacccaccatttcgtacaaattcaaattcagacttgagaactttgaactgttcaaatctaaaattttaaaggatacaatatgttatcaaattataagactatattatattgaaaaggaaaaagatattggttagatatagtactagtatagcagtgttgttggtaaatgccatacacaaaggctaacagaaaacaaacaaaccccactttgcctcgaaactgaattttctgatctattaaatattgacttgagatgaatttggaagaagggaaatcattctagcaaggtactaattgttgtaagttgtaactcaaatccctttttcgtaaaagaaaagtttactgccattcatatttggtttggtgactaatcattagacagtagtgtatatactatatattctatcattatataaaattaaaggca

SEQ ID NO: 115775 - DNA, 1349 bp, Cannabis sativa
  modified_base (1304)..(1324): a, c, t, g, unknown or other
caatactttaaatttaattatttgtttaatccattagatcataatcattagaagggcattaaatttgcaaacatatatatttttgaatatttctcgagctgataaaactatattgaccccattatgatgttagaaagttttcaaattagcatataagtaatcatattcttagccatgcatgatgataaaaaagtgcacatgtatagatcttcactatgaagactttcttttgtaaatctttattaattattaaagaagagattagggatataattacaatatattcattgtaacaatctttaatattattcttatattatatgtgtattgattaattaatgaagctttattaagtagaattaatccctagctaataggtgtgcttaagaaaaagatgatgattctcttccaattcaaaaggtctttaattcccactagctggaatgcaatggagatgcttcattatctagttaaagaccattaaaatgctccattagagtaaagagagaatatgcctatataatatatatatatgattaatcataagctttttaattatgcattcttgaagagtagtactaggaggacattctccaatcaagactaaaaaaagtaggcttataaggaacctaaacccccttaaaaaaggtccacccacttatttttatatattaagaatagatgtaatgaaatttattatatttgtttatgtatgtgtaatttttattattattattaattggttttgagatcaaatttcaaatattttaatatgcacttaatctatttttacatttagagcatttttactcatactctctaaattttagttattttaactaaaaagttatttttgagaatgatcatatttttctatctatttacacttactttagctaacattcactattttaatattttatttaaaattttaaattttgaatatagatggtatctcattaaaattataatataataaataatatcttactaaaataatataattttttttttcggaaataaatagagtttgctacatctaacgagttccctattcttttagctaatatagtgagacaatattagtatcgtttgaacttgaaatttacaattttgttttaattggctagctattataaatttataactaaggagctcagatttatttaagatgagtatgttattaataacataatatctaagctaaaaaaaaagtcatttatgattcatatttaagaataatgagtcaaaataaatacttgtgatcaagctgtctaaacttgatgtaaagaccgcttagtttnnnnnnnnnnnnnnnnnnnnnttatgtttaattatgaaaattattt

SEQ ID NO: 115776 - DNA, 3453 bp, Cannabis sativa
aacaatctcaatagttcgggggaatttctaacggtcaaaaaagttcaggggcacgatttagtacatgtcaaagttcggggaaaaaaaattactaattaaccttaaaacaataagcatatgcatataagtgttttactagctaatgaaactaaatgaacaagagcatgcatatatatatatatataaatattttgaaaaaaaaaagggcttttctataaactaaagagacattttttttttcaaattgtctagaaaccccaccacactagaaaacactagtaaatattcttcttattctacaattgtttctttttctaaacatgcatagaaaggtttgcatgcgaaagctcctttaaccattcatacgttcggtgatgcgacatggcttgcttttgccgttgcttttgatctgcattattatgttgctgcaccttcttattactaccttttatctttgtagtcgacgacgtcgttttggattcttcatgagcttgttgttgtcccaaactatgcttcgcaacacttgtaccactacaattccccgcattaggagttgtacctttgctctttaccaagatgacgttgggcgctactactgcgtctgccgagcatttgcatccgcttaagaatttcatcctcttctgcttatccacgttcaaaacggcgccgttctccttctccccagttgtactataattattattaacgctgttatttcgactaacagaaggagaagaagaagaagaactacctttggtattaatcatattattcactcgactgttgctgcgaatgaaattaaccttattattcaattcttgaaattcaatatcgggtgtccgtaccaaacccaaccgaaaaaaatcccacatcgaaaatttatgcttacgcggagtactattaatactaccgactcgctctaacctggcgctcgaagcgcggatctgaggctttggactcgggtggaagaagaaatggtttctgtttcccaaccttggctctgaagtgactcgagttatggctatggtggtcgagtgttgggtacttctactgctacagctactgctccgactgcttatgaattcggatcctgatccgagctttctggtcgtgtcgttccgaaccgggccagcatcggagcttacagaaagtctgagcggtagaatttggccgccgaagaataattcgtcggcggtgcacatttcggatgccgtggagatagagccaccaaacgcgaactcatcatcctgcgtttcgatgacactgctagtagtaacgacgtcgttttttgcatcgtacaagtcttcgacgagaagatcacaaagtgagacatcttcttcctcttgatgatcatcaaccccagaatttgaatgatcttttcccatagagaagaagaagaagaagaagaataagagtagtatttttgttccaatgagtcacatgtaataaagaccctgtataagttataactaaagacaaagacaaagaaggaatatatatataaaaacatataagagagagtgacgtagctatagatacataaaaatatatatatatatttgaatatttgaaaagtgagagaagaatgtgtctctttattatctttgtttgggagctgagaaatttaaaactgtgcctagcttttaaagggggcaaccactgtgtcatacgttctctgcgctctcgttttcattgtttattgttctttttttacaacaccagaagaagtgggcctcttaatttctaatatctcccaaagttacatacataaataaatatatataatttaaattttatactttgaggtggtggattggtatacaaagttctaatttttccacatttttttttatatatattatacatgaaagaaattttttcgaaggctctatctattagtgaatgggcaatgaatacattttttgtttgttttttatttaaaaacgaaaaagaaaaaaaaataaagttacacttacacacatgggagtttagagctcagcggcgccgtacactataataatatatagtataaataagagaatttattagttggttttatattatgtaataattaattaacgttcttaattataatttcatgacagttataaatataagtaattatgtatagaattagaaagtagaaactagaaaccagaaagttactattatgagggtccattcattagttaaatgttcctctctcaaaagaagataaatattttggtcgataaattttacaaaggcattggtaccattgtttcaccgcagagaggcaaaccttcaaaactaattattatttggtcccctttttttgttaacttgtaaatttttacttttaaattaaattaaaagtaatcaattgattgcacaaaatccatacattaaaaccgactcaattattatgccctatatatatattattagatattcataacccatttagcttattaatcactatattaatttgtgtcataattattaaccattaattatttttagttttgctttccacaaagtatatttatataaaaatatattatgtacatatatgaactgtatccacatgtgaatgatttgatagtggggatttatctccaccaatattttgtagattagcaattatagtttgattaatagatactatatagctattctccgaatccgaggctcattttaatactataattgccattaatcttatgcatgctccaaaataactaatcatttttttgcctaacaatcatgttcgagcctttgtggagcaccactatttttttttttttttgaaaataagcactgctctagcctctatcttcttcttctgttttattattattattattattactctatcttcattcttcaaatagataaataattaaggcaaaaaaaaaaaaaaaaaatcggcaactggcaagtagtctcgtaaaccaaataaatatttccttaaaaaaatctatgattttatgcttacttgttcacagtttggactcaaagtacatgatttacatatgaactaaataagtataattatttttatgtgttggatatatatttctagaataatatatattttaagtttatttaaaaatttattttttaattttaagtttattatttttcttacagccactactttacattcattatatataataagtaatgacactaattatattacatacttttcttcttgtagtgacatgcatgttatatgaatcatgaaatcatcaactttaaaattcaatccaattcaaagtcctttgattgccggatgtgattaataaagggaaatttaatttctacatcacaaatgttaaacactccttaatatataattaacaaaattaaatttaaaatcatttttaaaaatcactcttattaatttatatatataaaaaaaattattattttatattaatttttataattattttaattttatttttt

SEQ ID NO: 115777 - DNA, 1755 bp, Cannabis sativa
cgattatttactagcaaaatgagttcatcacagtgatgcatgctgtgccatgattcagatccaaatgtggtatgttgagagttgttgtgacagttctaacatgattgttcttactatcttcttcatggattgtggtgagcattgggggaaggctgtttgaaacaaattaagggaataggggattggtttttggtaatgagaaggtgtttggccacaaattttggatggttgatgagagtggaaatacaagaataacaaaacttattcacagatttaaattgtactagagaatctgcaggtaccaacaacatgattttctctataatttcacttggcaaatcacaaatcaaacctaagaacttaaaaattgcatcactaaataaacttgtctgttcattcataggacaatatatatacatactaaaatatccaataacaaaaaatatgataaatacaagtgtaactgaccttaattttttccttctcaatctgattttttaccctttgaaaaaataaaataaaaaatgcatgtaataaatattggtatgaagttaaaagcagaaaaggaaagattggttgaaaatggagtagaataaaattcaataattacttacttgtcttgtaatctcaaagttgtatctcatcaagaacaataacaacaagaagaagaagtggtggccaaatgatgaagatgataattttgtacatttaacacttaatccaaagaaaaaaaaaatgatgagtatgatggtggggtacgtggcaaaaaaccatgaagagttaactgatgacttgtaacttaatctttatggtttaaagaccaaaacaccccattgtcaaatctaaattgataagaatgtgtaatttatagataattcactatattaaatgtaaccaatattatagaattttcaagctcaatcaaatacaaggctccaaagttgtctctcgtagtaatctggagaggacttcactcttttcattttcttttccagtcttctgagatatttcaaactatagaaaaacaaaattctgaaaggcattaatgatgtttaaataataaatttgagcattgatatacaaatatgccactaatttgattctctttttccgtgttgctaaattactgaatttctttttctcagtgtagaaaaaataaaagtaatattgtattaaataataaataataataaaatattatattaattattataattataaattttaatacaatattagtcatattatttaatatataataaataacttgcattagtttatattaatatttataaaaattttaaggtcaatctcggtcctgatctcagtctcagattaaggattcggattcagacctgatcttgaaccccgtaccagaacttagacccaaattctgaccagactcctgacctgaactcgaactcggactcacaccgaccatgactccagaccgtgactcaaccccgaacccaagttcaggcccggggtccaagtccttattcgggtttaggtccggtctggggttcgagattcaggatccgagtcccgatctcagtccatgatccaaggtccgggtttgagtccaaatttaagaccgaaacatgttcggggttcgagatttaagtctggattcaaggtccgagttcaagctgtagttagatttggggttgagtttattgtaaagtttttataattttacataacctattagtatacgttaatagcaaacataatatattgtattaaataatacta

SEQ ID NO: 115778 - DNA, 3086 bp, Cannabis sativa
  modified_base (1967)..(1985): a, c, t, g, unknown or other
  modified_base (2970)..(2988): a, c, t, g, unknown or other
ctctctctctctctccagtctctcacgccacacactacaatatggttgtgaggttcttgttctttcctatctcatcatagtatctcatgagttgagaatatattgtaattacaaaattatactcattcaactgaatctaatagcccactctattcctgagtgttgaggctggcttggaagattgtagtgtgaactcttcaacaagttcttggattggttgttcgataataataccaaaagatagtgaggatcctctgataggctacaagaggtattgttttcttttcatgtagtttaaatttaatctatatatattatgttaagatccttgggattatgattcatattggattaaattatattttaatcaaatctgcttttgcttttctaactctgatatggaccataaatacaaacatgtctctcaagtatcctagggaaatggctaagtagatcgcccaaataaagttgttgaaaaccaaaactaatgtgagacaacacataggatgtcaacctaggtgcctagtacttgtataggacctacgttgagccctgagatgtccatgtgacatcctctttcatcattttagggtcattgagacctatttgttgaaggataacactaagaaatgatttcactggatctttggtgcttacatgggtgccccaagcgtgcaggtaacactgccttatcctgggatgttgggcccccaatgttgtttccatcatgccacgtgtcaaaaatagtgtctaattaatcaagccaaagttttgggtaaacaccttaaaaggaccaagaaatcatgtcctcaatattcaaggtcttctaaagaacttgaatgatattctaaaaagagttagatatcaagtgtgacataaaatctccaccaccaattgagtgtgttactcaaagacaagtagtttcttttgagtaataaatacaattatagagctagtgaaaggaaaagaggccacgtgatatcttggatatccttaacacatatttttagaaatatatcattgagcgtgatatagtttgaaatctcttatactagtgtctatgatggcatatataataaaaggtatagaattgaatctaagaccaactatgtgagataattaattcatgatggaatcatacaaactcttatgtgaaaatataatggatctatttacaaatctttgagaagaaaagttgaggcgcacacgcaagagagacatctaaagggatggaactaaaactactcgcttaatagattcaccaataatggaaacccaatttttaccccatttttgtaagaaattcaatgggtaagaacaagtcattgataagtggatagtcaacacttaattggtcccatctaagaatggttagtgttggttgccacggacttgagggttaaccaaaaacttctaataaaatttagtttataataaacaagcatctctaagagaagcaaagatgatgcaagaattttacctatatgaacttaagcctattggtgcctctcataggagtagagtttttgtaatatcctggaaaatctaattgtgaataattaaagtttattatatattataggattaattagagagtaatgagtagggttatgatcttgttaatctaattcagcgtaaattatgaattttttcataagtgtatatataagtataatttattaattatgaagatttatttagaatatgtgggtataatgtaagttgtttatggaataaaaatattttcaagtttagtgaccttggagacccgatcagaggccaaaaatatcacaacaagtttatttagaaattttaatgggattattgagactagttagtttagaattatcagagtattttagggtactcgggattgaccaaataccctagggttagagatttcttagtggctaaaaataatcaaagtaatcctattataattaaatttatcattattattattattnnnnnnnnnnnnnnnnnnnttattattattattattactaaactttcagtttatatatttatatctatatgtataagataagtttgaactttaaaaacaaaaccctcatcaactcactttttcccttctcgagcaaaccaacaaagccaagactccaagtttttcttttgatttcttcccactctttttagctctttgatccattggtagtggaagttaggagtagccaggctggggtaaaggctaaagttaagatttggttcttttctttcatgaaaacttaggttctaaaggttgacttttggttctgtgattttaagggtttaagtgagcatttggtattgttattggggtattttggatttggttataatgctcttgttatgattttgtaactattttgagataagagtcaagtttgagcttttaagctcaaagcttggtctctcatagcagattttgattgagagcatggttttgatttttgttacgtagagaatgttgtatggataatgtatgatcgttctatgaaattcacaattatctggttagattttggtggggttttgagaagttgaaacaagatatttcccgttcctgtgaaaaatggtagaccgtttttggagtaggaaaaaatagtctaccgtttttggtatttatgggaggattgaaattcgtattatggccataacttttcactcgggtgtctgttttagacgttcttgttggaattttataccctaaataaaatccatttcaatatattcttgtatgttaccaatagaagattagaagttatttatgtttacatgtatttttcatgtttatgatttaatatataatttctattaaatccaatacatattataattcataattatagtgatgtcaatatagtggaagataattatgattatatgcttcaaaactttatgtcatgtgattcattagtgcactagatttatactaatatgatagctagtcagcgataaagcttacttacnnnnnnnnnnnnnnnnnnntcctttccagggtattggtaaaatatgctagtatcagatgtatggagtatacattggactgtaccaatattgatcttggtaaaaaaattataaactta

SEQ ID NO: 115779 - DNA, 1950 bp, Cannabis sativa
ttgttactcgggatcccgacccatgtgattattaatatataaattattaaaaaattaatttttcgagtttattattattattataaaatacgggcgttacaaaatataactccccaataaacatttacgaatttataaacatttattagagcatatctctaagggtactctatttttttagctaacaaattaaaatatagaactatttttaatgttgttattgttacttcaattatgttccttactttagtatttaattattttaacaatatttataattagaatttgttaaatataaattaattttataaaataataaaaaaaataatagtgttattgattaaaatattattaaaaaagttaaataaaaaagtaaggagattcttacgttgagagagttccttatccattttcgattatcaaaagttatttatgtatggttgaagttcattttttcaagtttcactccctattttaactaatgagcatggctagagatgctcttaaagcttgtaagcatttaccatttgttacaagtatcaaatttttgtaattatttttttttgtaccgtaaatttcaattcttgttttaaaaatattgcagtagtatatttcataattttttatatcacataataattgtttccagagtaaaaaaattagtttaatattatatgttagaggaattttaacaacaaaaaaaaaaaaaaaaacatatgagtattggagcaatacaagaacacttacatataaaaaaaaaatgatgagtactcaaaataataagtaataaaatgtaaagaaaataacaaagacagaaagggaactataatggttcaccaaatcttgaattgcctagttcactattcaaaaatttgtgattaggttatatacaaaacagatgttggtttacataattcatcattaattgattgttttgcacattaattacaacaaataaattaaatgctttaatttgcaacataatcattgatagatttcagtttttacgttactcttgttacatattattttacacatctattatgtgagtttatatgtatttatacttagtgtacaaatataataatttaaattgttttcaagacatgtcattctggttcacgctaacttaagtctacttgtatttatagtttgagattatactcgcttatagataaaaaaatatccatttaataaaaacatatttagaaaatttaaagatttcttcttaataatattccaaatttattagtactatgattggtaagaaaacaagaaattaatagagttggaaaattttcaaggattgaaaaacaaattctatattgatgaaaattactattttgtttatataagaatacccattttggttttgtttacttttggatagataaataatggtggacgttgtctctaattttttttcttatttcaaaaatcaccattttaatgcaaatcacaagagtcgaggattaagaaaatttcattaattaaatagcatcaaccataaatttgcaatacacaaaggataatcagaccatcaaaataaaaagaatatttagttaaaacatgagcaaccacattaactgttttagaacaaatataaaaattcataataaaaaactaatgtgaaacaaacaataaatcattaagaataagttctaaataaaagtaagcatagaaaaattattgaatttaagaatatcggacaatattgtctcacatggatcaaatgtaaaaatattgagccatatataagaatatgagctacttcactcatcaccaattggttttgatatggaactccataattttcaacaaggtatcagagccatatccctagcgggctatccacacatatgttagccagccgcaagcgagcaaaatggtactaccaactattgggttttatgccctaaataaaacgaatttcaatataatcagatttac

SEQ ID NO: 115780 - DNA, 1634 bp, Cannabis sativa
tagttagggtgttacatatcctctccttatagaaattttgttctaaaaaattacttgaatagctcagggtactaacactgcatttacgactccatctcccaaactgcttctgctatcttgttgttcgtccacgtcacttaaaccagcagaatagtcttattccaaaaaaaaaaattaatctctttcatatctaagactaaacatgtttttcttcataagataagtcaaactagatctttaagttctcgtagctcaaaacatttgtagagtatgatacatatactttctaagcatcgagaggtataacacattatggactccagataatgttaaaggtagggctagtcgataggctacctgaccagttctctctaaatggttgaagggactaataatgaaactaggacttgactttcctttcttttcaaatctctgaattcctttcataggtgaaatctaaagaaacacatagtccttgacttgcgattcaacattcctacgctttagatcattgtaattttctatctattttgtgaagcaagcatacgagctataaccttttctatagcttcactcatcctctatactgcctctgtcctaagatacttcatctcacccgcttcatcccaatgaatggatgatatgattccctcccatataatatctcgtatggggcaacaccaattgtagcatggtaactatagttgtacgcaaactcaatcaaatgaaggtacttattccaagatccctcaaagtctagtacacattcccgtaaaatattttccaatatctgaatagttctcttagactattcattagtttgaggatgaaaagttattctaaaatttggctaggttcccattactctctgcaaatcctcctaaaacttggatgtaaatttcatactataagatgaaacaattaactttggagcaccgtgaagttacactatctccttgatgtataaatctgcatactaatccactatataagttattcgcacaggcaaaaagtatgttgacttcgtagacctatactcaatttcccagatagagtcatatagcctcgaagtctttggtaatctaactacaaagtccatagttagatcttctcattttccactctagaatcttcaaaggttgtaaaagttttactggtctctaatgttctaccttaactcgcagacaagttaggaacgttgacacatattccactatttcacttttttattcttgaccactagtgtaaagacttcaaatctctatatatttgtgtttcccctgagtgtagagagtacaatgtcatatgtgattcatcctgaatttctttcttggtctcttcatctgctggaacacatatttggtccttgtatattaacatactactctcagatactcaaaagtcctttgctgaattagcctcaaaattttccttgtgcttcagcaatacaggatcacctttctaagctgatttgattcttacatagagtaattccatgtctagatagtaactatcgttctttgaattctccattgaggggtgaaacagtaaatttgtctctacttgatgtaaatcatctataaaggatctttgattattgggattagaacgatgtttaaattttcatagcgtat

SEQ ID NO: 115781 - DNA, 1398 bp, Cannabis sativa
ctgagaagttttcccaagaagcatgcgagtgaggacaaagcatgctggaaacactcgtgttggtttgtagggtaagttttcattccaagaagcaaccagagtgacatattcgtgtataagagccatcattctgtggatgtaagggtccaatataattgaagctgggacgttacatatttatacctgattaggaggcaagcttactatgatccatgtatgattagcttccaaagctactatttctatagacataacattgtcccattcaaggataccatcatcctaactataggattgatcaagttcatgatgacttaaaatggagaaaactatagctcaaaaggtggaaaatattctggagtaattaagaacatgcgataaacaatgaagagtggaaggattagtagaaaaagatgacacaaaatcatatggatgaagcaaacagtgataatcctacaattatgatggcttttgaacatgtctaagattcatggaagaagaaatattagattcatgtggagagagattaaatgatacagaagatggtcctagaatagacaagtttattttattagtgccttggaaaatatgtagcacttgacttagtgtaaatagaccgcatcgccgattatcatatcagtataaatttggtgtattgataaatctctagacttaaacattcgaatcatataattcaattattttcaactgtgatgacatcacaataattgtgaataattacatattatggatttaatagaatttaaattttaaatatataatcatataatcacgtaaagtaaaatgtgtgaaccaagcaattaacagagtcataaaatattttctatttctttattgaataaaaaataagattacatagaatagttttatatagggcataaaacccaacaaactcgtactttcaataatataaaactactaatgcatttctattaatcccatatatttgacatgcctctcaaaagttgcgtcaagtagtgtctattcgtgaaaggatcaactaagtcatctacagtggaacccttctcaactagcatgtctcccctggctaaaaaatccctaataatgtgaaactttctttccatattcttacttattttgtggctcctaggttctttaatattagctatcaatcttgtgttatcacaaagtaacactaactgtttatccatgtttggaataatgccaagatttgtatagtacttcttaagctaaactgattccttagcagtcttagaggtagttatgtattcaacctccatggtagaatatgatattgtagattgctttgaaacgtctctgcttcaagcttccattgggcccttacaccaacggaataataactcttatacacgagtacgtcactcttgctgcttc

SEQ ID NO: 115782 - DNA, 1795 bp, Cannabis sativa
gtcgtttgtatggaaaaaggacagatcaactctttgatctaaacataaagagaaataaaggtaaggatacctcgaaactggccaaatccaaggacacaagaagaccctcttgtttggctatgcgtatagcagcttgaatcacttccaaattgaatatactgtacctcaatgacaaccactgtaagaaaagcatagataacaagttaggaattttaaacttattaatagtttactagtgtaccgaatttctagtgcttcaagatgcatcacagattacaaggctatttttaaagtgtagtaatttattagtacaaaaaagtatatgtctaaccttgcatcccttaaaatcttctttagttaattcatctgcctgaaaatgatacaaaatcacaggtaggtgtatgaaaatcatgttaacaaagaggaaatctgatagtacatttatatattatttttattattattgttattgtgatttacaacaacctatatggacacataaagaagaactcacctgaagtttcacagcactagagagacagggacgcattgtacgatttgccgaatcgtcaacaaggcaaacgcactgttcataacaacaagcacttagcaccaataatctcgagctaaaggaaggaaaaaaagaaaagaaaacgaaacagagtgttcaattggagctcacctgagctgtatggcccttcttcatcctcatccttgagagattcacaccacgagagttcatattactcacaaaaagctggccttgttgatcatccccacaggcaccaagaattccacaggagactccaaaccctgaactcagccctcgaatggtattggcaacacttccccccgctaaagtttttacagaagaagattcatcttgagacgagagattatgggtcttcagctctttcagtatatgctctagctcgtcatatgcaacctacaaagattttataggcaaactttcagtaacgcagtaatttcaatttaatcatattggatccaatacccttactgatcaaacacaaaaatcataagtgtgagcagtgtaagtgaaattcagttgacaagccagggggaaaaaagaataaaactcgttctagatcgatacatatgaacccaaaagcataataaattcaagaaaaatgagtacaaacagggaaattaacatcgacccagacgaggaaaaagaggtaaaattgagaaaattgagtgaggaaaagaagaaaaaggatagaggtcgaacgggaatggagccaccacgttcgccggagatttgatcaagcaaggaagaatcaacgcgggccacgtggtcgacgagggctgagggctgtagtccgagtacaacaggagcgtcaacgtggtcgtggtggtggagaagggtggtggcagtgggagtggggaaggcttcggctcccatctccaggctgggggctgcgatgcgatacttggctttattattattattattattatgttttgtgttttggtaatgtgttgttaacctttccatatttatagacattccataatcactccaatcatcactgccgctaaaaaaagaagttcccactcactctctcaactctaatcaactcaccacacccaccaagaaccacaccacttcattttcaggttcccacattgccctcaaatcaagtgtttttacactctttttttttttttgggaaatttacaaaatattataatttgggttaacttttacaaaaatactgtcacacggaaaagttttcaaaaatactgtgtttttataaaacaccagtaaaac

SEQ ID NO: 115783 - DNA, 1876 bp, Cannabis sativa
cggatactaaaacagataggggtgcatcattatatccattttaaggctgtgcattgtagaattttccaatagtatttaacactgctattaatataattaaatattgtatctcatataagttaatttaattattattataaaatatcattaaccaattacaaatcatcacttctaagtagtcctagcttttaattcctttcaaaaaagattatagtaaattttgaatccaaacaatctctaccattacaacacacaagagtcatttgttgaattttttataagccaagaaacatgaagacagtgctgacgtggaaatgaaagattcatgggacgtgtagtacacgtaagaagtttggatttggaagattaaaaaatagcatattttttggagcgtgaagcgcgtgagaatgagattaaatagacaaaatggtttaaaataaagggtctgtgggcgcagttgggttgggagtttagcctctggtttttttttttcttttgtttggtccattttgactaaaccaatgctaaaattatgtaaacattaaatatatgattctattataagattttaccatattcaattcacattttatttcacatttatgagtcaaacgtcctaatattatctgtcatatgtccaaaaaaaaaaagattcttttgtattgatatgttttcataaataattgaaaatattttttatttttagaaacttataatgttttatctttggaatactaaatttgagtgacaatttgtattaattaaacaaatagtttaaatttttaaagtgatacattctccgaccttgactgcctaacctgaaagcagatagctaaagtgttccacttttttagtagggttctacgatcgatccgcgatccctagatgctgaaggcgtctttggagtgatttggtccttttctaatcagggctaaaacatcaaaaattaaaaatgctagaataagaataaacttgatattgttaaaaatgctcaaaaaatatcatattcgtaaagtattattttacaatacaaaataacataaaaacagactcactaaaataacacttctactcaaattaattaataaaaactaaaaaatatttaaactcttgatgagtgattttttttttttttttgaatgaaatgaaatctttattaggctaacgtcaatagttaaaaagacttacataaattcatgtaaatttagccaccaaactctcacatgattaaaagaggaagagagccaatttgattaggttaggagcaatataatttgtagagcgattacaaaaattaatcataaaaaaaaggaaaaattatactacatgctgaaatttttaacttttttatttttatactgtagggcggaatttttttcaaaaatactgtataagttttatactgtatactgtgttaaatttttactgttgttctacggttgctttttagttatttcactgttgtttttagttgttctattttgtgttctactgttgttttataaaaatacagtatttttagaaaaaaaattcgtatgatagtatttttgtaagtttcactaaaaaaaattactaccttctaatccaaattccgctaaacatcattttagggacccattttgagattttttcggaccttaggaaataagttaagtattgggctccttgagttttaagatatgtagtgtttttgaaaattatcaaaacttgtatatttttcaaaagaataatttttggtgaggcctggaagttgagttggctctatataatcctctatcatttacgtattatatttagagaaaattacactctataccttttttatattatcctattttatttttaccttcttttttaaaatctatcatttttacct

SEQ ID NO: 115784 - DNA, 4137 bp, Cannabis sativa
  modified_base (44)..(72): a, c, t, g, unknown or other
tgtttaatttatcgttttagaatgttcatatttaggatgttaannnnnnnnnnnnnnnnnnnnnnnnnnnnnctggtaaaataatatccaacacaaccatggataatcataggggatttcaatgaaataatatcaagtgagaataaatccaggggatctctccgtagtgagtcccaaatgactgcttttcgagatgcactagatcattgccatctttttgatcctccttttcatggagatggctacacctgggcaaaagatagaacgaccatcaacacttttaaagagcttattgactatgatgtgtggccctctacttttcagcaaccaaaaatctctcatttggactacattcattctgatcatcgtgtcatttcagcagaaatcttcaatgaaacaacaactcaacagcataaaagacacagtcgctttcgcttgaaaagctgtggttatctgacccagacaacaagtccattatctccaattgttggctatctaattgcacaacagaccccatcagcaatgttatacataacctggaatcatgtgcgacatcacttcagcagtggcatatcaagaagtatggccgaatgaaaaagaatattttagaaactcaatcgaaagtggactctaaacaactctcctattctcagccatgaaacagttgctgcactcaaacataatgaatcggttcttgatgagctgttagaacaagaggagatgtactggcaacaacgttctcgcattgattggatgcaattgggggatagaaatacaaagtactttcattccaaagcctcggctagaaggtctaacaataaaattacatctctcaaaactgaagatggcagcacttttacttcaaaagctgatatgagtaatgttatccaagactacttctccaacttatttaaggcttccttcattgatagtaatactcttgatgcaactttagccacaatacatgtctcggttaccatggatatgaatgctacacttctcaaaccattcaccaaggaagatgcttaattagctctacactcaatggggccagataaaagttcaggaatagatggaatgtctgcaatgttctaccaaaacaactgggatatagttggaaacaaggtcacatctgctgtgttaagtgtgctaaatgatggagctgaccctacacctttgaattccactatcattactctcatcccaaagatcagaaaggctcagtacatgaaagacttcagacctattagcttatgcagtgttgtgtccaagctcatcaccaaaatcctagttgttcgcttcaaggatgtactaccacacgtcatctccgagactcaaagtacttttcttccaaatcgactcatcacagacaacatcttggttgcttttgaactaatccatggtattaaactcaaaacatcgggtaggaaaggggtggctgctatgaaattggacatgagtaaagcgtttgatcgggttgaatggaactttatcaaggctgtgatggaacgaatggggtttgcagatagatggacgttgctcattatgacctgcttgacaacgaacaagtttacttttctcttaaatggggaaaccatgggttcagtcacaccaaccaaagggctaaggcaaggttgtcctttgtctccatacctatttctaatttgttctgagggtctcttatgtctcctgcaaaatgaagagcgcttagggaacctttatggttactcactcacacgaagatcccctccaatctcacatctcttttttttgcaaatgatagcttactattttgtaatgctactgaaagttcttgtcatgctatcaaacgttgccaggatatataccaccgagcttctggccaagttttgaatcctgacaaatttgtcctctctttctcaccaaatacaactatggctgctcaaattcattttcattaaagtgctatcaatgcccatccgtgattgtcatgaaaaataccttgggttaccagcatacacagatcatgataagcaacaattgttcagtgaagtcaaagaaaaaatctggcaatgaggacttggaatgacaaactcttctctgttggaggtaaagaaatatttctcaaagttgtggtgcaatctatcccaacttacttaatgagttgtttcaaattagcggttacaatctgcaatcaacttgaaataatgatgtccaatttttggtggggttctaatgaaaatggcacgaaaattcattagcaaagctggaaacttttatgcaagactaaatttgatggtggaatgggttttcggtcttttatacactacaatcaagccctccttgccaagcagtcatggcaacttctcgacaatcctttctctcttttgagtagattgctgaaaagctgatacttcccaaacaactcattccttgaggctcctaatggtcattccccttcactcacatggaaaggtatcctttatggtcaagagctcttaagacctagtttacggtggaaaataggggaaggaagacacatcaattgtgcatccgatccttggatccctagccatacaaacttcataccaactcactataagggacaaccaaacgctgtagttgccaatttaatcacagaggaccggcaatggaatcagcagctgcttgatgaatacttctctagcattgatgtggaacgtatactcaccattccattgagttacttttcggcaaatgataagttgatttggcaccaccataattcagggattaacaatgttcattcaggttatcatcatgatgcttctcttgaggattcagacctctcctccacatcaaattcacctacgcactggtggaaattcttttggaaactacagttgtcccagaaaataaaaatctttgtttggcctgtgttccatgatgctataccagttgctacatcgctggtgcgaagacatatcattactgattcaacttgcacaatatgtcaacaagcatgggagtccgttggccatgtactctttggatgcaagtatgctcgggcagtttggcggtctacgaactttcagtttcattggaatactgctgcactaatgaacaaaggcgattatctagctcacctggtgactctacattcaacgattgaaatggagcaaatattctgtatatggttcatttggacagaaagaaatagggttgtccattgtcagaaagccaaatctgctgctcttttagcatcttttgctaacaattactagtccaactatcaacatgctcaagctaagttccggcctcaacaagttccagcataccagaactccccactagtaccaatttctgagtcaccttggcgaccacctgacttcggaagcctcaaaatgaatgtggatgctgttgtggactcaactaacaacattattggcgttggagctgttattcgaaattgtgagggtgttgtaattgctggcttctccaaacctctcatcgggaattttgcatcacatgaaatggaggcaaaggcaattttccacagcttggtatgggctactcagttgggacttcaacttggtcatgtcgaaacggatgctgtgatggttaccaatgcttttatatggccgaacaaattgtattattgcttttaatgatcttattattgacatttcatgcttactttcctttctcccaggtgtatcagttatgcatgtcaaatgaacagctaataaagctgctcattgtttggctagatatgctttagggttggatgaagcttgttattggatggattcttttcctccatctctctactcttttattgtaaatgacttatcagtttaatttataataataagtttttatcctaaaaaaaaacaatgtaaatattgtgttaaatttaagacaaaaaatcaataaacactatatttgttacaaatgcacagtaacattttatattacaaattataacaaatattaaaatatcattaataattattaattaattaaatatgtaaaagataactaatgataaggggctgagatgcaaaattgtcttaaatttgaaaactaagttaaaaaataaacctttttaaaaaattaagaaaatagccgaatataataaattagctaataaaaattataaaaatacatttatcacat

SEQ ID NO: 115785 - DNA, 2312 bp, Cannabis sativa
aagtctttaaatttaacaatctaaatagttcgagggaatttttaacgactaaaaaaattcaagagacactatttagtacatatcaaaattctggggaaaaaattactaattagcatattatctgacatacaaatcgtcaacaacaaacactgttgttacttatactcctactataacatatgtatatctgttgcagtctaaatatattgtatttataggatggaaaacagaataagcatggcctatgtacgaaaagtattattggctgggtatgtttatataccatatcaatgtatgacataatacaatatatctgtagtgtcagcatgcagtagaagagtatagtaaggttttcctggaccattcattccattccacacaacacaaaaacaacactcctacttcttttctccctgctctgtgtaactctgttcactctgcgcccattttcatgaatacatatatttatatcagaacacgtatcacaccaaacctttttttttaccctcctcctgttttactttctctgacctcggtaaacgtttttttcactttcccttcccttattccgtacatgtcactccctataaaaacacaacagagtgaaaagttatagtagtagtgagaaactttattactgcagtcaaactctaacttttggtcctctccaacaaaaaaaaaaacaaacaatccgtaatgacaatatcccatttgctattcaatacactactaatactattttctgtcttcatatttatccagtaaaacaaataaattattaaatatagataaaagagctcaaacttattattacttccgttcattatgcttctatcagtttaagagagtgtactgtacaagaaaataaacaaagcgatcagtggggagtgtacggtgtcggttcaaccaactagctctcgagacacaaattttgccgtcgattaatttgttcagcttgatggacggcggagattcgatagtcagctcagcttccaagtccgaaacatgcaagagccacaaggaagcagagaggagacgcaggcagcgaattaatgcccatctctctactctccgctctctccttcctaacattaccaaggtgttgttttttttttttacattactttttcttttttagagtataccataaattttcttattttttagcggaaaatgagggccattttcggtatttacagacggacaaagcttctttgctagcggaggtggtgcatcgggtaaaggagctgcgtgaaaaggttgctgaggtggtgcgtaaggatggagaaatttggtgcggtggcactggtggctcggaacctgactcgtggccgtttccgaccgagtcggacgaggcgagtttgagctactgtgagggaggagatacaaagctggttaaggcgaccgtgtgctgcgaggacagaccgggtctgacccgagacatgggtcgggctatccggtctgtgcgggcgatgccggttcgggccgagatgatgacggttggggggcggagtaagaacgtggttgtgatgcaatgtggcggtggggaagaagatcttagggccttgagaagggctttgaaagctgttgtggagaatcgggttccgggttctggacaggaccaatccggttctgggaataagcgggctcggctctatggttcggttaacgaaggcgattatgaacttttattaactgaaaattatgtgtaatatattttgttaaaaaacaaattatataatctttctcgttcttaggaaagtccaaaaatcacttactgataaaatatatatttatataaagtatacaactcaaggaacgattggtaatgttttcagaaaaaaaaaaaaaagaaaaaaaaggaacgattggtaatttggtatgcgtgagactctgcctgaaaatgagctgaattgtgttgaatttgctcgattggtgaaatgggtgacttgggggtggagcttctctgaatcgttatgtgtgatttcaaccttaatatcagtgtaatgccgtacaaattatgcactccctttttttctttcttaattaataagcttttggtgaattgactgtttaagtatgtacgtttagtttgactacaatattatcgggtttattgggttcatgaattatttaagctataatgaacatgaagcttctttgtttttttcttaaatgaaagttgcaacttcattaacttaaattagggctgttcatccgatccaataatcacttttttggtcaaacaacattcaatccgcactaagtgcggatttcattttttggatccaatccaatccgcacaatagctc

SEQ ID NO: 115786 - DNA, 1118 bp, Cannabis sativa
tctaccttgctttgatcactaataataaaggtagaaaatgctcagcagaagaactttttctcaatagtttaagaagttataagatcagcagtgattacattcaataggtgtagactgtgtctatgcttagcttgagttgatgcacttagttagcaaatcggcaggattgtgagcagtgttaattttcttcacgagaacctctttgcttgccacaacctctctaatgaaatggagttttatatcaatgtgttttgatctctcattaaacataaattttctcatgagaagtaatgccctttgggtatcacaatacacagcgatatactttgagttaaaccccaatacacagtcgttagttagttagtatttcagttattgtttgttacctttgcttagctgtagtctaactaactttgtaaccaattctcatttactttcctctgtatataaactctactgttgactgtaaaacattgtattgatttcttttattcaataagacaaacactttcttctctgttctttcttgttctctctttctctctaattcaacatggtatcagagcttaactctttttaatggcgtcgtccgttgattccactcgttgttccattgaatccaatcaattaccaagatcttctacagtttcgttcaatcatactctttcgatcaaacttgatgagaataattttctcccgtggagacatcaagtttatgcagccattaaaggtcatcgcctactgaagtttctcaatccaacagcaacacctccaaaatacaaaacagcagaagacgaagcagaggatcgaacctcggaagagtttctggaatgggacgtttaagacagcttactcgtatcctggttactatcgtctatggcagagaaatcctcacacgcatggtaggttacaacagcactgctaagatctagtccactctcgaggaatgttactcaggtcaacacagagcgaaagtcagtcagttttgcactcaacttcgtcgaacaaagcttactggaaatctcaacgattacctactcaagatcaagcaagttgtcgattctcttgcctctattgaccataatctttcaacgcaagatcatatcgaagccattttc

SEQ ID NO: 115787 - DNA, 1794 bp, Cannabis sativa
atgcaaagcaatcttaccataaaaggaaaaattattttgtcaattaacttgccaaaaaaggactttacaattaaaatttaatatttatatatatatgaatatataacaaataaacatgtgaaaacatacatgggtagagacaaagccatcgtgcactagcagaaaaagccaccctctgcctattggatatgtcatggtgttccaattgaagaggaagagatcgagatagataaggagagaaggggtgagagagatctagaaggtgagaagggacgagagtaagaatgagaagaagagaagtctgaggaaaaatatgggattcttttatgtatatcaacttattacaggcatgactcctctggtaataagtataaaaataataaattaatatttattaccagcgttgtccgttggtataagttcgctgctaatgataaattacaaataaagatgagatttttcccgcacatttcacattttgataattagcaaaaagttttgtcgataatactttgttttctgtcgctatcactaaataagaaagattttaaactaaaaaaattaactttcttgactattatctgcaaagtgtactctgctggtaataactcttaatattaggaggagacctattttgctggtaataagtctgcccctaatgataatttttgttgtagtgttatgcgtcacgcttctaacacaatccaaaaaaatttgggggacctatcccctctaccaatctttgaaatgacatgtgacaaaaatgagatcacctttttgaggaatacacttctattctgacattcatttttctaacgacggcaaacgatctcacttgttagtgtcaacagtactatactttgtacgacacattgcttttaggaattaggtgtcacctacccgatttaataactcaaaatagtgtttaaataacacagtttactttattagtgagctctactcgacaaaaaccttagtgtggcccaaatctgttcggcttattgaggatgactacctataaataagacattatcttcttcatgcaaagggttcacaatttgaaaatactatagagctataaaaattcaattgttaaaaaacttataaaattatatgttatttctttcttaatctattttctttaatttaatttttcataatagtaagattttcaaaaaattccttaaacaaggataattaatatacatcatcatataatttttttatatattgacaaaaaaaagtttctacgaatagtgacataaattttctaatattattttgtttcccatttagttttaattatttttctaatttttaaggaaaaaataaagaaaagaaaaaagatttagtcctatttttcggttccgcgcatttgattgttgttggccgaaagtagattctcgaaatttaggaggaattttgtacgagaaaggagcaaaattttaagatatgtttttcttctattattaaaaaatcatgaaaagatggcaagattaatagaataagtgtatgcttattattccttacacatcaaagaccatatgggaatggaataagagcatttccattgttatggcatatttcttcttctttcccttctcaaaatgtctctttctctctttaaaaatgatttatgacatgggtgacattttaaaattttaatgggtaaatacttttttggaccctgtgttttgcaaaagttacagattggaccatgtgttttgttaaatgacaaaatggaccctgtattaaaatagtaaaaatagaaccctgagcttaatatttgataac

SEQ ID NO: 115788 - DNA, 3113 bp, Cannabis sativa
atttatgagtaatacccattaaaagtgcactcatacgtgtatatatatatatatatttagttttaaaaaatatattaattaattttattctttgatatgcacatgcacacatgagattacatatcattttcctaaaagattaacttaaaagtgatatatttattaattgatatgatatttgcataaaactggctagatagaatggagcagccggggcaagaaattaaaattaatattataaatatatatacatagaaataaaactagatgaaagttacgtggcgagccacgtaaatattagttttatttaagttttagtgattttttttaaaaaatcggtaactaattgtaaattattttttattatttgttttataaaattagactttttaagaatgccataattgtatatataaacttatgatagacacattcttattaataattaaaaaaaattagtaatattagaagtacttatgaactgtacttatgattatgattaaaacatgttacacttagaacgttaaaagagacttcatattaatgataacacatttccagttgtgttcttacaaattaacaaccgataagctgattctctgttttgtttagcaaatacatgaggaatacaaaaaaaaatcagagattaagactttggttatctaccaaccttcatatgagatataatttcaaacagttcactccttaacattttagctaggtaaggacttaaaggaccattagccaattataactggccttgagatctatagcacttccaccataacagatgtgtgtatatatataaagctaaaggcagactaacatgttgagcagagtccccttgaatccaccaacatgttttagaagatcttttatttatccattaggaaacatataacattttttgtttgctaaggagaaaaactataacatggctttaaggtattggtcacacaataattcaaataaaaaatgtaaactacattgttatttaaatgaagaaaagactgtagttttatgtgaatgatctttcacttcagactggcaacacatcagataagaaaagaagattcattagataacctcaaagcaaacgcacaggtcgatgcacctaactatacctatcacagttgtattttatgtataggagtaaattaagtttacaaattaaacaagactctctatataattatgagtggggcaacaattcaaacaagactctctatataaatttgctagtctgaaatcctatatagagccttcatgatggacctttctaatcccctcaattaaattgatagtcaaagcttgaatttgaagatctcacatcccttgatatgcatggaccttctctctaaatattacttaaataaaattgtggattataagtgagaaatatatacatatataaatatattcttccacaaatttactatttctcctattgttggtatatgtatattaaatagaaaaactaaatctaatggaagcatacctatagtattccaaaaaggttatgatttttcttccacaaatctaccatatatccgattgttggtacctggataaatgaagtaagaatatataaaatttgaagataaagacttacatcgtgcaaaataagctacatagaactacgagaaaacacaagtcaacctaatttttttaaaaaaaaagtaattttaacaaatccagtatgccaagtaattttagaaagtaagtcatacgtttatacctatacacattttaaagcaacaaacatcaccattcatttattgaaaaggttacatggacaaaacattaaaaagaaatgatatttcatacataacaaaaaccattaagagagacctttgaaatctgaggggtaagtagcctctttactcgagcatagctccaagaagacaacctacaatcatagatgcaaatttaaaaattaaaagttaaaaattctcttaattacgttgaattattaaatcatcaagaaatggtaaaatacttactcctggtttacaataacagataacgactatctacctctttgcaagattccttcaagggcacaaagatgtaaccccaaaccataatctgcaaggataataaattgcctacataaatttctttcttatttaaatatttcattattattattcaacaaattaattaccattgcaaacgacaccacactggagcatcaccacactccttgatagctcttggggagaaacatttcacattggcaaatttctataaaatgctccttggtcgcatcattttcctgttatatcacatttcaatcacaaagcattttatccctaaatcagaatcaaacaaccaacaaaaatccttattctaatctgtagggattaaaaagtgtagaaattccaaaaatacaaaaaaaaaaagtgaattaattaaaaaacttaggttcaacttaattagaaaacatcccacaaaacctaattttgagagcgtcattggattgaaatggtatcaagtgtgtatcttgaaaaccaaatggcatctaaaaaggaaaaaagaaaaagagaagataattggacagaagcaagttcgtttgtcgtccctgaacatcaaaatgtagcgagaaaatggaaggaaaaataaagaaacaaacagagaggaagagagtctcttactttctgaataattaaaaatgatcacgcgaatgtgctggtctcgttcatctgaaatcgttcacctgtcgtcgactcatcgttatcgattgaaaatcaagtcgattgaagattacacactgaaaataaaattgatgtagactttgtgggtaccgaaactatataagtcatatgttaacggaatgtgtaaatcaacctttttaaactaatagttttcaagttttgaacgaagaaatacacaaaatgagtagagtcgagtctgagtcgtcgtctaagactaaatggaaccgattgagatgctaataagtctaacaatttgtttcattctcttctcctaatttttaggataattagttatttttggatgttaacggaatgtgtgttttttttttaataaaataatgttatgttaacggaatgtgtgtttttttgaataaatttttgttaaaaaaataatat

SEQ ID NO: 115789 - DNA, 4055 bp, Cannabis sativa
  modified_base (33)..(41): a, c, t, g, unknown or other
gctcttccgatctgattatattgaaatgagttnnnnnnnnngcataaaacccaacaaaaatgtacctaccttctgcttcatttgtggtaagatgggacattctgggagattctgccctcgactttttgacacaccagcacacttgattgtaaaaccttatggtttgggcatgaaggctcttcctagccggcatcagaattttgctgcatcaccatacttgcgttctggcaaggcactagagagtggttcgtctggtgtgaactacacaaatgcaggagctaattttgggaagtcaacttatcgcatgtttaggggaatatcccctgatatttctcaaactaacagcaagaataaaggagttattctttatgatagtgaacatgctgatgaagaattgactcaagaagaattaaaaaggaaaagatttgttgctgagagagttattgggcatgttgatacttcggtccaaattgtatctgggtcaaaaaaacatgaatatggtgggttctggtgtccaagcccaccaatcgtcatgagtacactcagttggaattgtcgtgggcttgggaacccacgggcccgacaattccttgagaacattgttgttcaaaagaaacccaactttattttcttgtgtgagactttgtgtaaaaaagacattcttgaaaggcttagaattagattgggctttgaaggagcccactgtgttgaggtccaaggacacaaaggaggaattgcactactgtggagatacagcgatggtgtccgtctcctagggttttctcaccaccacatcgacgtcgaagtcgcatctctcaacctccctgcttagcgtttaacggcttctatggcgagcctaatcgaagcctccgtttcagaacatggcagctaattacttctctctctactgaatctcaacttccttggtgtataataggtgatatcaataatattggcaatcaaaatgagaaaaagggtggcagtccttatccttcgtctctcatcgaaggctttcaacatgtgttatgtagctgtgatttggttgatatggagctccatggacatccctacacctgggaacgtggtaaaggaactgatttttgggtggaaattcgactcgacaaagcacttgtttctcatctttggcttgataaatttctgactgcaacactcactaatggagatgtttcttcatctgagcacacgccaatctttctcgagccagctcctacaattttagttggttctgcacatcacttcccgtttgagaatgcttggacaagggaacctctttgtgctcaaatcattcaatcttgttgggaattgaattctcatttgtctcttcaagagaaaattcaaatctgcagcaaacaacttggtgattgggggaggggtttaactaccaactttaaaaaacggattcgacagagtaaagctagactttcttctcttaaaggtaaatctgatcctttttttgttagtagtttcggtcatgagcagaataattattttgaaatcttagcccaacaagagttatattggaagcaaaggtcaaagcaattttggctacatagtggggataaaaattcaaagttttttcatgctatggccagtgcccgaaaatgtagtaacaatatccaatttcttcaaaatgctgctggcatttggacatcctggaatggtggccttgaagaggtaattgttgattattttaacaatatttatgcggctgggatgttgtttgggatcaggttgtgaatggcactaatcgttctattactactactcataatgctgaacttttgaagtcgattactagtgatgaggtccggtcagccctctttcaaatgcacccggacaaggctccagggccagacgcaatgggacctggcttctttcagaaacattggcatataataggctcgaatattgttactactgcttgcgatttctttgactcagacatctttccttgcaacttaaatgacacaaacctgatgcttattcctaaaaagaagtctcctaccacaatgagtgatcttcgtcctattgctttgtgtaatgtttcttacaaggtgattgcgaaagttcttgctaatcgaatgaagcttcttattgatcaaattatctcacccactcaaagtgctttcattcctgggcatcttatttcagaaaaatattatgattgcttttgaagtgatgcattacctgaaaaggaaagttcatggcaagaaaggctatatggctctcaagcttgatatgagtaaagcctattatcgagtcgaatggggatatttaaaggcagttatgttacaaatggtctttgatcaaaggtgggtcaacttgattatggcttgtgtttctagtgtgcgctactctatctttcataatggccatgtcatagggccaattacaccaacccgcggtattcgacagggtgacccgctctcctcctacttgttcattatttttggtgaaggattctctgctcttatttctcagtttgaaagggaacgattactccaaggctaccgtgtagctcaaggcgctcccgtggtctctcatatgttgtttgttgatgatagctatgtgttttgccaagctaataacggttctgctggtagtgtcatgtcccttcttagacggttcgaaaatgcctccggacaacaaattaatcttgccaaatcgttagtctttttcagcccaaatgttaatgttcatctccgccacaacatttgcgctattctacatatgcctgaagcctctgaaaatagtttttacttgggacttcccaatattattggaaggaataaaaatgctattctaggctttctcaaaaataaagtcttgaatagaattaatagctagactggcaaactgctatctggtgcaggaaaggaaatccttttgaagactgttgcccaatctcttcccacttatgctatgagcatttttctcatacctcttggcacttgtcacgagattgaaaaattgatggctcgtttttggtggaaaactacgaatagcaaaggcaatgaaattatttggatgaattgggaccgactttctcgtccaaaagatgaaggcggcttaggctttcgtcttctccatgactttaatctggctatgcttgctaagcaagggtggaggtttctatgccatcctgattctctagtttctagaatttataaagcgcaatattttccccacgaagactttctctcagttgatttgggtcgtaatcccagctttgtatggcgaagcatatggagtgctaaagatctggttcgtcatggtgctaagagaactattggtactgggtcttcaactaatattctgcatcatccttggctcccagatcctaataatcccttcataacttcttcccatgtggaccttgttggccataatattagttcacttctctcggttgatgatcgaagctgggacatagagctggttcaggatatgttcaacgatagggatgctaatctgatcttaagtatccccttaagcttttttgcttcttctgatttctggacctggtccaatgaaagctctggccaattctctgtcaaaagcgcataccgtattcttcaagaatccaaagacccaagaatcaacagtaacaactctggcttctggcaaaaactatggcagttgaagattccaccaaaagttagaaattttctctggcgcgctacttctgggactcttccgacatgtgtcaatctcaaaacgaaacatgttgatatcccctcactttgccccatctgtcatgctacacctgaaacaatctctcatatcctcctttcttgcaattttgccctctcttgttggaatcacatgggtctaccagctggggtctctcttgatctctcatttgctagttggttggaaagtctttttaactgtcttgatgatgatcgggtttgttccctctctattgtatgttggtccttatggaaagcaagaaatttaattgtttggaaagataaggtgcttactattgcaaatgttgtaacatcagctcgcatagctcttgatcactggcg

SEQ ID NO: 115790 - DNA, 2516 bp, Cannabis sativa
tgagattgtaattctttttacctatgggatttaaaaattaaatttataaaaaagtggcaaaaagaaaataccataaaaaactttaaattggacaaataccacataaggatggtaaagttaaaaaagtcatatttatcaaagttttttatagaatcccatatttggtgtaattttcactaaaaaataaaatgagcagaagacatagactagagaaaaagaaaccagaaaatcgaaaacaaaagaaagaaaaaaaaaccctaaaacaactgaaaaatatcataaaatatcttcgaaactttgtgtatctcaaactcttaattatcaagttcgaaatcagagtcttaatcttcaatgatcaattttaaatacttttgattttctcttttccagagaatgaacaattaattttcttttcaaagctatagagatagggctatgggggttttctttgtaattttttcttacccattgctagtttattaacaaaaccagtgaaaaaaaagaggaggaagaagaagaattgaaacaaaaatcgaaaataaaaaagaagaagaagaagaagaagaaaagctaggctatctatgaaaatgtaagcaataaaagtggaaacttgaaaaaatttagcttttaattatcatttaaataaaagaaaaaaaaactgctaaataatgggaaagagctgaagaggaggaagaaaaataaaaaatgagaagaagaagaagaagaatggaaaagaaaaatatagagattggtgttatacttaatatttcaactttttaattttttttttaaaaaagaaaaagtttcaaaattgttactgatgtgagaaaaccaatatgtatatttttttcaaattgataagaaaagcccttgacatgataaatgacaaaatacaatataaataaaatcgttttacacattacatagtatacagtataaaatggatacattatttttacaaaaataccgtgtactagtataaatatgataattttgaaaaaaatagtatatagtataaatacccctatatatttagaataaatcttagtatatatattaggaataaattttagtatgtatatatattaggaataaattttgtatttaagttttattctttgtaaaactgtcacatattatttagaaaaataataatggggtttaattccctatcttttttttttttattattatttgaacaaatggggtttagttccatatttttattctctaatttttatcttaataagaattcttatgaagcttatatatacacgtcttgtgtattgtatatacatatcataaaaatacctttctcatttttgacttggtatcagagctagccacctcctaaccctaatcgtttttttttctccttcttcaccatgtctgacgcctcaaatgaatcaacaaatatttcaaccaaatctaccattgttccagtcacatataccactgtttcagtcaaaggcattctttctaactgtcactctgtccaaatcaccaccatttgcttgaatggtaataacttccttagacggtcacaatcggtacagatgtacatgcgtggtcatggaaaaatagggtacttaacaggtgagaagaagaagaagccagtagaggatgatcagacatacgggacctgggaagttgagaattaattagtgatgacgtggtttgtgaattccatggaggaggagatcagttctaactatatgtgctaccctacagaaggccctttggagattgttgtttagatgtattctgatttggagagccaatctcaattgtttgagttgaatctcaaacttcgtgagatacgacaaggggaagactctattacaaaatattttaattctgtaaaaaagatttggcaagaccttgatctctttgacacatatgaatggcaattaattgaagatggaaaacaccacaaaagaactattgagaagactcaaatttataagttcttggctggactcaatatagagtttgatgaggtgaaggggagaataattggtcgaaatcctttacctcctattggtgaggttttcttggaggtcagattagaggagtctcgaaggagtgtgatgttaggaaaaaaggttcttcgaactattgtggaaggctcatctttggctactatgggagaaggttatggcagaaacaccaattattcacccaaatctaatgagaagccttgggtgtggtgtgacttctacaataaaccttgtcatacctgtgagacttattggaaaattcatggaaactaaccttccaacggctaatgaggttgaaaccagttcattcactaaggaacaactggatcatcttcatgcactgctgaaaactacctcgacctcattttgtattcctattgtttctatggcacatacatgtaataaaataaatgctctaaactactttttaaaaattctactccttagatcatagatttcgaagcttctgatcatatgaccttgtaacaccctaactaatttaggcgtattacgtga

SEQ ID NO: 115791 - DNA, 5118 bp, Cannabis sativa
  modified_base (3576)..(3581): a, c, t, g, unknown or other
  modified_base (4962)..(4969): a, c, t, g, unknown or other
gcggaaaattgaacccccaagttcgaaagagatcttgtattgatatgctctcaagcctcaccccatgtgtgctagtaaacacaagattgggtttcagaaattggagaagtattcggacgtgcagtgccccatcatcgtaacatcacactcccatgaccattaggaatattggttcttctccattggattcctagtgaagagggtacataacctccctttggaattcaaaactcttagtaagaatttttttcttttatctgtattcgatattatttcattgttagaattcatgactaatggaagttttccatttgtgatagcacttatgccttggactcctatgaacgaggagcttaagacaagattggctttttacatcctgattttgaatagtgcgttgaacataagtaacctagttactatgaagttgcttcgcgaatatggatttatagttggattcctaagtgtatataacatcaacaacaagggcattgtctatatttctccgtaggctaaggaaaaaatagtcgttgaggtctccaaaatcatgaagggggccttacaagagaatgaatgtttgataacgaattgggcactttgccatcccaaccccttgactgaagaagaagaacttgctgagaggtttgttgctgcaccttaggaagaggtaaaaggcccttccgtttgtttcgtacccccagccctcgataggatagatgaagtcattaagggtcagagtaaacacgtatcatctccagatatgtttatggtagattccttcatgtccgtgtatttcccaggcttcaaagagtatggcagcttcgtgggcaggaaaaacatgattttattttcatggggaaagttgtatagtagctcacttaatgatcgcacccacgccaaagtctcagtctatactgatgtatgtttgtgcttacttgcgtacattgtttaattgatgttttataatcgtgttatgggttttggtattgtagaaatgccagaatccaaaatgttgaagtcggtagtagactccagactatatcctcggctgtcggaggcaaaaggaaaggcaagaccaagagcagggaaaaaaaaagttttataagtcgaggcctcccagctctcactgatcctccgacactcaaggaactccacagaccaaacaagcctctattggggtggaaaaggtccccagggaggcttctcaaagttaggtgatttctagtgtaggagtgatcattgaggcttagcctctgcaaaaatctaatttgaatctggagcaggctccttctggatccatcatccttacacttaactagagtggtgtggaggcaactaccatctgaggggagtgaggaaggctacgtgtaacgtccttgcttcaagcctctattggcccattacacctatggaatgatagctcttatacatgagtacgtcactctggctgcttcctatactgataactagccttacagaccaacacgagtctttccagcatgctttgtcctcactcgcctgctttttgggaaaactttccaagaggtcacccattgtaaaattacctcagccaagcatacttaatcgttgagttctttcatgatgggctaccagaaaagaagatgcatcttgtttatataggtagtaccaatcaatccatttaagcccacttcaattatgtagtcccatacctacacagtctcaggattatcacacatgacctttcccaagtgatgtgggattgtacaactcccagttttccccttcggatcacggggctttgactaacataatcaccccctttaggagtatgacgttctcgttgaccacacttctggctgagttaaggctcggatactatttgtaacattctcgtttcaagcctctattaggctcttacacatacagaatggtggctcatatacacgactacgtcactctggctacttcctagactgatgactagccctacaaccaacacgagtctttcttgcatgctttgtcctcactcgcccacttcgtaggaagtaaacccaagaggtcacccatcctaaaattaccacaggccaagcaagattaactgtggagctctttcacgataggctactagaaaaaaagatgcatcttgttgatatagatagtaccaatcaatttatttaagcccactttaactatgtagtctcatacctacacagtcttaagatcatcacacatgaccttccctaggcaatgtgggattgtatagctcctggtctttccctttcagatcatgggctctgactatcacagggagtgttcattcaaagtgttgtaatggctacttctctcaaagcagtctttagctggatcctaagtgtgaagagaattgaattagtggttctaaactttaaaaatgagctaagggagctctccttttataggtaaaggaggcccacaaaaataggaaaaatacaaattggatgtttttgacagttgatgatagtttaattgtaaaaatttgacagttgatgatagaccaactgcgggtaacctagagcttgtttttgtaactcccttaaggtgaattttggcgatgatatgattgaagtgtaagacatgacttgatagagcattaaattagcttcaaatcacaagttgaatcgcgtcaattgaatcaatattgagtgagttatgactattttactgaagctagatcatgacccaacgcccacgttgagatccagcgcctagattgcaaagttgtggatttgacttctataacttcatggatctttgttattgagaaaaattagatggacggtaaaaaaaatcagaatcagataagtagaacccaccacgccaggccatttgtcaacttgggtgttgggtaccctactcccgagcttctggaatcttgttttgatacttccaaggttcttgcacttgaggatgaggtcttccacaccattttggaccattccaaattcattggtctaatcagatttggtatttgagcaattgaaggggagtgtcccaagttgattgtcaacttgggccctgggccccatttccaggggctcgggtttgtggttttctccccaatttcgcttaaatattaattattttttacgacaaaaaaatatccagaacactttttggtgaacttgatttgaaacagcccaagttgacataatgttaacctgggcgacgggtcccagttttggccctctaaaaattatgtttggtccctagaaatagttgaatctcagtcttttttgaaaatggtgaagatgcttggaagagttctcggaaaacgtcattgaaaattgtccaaattgacaaaatatcaatctaggcgtcgggcctcatttttggcatcaggaagtgttatttcttccacgaaaggacctacttccccgtatctgaagacgaagaagattcaaaagttggatcgttgatctgatactaggaaggcacccaaattgatgaattgtcaacctgggcactggggtgctcgggacctcgggaccctgggtgctcaaaaatgaacttacttcgatcatgattctaatacctcaaatatgttcgtggtatgtnnnnnngatgtcccaatgcaagttttgactcatttgtactaagacggtctcaaaaattgaaacccaagttgggaatgtcaactcgggcgacgagtgaaaccctaggggcccaagttggcttccgaattacaagttcatgtaattttagctcctgcggtttggattgggttactccatgtcttcatggtacaaaatactaaaacatagtgaaatatattcaagttattgaagtctgaacttccatctcgaagttcccgaagtcaacctgggcacagggctagggtctcctctcaggtcggctgctaggactcgagtctactcaacttcatgacgtcatccttcttgctacatgtcaaacattgatgttcatgtcaccagaaaaagttttcgggttaagagtgtccaacatattcaattaatggtcaatcttgcatacttattcataaagttattaccaacatcaacatttgagaatgtaacatgtaagatcagaatttgtcgcttcgaagatctccatgaatgcctaaataaggaagagttatttcacactgcactcatttttctttgatcgagtttttgtcctactaggtttttggcaatgtatttaatgaggcagttattgtggacatccaaggaaaatattataaaatattatttattggatatccaaatcacccaaatatttcctattaattaccattaattgtaatcaatattcctctcttaatttcttaatcaacaactcacatatttgtataaataaaaaatcaccctattataataatttgtaaaaaattctcatttagtttacctttctcttttcattttttttatttttttttaactattttatattattcataacaattttatagcacaaactaataattaatttggtatattagttagtttgaactaatccaaatgttgaatacgttccttatattctattaattaacgtaaataaaaaaaatgaaaattaaaaaagtcggtatatgtaaggtggtgactaaatacattaataaaatttaaaaactaacatgaaaacttgacaattaaaaaatgagagtcaatccttcccaatctccatatagatgaccaaaataattatcatttagtctatatctacccttaaaatatggttttataacagaattcttaatttaacgatgtttttaaattttctatgttaactttaatataatatttcaattacttaacagaatatattttattaattttatagtattattatatatattttaaaataaaaattatgtatatattttatataaaaaaaattaattttattatatatatttaatcataaaaattatacctatatataatcgcatctatatataaaatatatatacagtagaacctnnnnnnnngaatactctattcaagaataacttctaatttgttataaaacaatgaagtcccaacttgggccaattataaataagaataacctttatattgtaattagttatacattttttaagtctcgtattaataaaatatacctctatataagaat

SEQ ID NO: 115792 - DNA, 3458 bp, Cannabis sativa
ctccatcggtgtgttccaaaccggttatctttcaatgataatgccatgctactggaagagttcactaaggaagaggttaaagaagccattgatcaaatccaccctcttaaagctccgggaagagatgggctgccgggattattttatcacactcattggaagaacgtgggacatgaggttattactacttgtttggaggtcttgaataaaaacatggattgtggctgccttaatgatactctgttatgcctcattcccaaagtgaaggatccaaagaaagtggaagagtttagaccgttgagtttatgcaatgttgtctataaggtgatatcgaaatgtcttgcaaataggatgaaactgagcatggaaaaggtgatctcggagaatcaaagtgccttcataaaaggtcggcaaattcaaaacaatgcaattcttgggtttgagagtcttcattgcttaaagaaaggtcggtttggtaatggaaggaagatggcccttaaactggatatgtcaaaagcctatgatcgagtaaattgggattttctagagggaatgatgaaatgtttgggctatgatgatcaatggattaggaagataatggggtgtgtgaagactgtaactttctcagttttgcttaatggggaggctcggggtcacatcataccgaagagaggattgaggcaaggagatcctctctctccatttttattccttatttgtgctgaaggtttgtcttgcttacttgatgaagcaagccgagccaatcatctccatggtctccgttttggtactctagagaaaaacttgacacatcttttatttgccgatgacagcctaatcttcatgaatgcctctatagaagaagggaaagctcttgcggaggtccttcgggtttactcttctttatccggccaatgcataaacttagacaagtccaatttatgtgttggtaagaagataagtaaagcggaaggtcttcgtttagctgctgccttgggggtaacttttatagaaaatcatacgaagtatcttggcctccctgcctttgttgggaagaataagaaagaggcatttggtttgattcgcaacaaggtttgggaaaaactccaaggttggaagatgggcctattctcccaagctggtcgcgagatattgattaagtcaattatccaagctatcccggtttatgtcatgagttgctttaggataactaaaggtctaattagagagattcaagcacttatagcccgtttctggtgggggtctacgacagcgaagcatcaaatccattggggagattgggagaaattatgcagagataagtgggccgggggcatggggtttagggatttggaagatttcaatcaatcattgctcgcaaaacaaggttggaaactagtaacaaatacggacagcttgtttgctcaaattttgaaggctctttatttcccaaattcgaacttcatggaggctcggcttggttcttggtgctctaatgtatggagaggtatcctatggggccgtgaactactagtaaagggaatgagatggagtatggcgaaaggaaaccaagttagaatcaatgaggactgctggatcccgagaggaccccctttcatcctaagaaccccagcggtagtgcctcccaatactcttgtgaattcactcatcgatgagtatggtaagtggaaggaagaggacattgtggaaaagatgcatagagatgatataccgtgggtattggggatccaaccgtggagaagagttaacgaagatagactcatttggcaccacacaacaagaggggattatactgtagcaagtggttacaccttgatccaaactgagaaaaaaggggcagaaacttcgaatagatcaatggtgaagaattggtggaagagggtgtggcactccaaattaaatccgaaaatgaagaactttgtttggagagtttgccataactggattcccacgaagagtgaattagttaagagaggtattaaacttgatagaacttgtacgggttgttggagccaagtggaaaccataggccatgcgctttggagctgccctcggatgaaaattgtttggaaagatacaggtttttggcacttgttccctaaagatcttggattgatgtcagaccttatggagttcctcatatatatggaaagcaaatgcacaacagagagatttgaaactttcatggggctgagttggctggcttggaaccaaaggaaccagagaatttttcaacataaggaaactaatttgggaagctggattcattgggctgtagactacattgattcggttatgcagaaaacgaaaagtaacagcagaaagaggctgactggtgcaactcatagatggctggctcctcctaaaggtacttttatgttgaattgtgatgctgcattttgtaatgaaaaaccaggttgtgcaatggctgctgtcatccgtgatagtgctgggtgtttagtggctgctgaagctggttttcaacttggatatggttcggttctgttgtttgaatgtatggctatcaggcttggggtgcggctgattcagaggatgcaaaccaaaccttatattataaattcagacaaccttactgcagttaacaatttacagtctcggcaagttcctagagccgattggggggctcctctcatagacatcttctcttctaatctgttggatggctgtgtagagataagatttgttaatagggagtgcaatatggttgctcattctttagccaaatgggctattacacacaattgtaattctttttggtcagaggatttaccctcttgtgctgctgctattttaaaagcagaaaagcctgaccagttgtaagtttgttcttgcttaataaagtgttttcattcaaaaaaaaaaaaaaaacaaataaaaacttattgaaacttaatttctataatttattttatttgttgttagttatgtgaaaaaatatttttataataaattagtaataaataatttaatattaaaaaattattaataaaaaataacgtgattagaaattatttttaaagtttgagagaagagagagaaataagaaaaagagaaagaaagaaaaggagagaaagagacttttttaagagaaaggaaaaaaggggaagagacaaagaaatgtgaaatgtataaataagagtattaagacattaaaataaataaaaacctattaaacttaatttctacaatttattttatttattgttagttacgtgaaaaaatatttttataataaattagtaataaataatttaatattaaaaaataattaataaaaaatagctgatataatttgtactttggattttattgaacttgatttgaactattgtaagaattagatttgattcaaaatataaaatctttacttaaaatatatcaaatgtactatgagtaaaatagtgatgattgaatta

SEQ ID NO: 115793 - DNA, 3659 bp, Cannabis sativa
tcttaaaagaggtgaaattactactctataatttgttgcagtaccacattatcagtacaaacggtgcttttgaacaaaatgaagggaatgattaaatgtaagcatatgaaattgtacaaaagcaaaacctatttgctgcactgtagttgtatccttagttttgccggcaaattggttaattgtatggacttgttatgtttttctcttcttgccaattggtcatttgtattgtactgaagaaaaaaaatgttttttttattccaatcacaatgcaaacaataattgaaaatccttgtatttcaattaaaagtccaacaaccaaaccgtgacaatgtaattacaaggaaccccaacctttttaatactattgtacactattacctataatatcctcctcattaataacggctactgactttactaaattacatgaattccctgattaaatgaagccaacaaactccacaactcaaacagctggtctaggatttttacagccaaacaattataataataataataataataataataaatagcaaatatataaattagatataaccccatttcctagtagcctagcacttgccgtaaaatgccataaaaggaaggacggcaataatcaattgaaactttcacacccactttctgaatatacatattctagtgatagtaatttcacaggacaaaaggtccaacaagcttaaaacaaattccacctgtaacaactacctccattgataactgtcaacaaacatctgtacctaagtaaatcagatggagtttactctctttcttactaagaaaaagaaaaaaaagaagacataaacttcagtccctaacacgtttgcccaaacattttctttatggggtttgatgatctatggcagtttttggtacttttcttcactctgattgcatcttcttgttggctctatacctcaatctaaagctctatgatacttgactagcacacttcatatctaaggtacttgactagtttttttccagcaatgtcttctccacataacagaataattgttaggaccatagtcatcacggctgcaatcaccctagtttttacggtcatcttcatctttttctactacaaatattataatgctcgtcgccgagagaattataaggttaaggctagttttcggcgagaagaagttatgatgacttgtgaagagttcaagcagcctagcagaaatgtcaaagaactgaggggttatggaaatggaagggatgctgttagtatgagaaaactagaagatgatcagcttaaaaataattttcctaagtttgtgtttaacccgagttacaaagaagaggaagaagaggaagaagcagaagagaagagagtggatgctgaagaagagaaacacgaaaagtttgaacctcgtgaagctccactgcttcatgaaccatcatctgatcagatagtttctgataaaatggggaaaccatttcagcagaaccaaaatctaccagctccagtttcagtactacaaatgcaacataggctgccaccacatccacgaacctcatttagacaaactccaccagtggtcccgaaaaagctgaccccatctccacaacctggtccgacaaataatagcatcacagcccggccaccaccaccagaatatcctcctcctcctccttctctgccacctccaccaccaccacctctcccagtaaaaccaagacctgccctaccaccacaagtgcctacgggtggtttgaatacatcaagacgaacccaagctggacatacagggatgacaacaaaaaacatagaagaaaagtccagggaggaaagctcaaaccctactatggctgggcaaacgaagctgaaaccactgcactgggacaaggttacggcagatgttgatcattccacggtctgggatgaaattaatgacggttcactcaggtaaccatgtcttaactaataactatgataacaaatttcatgattttcatggtcattaacctatgttcattaatcgtttctcatacactttaaacagattcgacgatgaacttatggaaaatctatttggatactctactaccaacacccaatcttatgaaagaagcaaccttttctcagctttcagcaaaatgaactcaggccctccaactcaaattttcttactggatcccagaaaatcacagaacaccgcaattgtcctaagatcactagccatttcccgcagggaaattcttgatgccctcaccgagggccagggccaggaactcgctacggacacccttgaaaagcttaccaaaatctctccaacccaagaagaagtggccaaaatcctgcaattcagcggcaacccaagtagacttgcagacgcagagtccttcctctaccatatcctcaaagttgttccttcggcattcacccgattcgacgccatgcttttcaaagcaaattacgacccagaaatccttcagttcaaggagtctcttcaaactcttgaactaggctgcaaggagctaagagctcgaggtctcttcctcaaactcctggaagccattctcaaagctggcaaccgaatgaatgccggcactgccagaggcaatgcccaaggtttcaaccttaacgctcttaaaaagctctcagatatcagaagcaatgatggaaagaccactttgctccacttcgttgttgagcaagtagctcgatcagaaggtaaacgtaacgtaaagaacagaaatcaaatcctaattagtaaaagaaccaatacccaaaaaccccaactagccatttttgcaaattatgataatctcacagcagaagagagggaaaaagagtaccttttgctaggtttgccattgttggaatctctaagtagtgaactctcgaatgtaaagaaagcagccacagtcgaatcggatagcttcgtcaatgtctgcagctccctcggaggccgagtctcggatattcgaaaacgactctcgttctgcacaaacgacgaggacaagtgctggttcgctagagaaatgaaagggttcttagaggaatgcgaggaggagatcaaggttgtccgagaggaacaaattagggttttggagctggtgaagaagacgacagagtattattaccaagcgggagcttcgaaagtgaaaggggttcaaaacccatttgggcttttcgtgatcgtgaaggattttctcgacatgatcgatcaggtatgcgtagaaacatgtcgaaggattcaaaagaaaaacgcaacgaagaacagtacggcagggggttcgttatcgcctccgctgtcgccgccatcaatgttgagtcggaacaaatttcaaaacttccattcgaacttcatgtcggatatgtccatgacatcttcaagtagtgattcggacgaagatttctgaagcagagtccatgatgatgatgatgtaacgtaaaatgtatgtaaatgtatgtagtaattcattagtctaagaacttcgacacttcttttccaaacaagtttaagattctttctttctttttcgagcaatcctactacattataccatccaaactaattcagttgcaccacgatcaaaaattggattagaatttagaacgtttatacaaaaataaataaacaaataaaataaaaagtggtgaatcaaaatgtttctgtgtt

SEQ ID NO: 115794 - DNA, 1070 bp, Cannabis sativa
tgacaacttgtatgtaaatactatgttttagtcacaagcaactttttgttgtgactaaaaatcacatttagttacaaataatttatgttgttactaaaaaattgtcacgaaaaataattgttttttgtagtgtatgtagaaaatattaatataatcgtttaaaatattatttgtgtggacctcgatcccattttcttagttattttttcttttttgataccgagtcagggctgggtgggtggagtgagtgggttggattttcaagcccaaatgtttagccctagttttgacagtgtggtgtatatacaattaggaaaattcaatttgagcctacattttagaatttcttatacagatttaaataggattagtcaccatttggggtagtttcacatattgtttgagagtgtaaaagttttatgtagggaagcttgaggttttcctctaattctcttattagtgcaatataattgtcttcattaccaacaatacttgcaaaatattaaagactggttgcattgaatgttagaagtataactctatctagtcttctacgatggattggaagagtaaaattgagtagctttaggaagttggtgctcgctatagcaagtctagttaccacatttggaggatgaggggatggatgtctatgggatgaaagctacaggacacaactaaagtgtgtaaagaaatcaaggttggagttgttcaaagagttgaattattttgtccaagaaagatctcaaatgatgataaagcttagttttttaccatgtagttcagcattataattttcatattgtacagaatacaaattgtaaagtcacataatttcggcccgaaaattaagtgctattaggttgtaaaaaaattcactactacaaaacaagcctttagaggtacttttttcagcataataattaataaccgacgccaaagggttgaaattttttggaagggcatttttacgccacttttggggtcggttatttccaaataactgacgccatagggtgtgcccccctatggcgtcggttatttctaaataaccgatgccaaaagggttt

SEQ ID NO: 115795 - DNA, 1280 bp, Cannabis sativa
gtaagaagagcattttattaggcactagtgatacttagtatcattaccacgaggtggtattttgcaattggttagctatattttataaggttattacattatattatgtgaaattcgatacttaattatattactagcaatatgcacattaagtaatgttatgcaccattgatagtgctaagcaccaatagcgatatggagtctaagtacgaattttttaaactcaaaaaactagaagagtttttaacaactataaaagaataataatgaaaggagaagagaggtgtaaagagagcatttctattaggcaccagtggtgcttattacgacgaggtgatatttgcgattggttagcgacaatattatattaaattatatgaaacttgatacttaatcgtaccaacaacaatataacattttaagtagtgctaagcatcaatagtgatatggtgtctgagtactgttttttccaactcaaaaaactatttttaacaattataaaataataataatgaaaggagaagataggtgtgaaaaatacggtgtcttttagttcttggcatgagctaggaagatgtatatggctgtatttatgtatgtatatatgactttacagctcacttgggttttttgcttactgttaaaactcttaagtttgcatgtgggtgagtctcatttttcgaaacaatttggaattttgtcatgttttgttgctctgtttttttctttttcatgaaagacaactctcatttttacctcaaagtctatgctgtggaaggatttttaggagtcttaaatgggaccccataagctcttcattatgtttttttagtgaaaaaaacaattgacattattaaggttaagtgtcatttctgaaggtgtaaaacagtacaatcttgtggaaagggatactcttactttacttacccaagaactctagtgtgtttttgtctgttgaaggttttttgatttacttatttccatattttatggaatagattctttttaagacctcttttcagtcatggtcatcactgaaattcccctatttcaggttatgattcaacttttgaggtaactaataaatagtcattgatgagatgtcgttttcatcctttgcttaaaaattcatttgtaaaataactttgaattcaaatatataaatattagatgtattctataccacaccctttgattgggaaatttgattttctatacttaaaaatgttaatttttttttaaaccaatacattttacactacaaaaaatatgacactttt

SEQ ID NO: 115796 - DNA, 2322 bp, Cannabis sativa
agccaatatcaacaaaggagagagtgagatggaaagagagaagaactcaatggctggaagggagcatgtgcagaggcaacgcaagagaccaagctggctaagggacttcatgatgactgagagccgctaatggagagagagtagcagctgaattctattattttggttgtgttatttttgctgtgtaatccgtggacaaatataaacaattgtaattgctggaattgatttttttatgatgaatgaagaagctgtaaagcttgggagtttggtattgactcaaagaatacccttagcctttttggggctatcagtcttgaaatttatatactgtacatatacacttaattatataaataaacactaaatgcatgggaaactaaagtaacaaagcttcattgttgaggtagcaatagctagacacttgttctactcatcaaaagtgctcatgaagcctccaatgaagccagctccattgcagtttccacataaaatgtgtttttttcctctgcaaaacaaccaaacaatatataatatatgtatatatatttctggaaaattaatcccatgtatgaattatattaaagagaacaaaaaagggttagttagttagttacccgcaaagccaacaagaatcacccgctttaaattgcccattgaagaaatcaaccgaattcaccccattccccaagcactgcgaacactggactgcacctgcccttatcatcaccatttatttatataaacaatgttattatatatgcttatttataaataaattataataacataaagttataataacctctttctttctattctcattcttaaagtttcaactttaccatttccatcacaatcatcacagagcacactctttggtttcttgctttgattacttttattagctgcctgttgagaaaaacttaattagtcatgtacacaagacttgtttaattataatagtattagaataatattaggttgattcaattgatattattgtaattgatttataaattagagtagatatttagttatgggctaaatattctaataatagtcatcatttaatttcttatctaattgtaaaaatattcggttatgacttatgggagagaatatttgataaaaaaagtatcacctttataataggattggattgttatgcgtctagatagtttatatataattggacaatctttatttttacttattaacaagatattgttaggatagtagagtgattagttgggttttcaattagacagttggcatttggtatgatagtttacacttgtgaaaaataagaatgtgaaactaaattaaattttaataactaaaagatttgtgttttcaagtggatcttactttttaaattaaaatagagttaatgttaatcttttctaatactattttatattctttctaagtctattctcttcaccattattccctccaacttaaactcatgtaacaaacatcttattagctgacgtttagttggagggaataaaaacataaatacaataagaatgacatttcaatactttaaataaaacttaacaaaaaatagaataaaaattatttctttttcaactactctatttcattacctcaaaccacctagttacaagagtactgaaacagttttaattagttactagtttgttaattgttgctcatttttctaataattttacaaacgagttttcagcattcatttctttgtaatatatattaattataatcattacgaaagaaagaaacaaataataataataaccgaagaagaaaaagaagaagaagaaaccttggctttgactttgaggcaccgaaatcttggtcctagaagggttaggaggtggttggagctgtgaacaagtgtttgatgggtatggatatgatttccaaaacagttatatgaaactggttttggtttggaagagtttagagttacaggtgccgagcaaagaggataggccattgattcaccaaattgaaattaacttccttcacttccctttaccaccattcattcaatttgtctcaccagaaaaatctttagaagccagttggtctgggccaatgggcttcatatctatttgggctttgttttaggggaaattatagtaaatgaccccaaatcataggagtatgttagtttatgttctcattttaaaaaaatatagcaaatggtcctaaatcataagactattttagtaaatgtcctcatttcaaattttttattttttttagaattagaagcaaattatttaaacattatggtatatctatattagttttgttaaaatctttttt

SEQ ID NO: 115797 - DNA, 2945 bp, Cannabis sativa
  modified_base (2846)..(2848): a, c, t, g, unknown or other
  modified_base (2907)..(2910): a, c, t, g, unknown or other
tattttttatttctcaaaatttttgaaaatttctttttatgtatgatagtttatgatgaatgaaaattcttagtgcagtactattgattgagttgaaatttattgattttgtatgggtatcagattttgctatctccattcatgattatggaaaactatttttgctatcttcatgagaacatcacaggccaactttatttagattagaagaagccaaatgagtacttttaatttgagattctagcagaaaaattaaaacagtggttgaggaatcgacaaatgtttgggatatcaaaaaaatggtgtgtttcgggaggttttcaatcgttttggaaaactatatagagaaggggatttagacatagatgcctttaaaggctaacattgtagcagagtgtgtcttactatttccttaagatatctcatcgtcaaaatatataagtttgatttttcaaaacatctctcttaatgaagatatatgagaaatttcaatttattatggccaaagatcaggaattgtcaataaaaaaaaagggggggaattatgtgagataagttacaactaattttataaaaagaaaaattcatccaacacttaacagcctcaacttttaaggccgtgcaaaaaagaaaataaattgaaaggatttgggggattcagtcttaacagtcttaaaagtctcaactaatcttcataattcacaataattcttttacaaaataataacttatatatatagcaaaatttacaagagtcgtgtatatgtggtctttgacaagagataaaatgaaattatgtggaaatttcatgcgacagtaactattacaacattttcttttaaattttattagacgacctttaattgacaactactttgaagtagcaagataggatttgacatgatttgtgagatcttaggctgcgtttggttggaaagaatataaatataagaataagaatgagaatgagaataacaataagaattaaataaaataaaatttaaaatgtattaagaaaagttgataagaaaattattaaattttttttgcttatgttatattagaatggtcgttccttttatttcaaaatagaatgtatagtcattccaacaaaatagtgaaaagggcattctattgaaatgatatttcaatactttaaaatgcaactaaacaaatgaatgagatgaaaattatttccattctatttcattaccttcaactacattgttcctttgtctacatcttctactaggttgaacagagtcttatacgaagaatatatgttagggtttcgattactagtgagtattagcttatcttggtctgattatcgagtaaatattagatgaagatccattactaatccaaataaccatttcgggaggtgttttctttgttaatcccaaagtaaaatttccaggggacaggtcattttttacttttccatgaagttagcttgtaatcctctccagttttgagattgaaacctagaatggagtctggtaagaacgtatcacatgaatttttgaaactaccacaaatcttcatctgatgtaacatttttgtggacaaagtttttgttgtctaagagtacgctgaacatactactactagttctgttagatggaaggtcaacgttggttgaccaaattgtcgaggaagaattttttattagcttttcccgtaataagttctaaatttccattattgttgatttgaagaactaccgatgaagtagcggttgtaagcgaaagtggatgctcgcggttggcaacccatacaactggacgaggaaatcatatcccttataccaaatgcccaaatattgatttgttgaagtgttgtcaggcgtgaagaagcctaatgcaaaaacttggttggaggaaacaagagtttggtttgaagagagtgattgcgaagatgttagattagaaatgaatattgataagcaacaatttgtgaatgaaaataacaaaattatgatgatgaacaacagagagtacttaaaggattcattttagtgacaagctacctagctagtgtaagcacaaacaagactttagtttcatccatttaattttttggttttgtagtaggaaaaaacaccacaatttagccattaattgcctattctcaatattaactgtagatgaggacaaggttcctagttgagagtttgttttggccacaaagaaatttgataatgaaagagataacaacattttatggaaagaaatcacttggggctatagctcggccatagaagacataggagagtgcgtatgtgtggtttcttagaatcgaattctaagttgtgcaaagtaatataaacgcttcaattgaaataatatttcatcaaaaaagtctcttatttataattaagttgatatggacgttccaactgctactttgaagactttttgccttttttttgagactgaattattgttttctagagctatatagttactattttccttatgaaatcatgacatcatcaataattttgatttttcaaatttctcttagtgaagatatatctgagaaatatgtgtcatttaatgtggtagtaaagccacttttaggcttgttaattgaacattgaacattcaacattgatcgaacgaaaaaatagcttggagagttttccttctatctccatggggggaggaaaaaggaacactcgaagcttgatattaaggttataggccatgttgatcggaacatcaaactacctttaactcaaaagctgccttcgatttagaagtttaatgatgcactacaaaaaatcttacttttagtcacaaacaaaacttatgattaagtgaaaaaattgtgactaattnnnaattattattcttatattgtgactaaaaggtccatggctaaaagtattaatcacaaaannnncaatttgttgtgactaaaagtatttttagtcacaa

SEQ ID NO: 115798 - DNA, 3406 bp, Cannabis sativa
aaccaccctttcaaaaaaaaaaaaaaaactacatatatgcacatgatatacaacataataatattatttttccgataaacgcatagcaaagaatcatatacattaattattgttaaaattattcaaaagttaaaaatctattaataattaattaaaagtaatttgtggtataaatacataagattaattttcgattgtaaataaatattaaatttaattttttgcgtaataatacttaacttatatttttggaactgatttgtagatacttagtcattaaatgttaagttattattcagatgtcattttttattagtatatttaatttttttttaaaaaaataaaaataaaaatttatgacctaaaccaatcagaaattgtcatgttttaatttgcttaaaacttaacaactaggtgtttagagagtttcaaaaatataacttaagtattattaccgcaaaaaattaaacttatgtatttatttacaaccgagaattaaacttaagtattaatgtcacaaattacttattattaattgataattataaagatcgaacaattcaaacatttatcatatataccctactgcaaatttccatccacttaatttcttctatattgtaattatctaaaaaatttcataaattttaaggaattctaaataatttatagttatacttaaaatatgaaacaaaattgctttaaagtctgtttcatatacttataaaacaaatcgcaagtttattttcgaacattataaattattcgatttttttttaaaagaaaaacctaaaatgttctaactaattaattattattactacaaaatactatataaaaaaattataattttttcacatgacaccaaaacagatccgcttgcaccagatcgagcaaaattcactcttcatcataaaaactccaaatatatacatatatcaataaagcaattacatatatatatatatatatatataaatctgtatgacaagtagtactgaatagataatattcattttgtagtcatcactgtctccatcccaattctcttttttaaataaacaaaaaataataaataaatataagctactatattgatccaatttatatatatatatataatgacaatagctattaataagtcaaattaatttgtgtcgtgcatatacacacacactaaatatacaaagaaatatttaactacatatatgaaatcacatatataattttgctttattttttttttttgggtactttctatttatagaccaacatttatatacatatagaatttatatgttaaaataataataatgataaaaaaaaagaacctttaaacagttgaagtgagtgtgaatcaagagctcaaacaaaggatgctccgaaatcatcttcttcatcagaatattattcttttcatcatcatcatcatcaccaaaaacatcattttcaacttcatgatcaactcctaattcatcaaaagccctagctaatttactattactactactattctcaccactgttttctcccattaatttctctctctcttatcttgtattttgccaaaatgagtgagaatgagattgtgtagtgtgtgcatgagatgagagaatagccaacaagtacgtactatactcttatctgcacataccttttcttttcccaatacttatatatattaattattaattattatttaaaagagtgagagagagagagagaaattcaaaatgaaaataaagaataataataaaaaacaaagattgactgtattaattattcgtacgtacgtaggcccatgcatgcagcatgaattacgattaaaggtgatttataattattacatctatatataatagaaatccaagtaactatatatatacattaatatcaaatcttaatttttcactttaataaaaattataataaattattaactaattataaggtgtcaccttatataaaagttaaacactttaattagtgccacatagcaataattttaatattaacaatgcatacacattatgacattattatcaatttattttaaaaaggtaattcttaggtaaataaatttctattaataagtaaattagacataatacattacatacaaatattacttattcagcaaaatcaataaaaataaactataattaagtcgtttacattaattaaatgagtcattatctttgactaaataattcataatgaatcgtttacattagattctttgaatcttattttcagcttgttaaaattttatggatacactctttttagagaattaaccctaacatttttctattatatatattaattattcaacatcttaattttctctaaacttttttaagatttaaagttacgtacttattttattagtttatttgatttttgattaaatacagggtagaatattattatatatttttataaaataggggtgaaaggaacgtgtcaatggggttgatgttcgattaaagcagcttttgtatattctgaaattaagaccaaataatgtaataatgagcttaaattttcgtgtcgtttactgttacaaattgtagttttatactttgttgcgtcattcaatgccaggtaaacaaattcttacctacctacttttgtccacttctatttatatctacactttcacaccccactctcttctctctatattattttacatcaaattctcctctttcttttttttaccattttaataggaaatatgggtggtacaccacttaaatttaaaaaaatttaacacttaaccacaaaactacaaactctcatttcgtaattttctttgtatacctctttgtccaataatcacagttaagtgctacagtaactttctacctgtacacacttgtacacgtgataaatttttagtgactcacgcaatattaatttttaaaaataattataaatatttaaaaaattaaaaaatcagaaaaaataattttaaaaatattttctttttaagatattggcggctaaaccactcgaattttaaaatttttaacacttaaccacaaaaatcgatttttttgagggcaaaactacctaaactctcattccatttttaacacttttcatttttcttttcttcttcttcttaactgaaaaaaccctagcacccagttgcctacccacgactcaaccttctccgactcccctctcacacacactctctcacggtgcacaacgctagccttctctgaccactccatgtcagacgggccacagaactgaaccccacgatcccaagaagtccaaactccgatcttccctcttctctctctccttcgatctttctccgaccccctctgttttttttcgttcagtccgcccccccttcgatgaccaccacgaagagagagagagagagaga

SEQ ID NO: 115799 - DNA, 1900 bp, Cannabis sativa
tacccggtgtttccccttacggatcacgggactactgactgccacaacactcatctatgttaagaaggaagaagctcaatctgaactaaaagtataaaaagatggcttggggaataaacccagctcaagcaatgtagaaacaaacgttgcaaacacaagcgaaagccatgagccacatgggaagaggaaagatgagtccaatgagtcatccaaagaaaaaaagaaacaaaaaaattatgagaagtacgtccgtttacaccatgtatactgagctgaatgaaacacaaaaaaatatattcctcacgaaggggaatagggttttattttgcaaaccagaacctatgacgaatgcgaagaataaacgggatcaaaatatatattgtcactttcacaaggacattggtcacacgactgaagagtgtcgacaacttaaagatgagattgaaagtcttatttccagaggttactttcgacagtacgtgcagaacaaggggaatgaatagaatcaacgccataaccagaatcaaaaccaaaatatctagcaacctcttgtagaaggtgaggacatctcggtgatctataggggaccccatctcgctggaacaagtaacactacacagaagtgatacataaaccaagtgaaaaatcaatcttcaatttttgcacctaaaatgacaaaacgagctaagactgaggaacccctgataactttcaatgacaacaatgtgatgcacgtaaggtgtttccttatacagatccactcatgataaccattcagctcacaaataagagaataaagcaagttttggttgataatgggagttcaatgaacattttgtataaagaaaccttaaagaaaatggagttgggaggaataactctaaaaccatgcatggtaatctatgtggattcacaatagatagtgtcacatgtttgggaacagttaaactccccctcacaatgggagatttgcctttgtcaataactctaatgcaatagttcttggtggttgaccttccctcagtctataacatgattatggatcgcccagcattgactgaactgggggcaatcagcttgataaaacatttgtcaataaagttcccaactcagaacggggtaggaactataaaaggcgaccaactaatagcacgagaatactgtaggattgagttgaggcaaatagccaagtctcgtcaatgatggttgtgataactaacaaattgagaaaagggaggaagatttggacccaagaatgggtgaagagcaatcctaactcgagtcgataaaggaatcggaagaagtatttcttaacccaaatgaccctaccaaaattataaaaattggtaaaagttgaagtagcaattaatacactttttaatggtaaagcaggattaatttgcttagagccattcagaaatggtcatgactgacccgaatgtcataagccatcaccttaatatcaaccctcaccatcctccaaagaaacaaaaaaaacggcttctcgattcaaagagacagaatgcactaaaagaagaggttaacaagttgttaaccattgacttcatacgagaagcatcttatccacaattggtttttaacccagtgttggtgctaaagccaatcgggacctaaagaacatgcattgacttctccgacctaaacaaatcgtgtccaaaggattactttccattaccaagaattgaccagctcgttgatgccattgttgggcatgagctcatgtcctttatggatgcttgttatggatataaccagataaagatgaacattaatgattagggacgccacgtgtgtgattttataaattagtttagtactaatagattgattaattattaaaaaccatgatgatattaaaaacttgactacaataaaatac

SEQ ID NO: 115800 - DNA, 1651 bp, Cannabis sativa
accttaaaaatgtaaacggaacagtactttggagggttttcccaccaaaatataaggttggatggttttttgcaagtaaattgataattgaaagggttttgctgtaaattactcaaattattaacatgtgagttgtgctaactttttataagggtaggccgacatggtatgtaagtttaatatatttgtgtcgtgttttattcggtctacatatacgtgatttcaaattcaggttttaatttttcatattctctacaattattgagttaactaaattatttatgtatatttattttagttttgattattttatatattactcgagttttcaacccacagacataaaaatatatacttttaaatttatattttccaataaatttattagatgttacatttgatttttattatcattctaattttagatattacatttaattaaaaaaatgaggcaaaaaaaaaaaaaaaagagataccttgagttgatctatcaaggagtccaagataggagccaaaactacgaggaggagaaggtttgtcatcttgagccataacaaaagctattccatcaccagaaacactactactcgagttcggaaaggcagaaatcctaattgtgaacgtggtagaaatcattgcgggccatgcaaccacaggctgcccatacaacactcgtccaatcttgttctccgccgccctcccatgagtagtattcgatgaattggagggcgacggtggctcgggtgtgaggttcaaataataatgcccattattggtattattattattacctatgctcactgatcccatgcaaattaggtcaccatttatgcaactatccggattgaaagaaggaaaggaaaataaagtcattttggtgagatcattattaatggagctcatgatcatagaagcttggttgagaataataatgacatagaatattaagataaacattatttttagttgtttcatatgatagaataatttataacacaagattattaattactaacttcattaatgtaaattaattctatgtacatatataagtttgtagttgctttgaagtttattttgtttttatgtaatgaaaaggatttttgaaaatacatatatattaaggcaatgttttgtaaattttgggatattagaatcctgttttttgtttgcttatttcttttgaaaacacaaaaaagaagaaaaatgcataattttgtcatagggggaaaaaacaagggaaagaacaaaatttattatatagagacatgtttgggaaaaaaatattatattaaatcaccttaatgttgaaattgaaaacaaacattatagtaattacatccatccaatcttaaggtgatatattattatttttaaagatatattttatataatttaatgctgggtcctttgtatgataagttttgtacatatatatttgttttttttgtcatgtataaattttttaaatttagagttttttttttcaggtataaatttttgaaatttagtttttttttattatatattctggtggcgtttggtaacacttttttaatcagtttttttgtttttaaaagtagaaaagtgaaaatatttttcaaaaacatgttcaataaaactgtttttacttttcaattttataattaga

SEQ ID NO: 115801 - DNA, 1938 bp, Cannabis sativa
gggggggggggggtgtgaattgaagcttggttcagggcagaggaggttaagttcgagataggctgtatgggaattttggaatcaggtgaagaattgaataaaatgccatccatggctttccttttgcgtgggccttgtgagtgttcatacactctaaagtcatcaatacccaataaggggttgaacaaggtgggctcacgaaagaacttatccactgtaaggtctcctttgaatagttctcgggcttttaaatgggcccagcactccttggagggccagtccataatatgggcttgagagcctaatatggatgagctgtatggtatatatgggctcgtgggcttagaaatgaggccttcttggccgctttgagatgtatttccctcattatgtgagtcggtcttcatcaaaggggaatggtttttgctgctttctgccattgcgttcacctgctggcctggggagggaaagtcgtgaggagtcgttttcaaggctctgttctcgtttggattttctggcatgcttctcccacatctgatttgttcccaggagctctattgcgattgggagggtcttttgtactggcagagattagttccttgagttcctgcagctctaggattgataccgtttttgagttgttgccgaaaggggcaatttccccaatacccggtaggtaaacgagggggaattgtgtaataaccgctccttgttgtggttcctcctgaacttggtcatcgtcggagactattcgttttttggttggaagttgacgacgactttctcggagttcatctgtttcaccatggatgagagccttttgcactttcagttggttgcggagggtcgggtccacgagcaacctcttctggaatacccaatcttggaaccatttggcaagaggggtggtgaaagtcgacctatccttagcatctgccttaagccatgtcccatacattgggaagtaatttcctttatcgtcttttaccactgtaggggatttgaagcagatactttgatcatgggtgaggagtccacatttgaagcacatttttggtagtctttcgtatttgtactgaatccaaaggtcctttaaacgctgccggcggagaaaaaaaccagagaaaactggtttattgaggtccatagtggcacgaaacctgaggttactcacacccacagcatcctcaatgccttgaggcaattcatagaccggtgaggctcttgaagcaagctccttgaggttagaaaggttccagtaaaatggtgggatgctatcaaccttcacccacattggtgttttgtcgaatcttatctccgaaggggttaaccaagagggccaaggcatgatgactatgagggagccacaaacaaaccacggccttcgggccaggacgttcatcgcatcatttcggtttgcaaatgtgaattgtatgagtccatcttcaatttctttccatttccagcctttgatggcattccaagatagcctcagagagccttggatggctgctttgcctagtttgtggcggctaagaattttccccactagaacctggtttgattcctgcggctcatcgacttcaccagggtttagggagaaggtaatgtcgttactttcaatttggactgcatcctgaaacaattcgctgacttgtgaaggatccatggaactgaggaaacttgagaatgaggaatggggaccgttaagaaacttgggtagcagggatcgtaacctgggacgaggacgattgacagacggattaaaaccttgaacagcaacgactgtatacttccatgaagttagctcctatagagcattatcaattctactatttcattttggtttacaagtatatgagatcggttaattaattaattaaaagaaaggcattttacataaatatatatatatatatatattttcttaaataatta

SEQ ID NO: 115802 - DNA, 3987 bp, Cannabis sativa
  modified_base (105)..(122): a, c, t, g, unknown or other
  modified_base (272)..(275): a, c, t, g, unknown or other
  modified_base (442)..(447): a, c, t, g, unknown or other
  modified_base (677)..(678): a, c, t, g, unknown or other
  modified_base (931)..(935): a, c, t, g, unknown or other
  modified_base (1092)..(1096): a, c, t, g, unknown or other
  modified_base (2876)..(2883): a, c, t, g, unknown or other
attatcatttatattatttattaaatagaccatgcaaattctcttaattaataaattaacccataacctcttttcttgataattaagtcattgcttagtgaaaannnnnnnnnnnnnnnnnntctaattttagaattaaaattgaaattaaaatcaatttgagtccgtaagcagtattgtctcaactagtgaggggaccatgggccgagcttccaataagtagatctaaaattcaccgagaaaattctctaacttattaattcctcctcgcnnnnctatagattcagaattgcactctcaattatatagaacgttcaatatgtaccaagatatacatatgctatgattatccattgtgacaatcctaacagtcgaagatcatctatagattatctacatcgaatagggacaaatttaccgttctacctttcaatgtattttnnnnnnaaaatacttagctacctataattgatatttcagtaaattaatatattactgaaatgatgcctcaatcatttatctctatcaagctaagatcgaagaaaattattgttccacttctataattgaactatcacgttcctaagatgtaagtgttcagtcgaccagactttaacgaacaactttaagaacataaataatacagttgagctgaacctaaccatatcaagattaanntccatagacctaagatcaactagtgatattgacttagaaagacataatcgtaagtttatgatatcttatccaagttcaatatctatccaatccaatgtatactccatacatccgatattggtaaatttttccaatgccctgaaaaggacataacacttatctaaggtgcaagtagaccttatcgctgattatcatgccaatctaaattcagtgtactgacaaattatcggacttaaacttttaaacatataannnnnattatattccactgtgctgacgatactataatcaagaataaatgtatatgttctggatttaatagaattcatacattaaacataatcatgaaataactcatgtgaaccatgcaacataaaatgatttttgatcttttattaattagtaaatttgatnnnnntgaaatgagttttatttagggcagaaaaaccaacacatttagccaaaagaagtatcatcccaagtgaagaagatattgaaatgattgaaataccaacaaagtcatggatgacacccatcattgaatacttaactagtgagaccctccctgatgataaaatgaagcaagaaaattgttatgcaaggtccgaaggttgacactattagatggaagactatatagaagaggctattccatgcccttattgaaatgcgtgataatggaagagtcacaaatcatcctcaaagaaatacatgaagggttttgtggggaccatgcagggggacaaagccttgccaagaaggtgattcgccaaggatactatatgcccactataaaccaagactcctttagctatgtacagaaatgtgacaagtgtcaatgcttttccaaaattccaagggccccacccatggaattgacatcaatgactttaccatggccctttgttgtttggagaatagatctaattagagttcttccacaaggaaaatgaggtgtaaaatatgcagtggtcgcggtggattatttcaccaaatatactgaagttgaaccattagccacaatcacagcaaaaaagaccttgaattttattgtgaaaaacattgtgtgtcgcttaggtatactgcaaaaatttgtgtcagataatggcacacagtttgaaagtgatctccttgtcgatttttttccaacaaaatggaatcataaagagttttgcataggtcgcttgtccttaagccaacgaataagtcgaagatgtgaataaaactttgaaagacaccctgaaaaagagactcaaaacgacaaaagggaactggccgaaagagctcccctaagtgctttggtcataccaaacctcacatcggatcgcgatagggcacacccctttctttcttacttttggaagtgaagccatgattcttgtcgagattaatattgcttctcatcgcacacaatattatgaaaaacgccgtaatcatttgcttctagaagaatctcttgacttacaagatgagagaagggaagaatcgaaaataaggaacacgacttacaaacaaagggttaaaagatatttcgatagccaagtctgcagtagagggttggaaataagagatatagtacttagaagagatttcctcgcaacaagggacccatcttcaggagtacttggaccaaattgggaaggaccttacaaccaccatcttcatcagatttgtgaatatttgatctcccatgagctttgtgttcataagtctcgatacagatttcacctagaaatccattgttgtattattgtccacacactcttgagatcataactctggtgtgtcagatccaattaataaaaacgaaagtagacgtagccccattactatcgcgacatggggtgtactactataaatccctggtgtccatacaagcttgccagattaaatagagggttggtgccatgagcatggaacaactaacattgggggaaatattatcagtgatggcaatcaccaatttatttattatataattaaattattatttaaccaaccaactaaattttgaaaatttaggattgttaaaaaaacctaaaatatcttttcaaaatttaaatttgaaactacttttaaaatatttaggtttatttgaattattttatttaattaaattaaatatctggtaagataaatgatttaaaaataaccaaataaatattttcaatatccttttctaatcttataatttaatnnnnnnnnaataacaaaataaactaattttaaaatagatatggttaggcaattgttattttaagaataaaataataaataaataataattatccaaattatatgtcaaaatatctaaaattaagtatttttcaaatttataaaaaaatatctagtctatttaaatatttaaaatactatttataaatatcttataagtaaaatgatataaaatattatttttctaacttataatttataaacaataaaatatttgactaaataaccaattttaaatttcaaaatattatggttaggatgtttataaaaatatttaaattaattttaaaatttattaattatttaattcattttataagataattttaatataatatttcaaattaaaaaaataaggctatcatttaatttaaaatataccaaatattaaaatatctaaccttataattaaataatatataaattttaaagaaattaacaaattttttaaattctgaccataatttaaaaataaaataatcaatttttaaatttaaaccttaaaatatcaaaaattaacaataatctattaaaaattaaatattattaattttaaaattttgatatttaagtttgaatattaaaaataatatttcattttgaaatttagggtttgaaattggaaaaatacaaaattgggtgaaaaatatcacaaaattgaatttttgggtgcaaaacacccttgctgtgcacacaggctgagtgcagcctcatccgcgtgcaggaggttgcttgcagccttcgtgtgcgtagttgggtgatcgctcgggtgggcgttcagacaagaggataggcttcagacatgcatggacaagcaccttgtctgaattactgcgtgcgcctagtgctatctcgacaccatattcacctgaaacttcaaaacaccataacttcttcgtttttcatcggaattgatttctttaaaaaatgaaaattgcttaatttttttataagaaatccaaataaattattttcattgaaattttttgtaatttacatacattcatcaaataccacataaactaacatgaacacatccaaatcaacacaattaacatattcatcgttttaaat

SEQ ID NO: 115803 - DNA, 2988 bp, Cannabis sativa
attatattgttcaatacgttcacggataatattactaatttcatcggctcccccgggtaatctgaaaaatttttttttttttttttttttgaaagaacagataatacagatgttaaaaaaaatctgaataagttagaatgctgaaaatcaattcaaacaacttattacattttgtttgatataactgatatgtatagattatagattaaaaatagtcattacaaccctatatatatatatataattagagagtggttattctcatttttgctttctgcaggtaatgttgagattatccttcttattcttggtataatttccctgcaagtctgaggcaaacttggaggccttcccaatgaaatcagagacccataaagatatacgctctgctgtctgctcagcaacaccccttcctccactcccagtactcccatggccatgcatagctcctgcgctaaccaatcctaattccttttgttgcttctgataaataatgttaaaataataaaagtaactatgtaatgcaatataagtagaagtgtttctgatctatctaaaaaagttggttttctatctttaccagatgggtctttctttcgctatcttcttcactatctgaaataataggaattggtataacccccactggcaatatacaaatttgtctctctaacaacatagcgttctgcaatttttttgtttttttaaaaaatattatttattattagctcattatgaatgaatatacatatatatataccatgcatgtatactatatatataactttgcttacgtttaagagaagagcagttttaaatgcatatggttgtctgaaagtcactaaagctgcggactgggagccctctttatcatctttaaatctgggactgtgaaaacaaatgaattattagctaattaattaattaaggtacgtaatagtacttatatataaagtaacttatggaaaaacaaaaaataatacaagtataattaaatggcaatacgtacggcaagagcttaacgttttctaccattccacagtaagaaaagaagtcaataaggtcgtcggaagtggtggccggagaaagattaagaacctgaatagtcaagttcaggcagagggttgccattgctattactgtattattacacaatcagatattcacatcatgtgcgctctgctcttatatgctattattattattatattaacaaacccaatgcaaggaacgaaagagaatccaattcccccactactattaattggcatctaatccctcgcgactttatcctaacatacaaatcagttacaagtggaattttcttgagtggaccaagcatgtataatttaatgctaattaacgtacattgtaaagatgttaattctcttttttttttttttatgtttggttttttgttttaattaactaattaaaaaaaatatatttatatacatcatatactaatttttttttaaagtttatatttatacttttaacatgcgaattttttgatttataatttttctatttttttctttcttatttattaaaacttcaatattttttttttttttgtattttttttacctaacttctttttttttttttcattctttttcttatgtcctaggttgttggttttgagagactatatccttttctaaattatttttcaaatttagagaggttttgtttattgtatgaagaacttgagtctaagaagttcttagtattttgttattgtgttattctgtattgattcttgttaaaattgtataggttgaagtaagtcactctttggaaggaagtgtgcaagtgctacgatttgaagagagttcaaggtctcgacactttagaaatttaattagaaggatagattacaataattgcagtaaattcaaagagagattctttatttataatttatataagtcaatttgattttgtaatcacttgagattcatccactaaattttattctctgggggtggcctcgtggactagtagcaatttaaaaggaatatcgcatataatctcgtgtgttctttattttatgtttgtttttactttctgtttaaacatatctctattttgttcaaataatttctatgtctgtttaaacatccatgttatccatatttctagaagaaagacacatggcacaaagctgaaggtaatcattgtattaatatgggctcaagcttccctagtcacagaaggctaagctagatccggaatgggcccagacccagtggaggatcaagaccttgctttgatatgtaatggtctcctaagacccagaagtttgcccagcctcctgaaacaagtaaaggatgaagccctccaggcatactagagagggtacgcagaagcctactgaataataagagatgaatgtcatccctgacgtgtctgctcctttgacacatgattgttggaacatattttactaagatctagatttactaacatgtatgtttgattataaactataatctaaaattctaaatatgaatttccaaaataataaaataaacacataaaagattaagaaatccttacaatgatggcaggggaataatatgactccactatagattcgaaattgtacttctgattacatagaacgctctattcaccaagaatagatacgctataattatccattttttatatccaaataatcaaagatcctctatagatgatctacatggtgtagtataaatttaccgttctacccatcaatgtattttatcctaaaaatacttagctacttgtaaatgatatttcagcaaactaatataattactaaaatgagcgctctatcatttatcgcattaagccaagctcgaaagatatcatcgttttgcttctaatagttatcgaagctatatatttcatatctatgattagcgctcccactcaattacactatcatgttcccaagatgtaagtattggaccaatccaattagtcagctttaac

SEQ ID NO: 115804 - DNA, 2453 bp, Cannabis sativa
tattttcaaataaaaatatattacattaatttcatgaaaatattatatagaattaattttattttgtatttttacactaataaatatgcatttttgactacttaacacacatgtaccccctcagagttttgatgattttttcatactcactcttgatcaacacaaaatggtatttcagagaggttgtcgtctccagggctagaagacaagttgcagcttcaccaataaggggaatagagaaatttagcctctttgtagcaacccaaaaagtagttcccaagtgatctctagccaacgccgcttcacacattgctccacttccaactctaacatcacagttaatcttgatccagtcgtccgagggtaaggaccaaaggagagaaacactagtaggaggagggggaataaacagtagtcataatttgtataacaatgagtgatagagtcaatataatatttgatactattcaagttattgttgtgttccttatcgttacgggcacgccaaattatttctacctcaatcgaagcgtagaggaacacctcattaacattagcacccttcaactttagccccctacgaaattgacctgatcccaaacatggccacctgactcaataaccagcataatgtctcaggggaagatctccacaagtgaaaagtaaagttgtaatggaagaagagatgttccatagtttcctcataaggggctggaagtgttatcaatttacattctcttgctagaagagaacaaattggaagaacattggaaaggatgatctactaaagaactttatggcgctccaacaccttataattctacaatttatttcacagggaaggagccacatcacagggaagagctcaatctaaagcttggaccaagtaggaggaattggtagagaaggttccagaatgtttcttggtccaagcccaccgatcttcgccttgaccactaggcttacccccttctaaatattatgaactgtctcaacgtcaaagagggagtagagctttatgagatcctagtctccagtatctaaaagcaggtccacaacccaattgaggccattgggacgattagccacgtgggttggacataactttttaccgtggatcacccatggatcttcccaaatatttgtatctttaccatcagtgatcaacttacagaaacctttcttcaaaattgttttgtctttaacaatatttttccagaactaagagtctgaactcttgtaagagcaattcatgaaatggctttccttgagatacttggtcttaaggaccctgccacaaagcaattggttttcattgattagaagccatccccatttagccaggaaggcttggttcatctccaacaattttctaaaatcaaggctcccacacgatttagggaggcacaacgtatcccatgatttcaagtaaattcctcgattccccttctcacaaccccaccaaaagtccctaaccatgctatcaactttggatgccaatctcttggaaaatttcgtagtttgcatagtgtacactgtgagggtaagcccaactgatttaatcatagtagctggaacaactttagaaaaagttttaactttccaaccttggagcttggacacaagattacgcatatcaaagttaaaatctgcatcttttaaccgagatttaaaaagtgggagccctaaatagttaatgtttccaataatatcaattcccaagatttctttaatacctctcttcattccttcactcgtgttattactaaaaaagatagaagttttgagtttatttatgtgttggcttgacgaatcataaaatgtcgatacattgtcgataggttgtcgataataagtggataagtataattgaggctaaacattatcgatagtatatcgatgttatattgatagcttgtcgatagcctcaacagatagaatagaagttagaaaggtgggaaaaattaattagcattaaatgtctaattgtacacatgtatgacatgcaatgtgcattgtcgatatgatatcgagagtgtgtcgatagtttgttgatatgacaaaattccacaaattttcgacatggtgtcgatgtcatgtcgacactctgtcgatgatgttgccactcgagatcctgacagctcttatcgatgggatatcgttggaatgtcaataggtttttcgaatatgttaaatttttgctccttttttggtattttttttttatatttttttttggtatttttccctaagttacctttatttgtttgaaaatgcaggatcgactgtgtttcttgttgtatcgtacgatggtgtttggtgtgttgagggttttaattgggtttataaagccgaagacagtttgacgttgacaaatagaactgacacaaccatacaacaaatgtgccaaattttgtatgaagagttggaggttgtgttggaaattattttac

SEQ ID NO: 115805 - DNA, 4097 bp, Cannabis sativa
  modified_base (1313)..(1318): a, c, t, g, unknown or other
  modified_base (1344)..(1345): a, c, t, g, unknown or other
aggatgttaatgaaacatacatggtagtaaatctagatcctagtaaaatatttccaacactttaaacatcatgcactataccaatgcactcagtatcgctaccatactagtgttggtagtgtaaaaatcacaatatggcatgcatgtaacacacatacacataatcacatatataacatgttctatgctattcttacctcgtttctgaattcaagtgagttggccaacctgaacggaaaacctcgtgctggatggatgccctaagcaacatttatgcaaatggataaataacacgccaaaacctaattcgggaacctaaactcacaactataagttttgctatcgataactagcatgaaaatatcctaatcatcgaggaaacaataaactaaggctctaaaaaataacatgaattgacaaaatgaattttttgggaatcatacccctgatccggttgtagaaccagttcaccagcttgcacaaggtaacccaaactaatccaaacaatgcccaattcttgtccaaacctcaccaaaactttcagaacacttgcatcaacctcaaacaatattttccaggcaataatagtaagaaaaatacacagagtccaaaaataccattaatgacccaagtttgagttccaaactcagtcttgttcattctccactcaaaacaccaaaaccaaccacaattaaacaatttcattgtaaaatagacttagaaattgaaccgcaacaaattcttaacctaaacgccaataacacacaaaattgcacgatcaaaccaaaatagaatcttaaagaataagaaaataagagctctggggtttacctttagctaaaacttcctcaaatcttggtcaattccaaaaaaatggatgttagaagttggattgtttctggtttgtttgggagccgagcaagaaagagagagaaaggaaggttgtaatgctttcttgtttttctcttcttaattgataattccattaattcactaataatgttgaacaaactaaaatagctagctatccaacaaaggtaaaggaacctatccctctaatgctaaatacccaaaatgcccctttcttccattttaagtaacctttagacataggggtaaaatggttcaaaactataaccccgcctaaacccgatattctaaataattcttatatctatcccactaagaaataggttctagacttatccatgtgactctaacggccatccatcgtatttgccatcgtcatcgagcaaaaatcataaaaattgtataattcacatttagtataaataatactcttagagtttaannnnnnctccagaattgagaaattataactcnnatgcccatttctaaaaatgggacccacaacaatataaaatcatatataattataaaatactaataattaatgctaattgcctttactaatctataatctaacatgcagtcattacatccattctccttgtgcctctattttctcttggacaagagtaggatgttgtggtattcatgttggactcgtctttctcccatttgatttgggcccaagccttagctagtacgtcatccatagtcctgcaatgatattttgttaattctttataaaggtcagaatgtaccattaggccttttcagaaggtcgtgatcaccttgtccacgttgcatgaggttatggatactttctctgtgttgaacctagcaacataatcttgcaccgattcacccatcctttatttgatcctgtaaagattgtcatacaatttctccaatttcccgttactagcaaattgctccacaattatgtcaattaattgagcaaatgaagaaatagaattatttggtaggtttgtgtaccactagacggctggccctaccagactagaaccaaaccccttacacatataggcctctcgcaattcacgagggatggggatggtgaacattctttgcttgtaacttgctatgtcatcattagggtccgatattccgtcgtaaatcttcattaatgggaagatgaacattttttgcatctccacgagagctatagcatccatgcatagggagtctgcgaagctacttggtaagctctttttgataggtgcggggactcctgggattctatgaatcatagcttccatgccttcaagcttccatgctaccatttgtttgatcatctcctcaaaatacttagagggattagccggaagtcttgacttatccttcttgagtgcttggtacgggaatgcttccatctagaactgatgtgacttgggggtcagtcatagttttgtcacataccaaagagggtccatgtgttagagtagatccccctagtagcgatccatctgcttcagtagtcattgtagttgactgctggtgtgttgttttgtttggtggcattcctgtgaccactggacgttggcctaagtttgtcgtcggagtggaatcaatggattgcatggatggaattggaacacaaaaccttgactgagactctgtcgtactacgttgaatagactgtagtatctccacctttgattttagcagagtattctcttcttggaatgttgtattctcttcttgtaacgttctgagcctttcattggtttccctcatctgagacataacagtagctatctgggcttgaacgtcgatctctccttcttccaaatttgccatggtattagatacgtgtcccttgctcctgatgcaatttgttaggaccccacagtgggcgccaaattgtaaaggaaaaaatctacaatgatcggaatggaaggatcacaggcactgacaacttgtagaacaaaggaaaaaggaccgttgagatcttgggacaccgggatggtgccagccgaagggactccgacgatcaagtcagtaaataattcgaataaagaatagccgaatgtaaataaagaatatacaaaataaatatttccaccatagaatgatgggaaaggactagtaataataatattaacgtattgcgtgaattcttgagtgagtgttcaatgagtgaagatgagatgatctttcaagactcttgggttctccttttatagatcttttgatggtcaaattcaactgttctgaagaactagcgtgggaagtggccttccccttatctaggaggaaggatcgattcttataaatcaattatagagtagttcctatcctttgtaattgattagtcttgtagctactaggctcgtttgggtcttgtattagccaaagccaaatgtatttttgatgagtggttacatttactggcttagttttgaaggattgtaattctaattcggaatgaagtagacatttggacctggtgcaatttttggccactacatatatgttcttataaaatttgaaaaattacgtttcaatctactatactattattgatcatccaatgtggtgtttgtagcattatcatttttaaaacatcaaattaatgtatataaatttatattaacttagcaaaagtgaaattgggaaacgatataatcttgaatatcaagagtactcattaaaagggaaattttaaaaaaatacctttttctatttttaatttataattctacaacttaaaatttttatttataaaaatactcttataaaattttaaattattaaaatacactcttctcataaaaattatgaaaacaattaaaaaataatgaaaaataaacttcataaatcaactataaataaactataaaacatccaaaaacaatcagaaaaataaaatcatcataactataattcaactatgaataaactatgaacaattaaaaaaatattaattttattggaggggaatttttatgaataaaaaaatttaaagcgtaaaattaaaatttttactgcgttaatgtattttttttatagttttttcaaatttaaagtaaattttcctcaaatcaagccatgcaatataaatgaatacataatttctacaaaaatgcaagtaaattaccctatttataactttatagatagttaatgtcctttttttaaaataataaaacacatatccttttttactttttaatacctaaaatacccttcattatataaaaggtatt

SEQ ID NO: 115806 - DNA, 3909 bp, Cannabis sativa
atatttgcaatatcaataaatccctttttgttaaattaaaattattaaaaaattacagtttttatgaatttttttactatctatgcaaaaatatgacataatatatatttttttagaaaaaaagttatatttttacaatcttataccttaaaattataaaaaagttaaattaacccttaaaattagaaattagcaaaatagagatcacatgtgcaattatgcttaaaataaaggatgattatgcaaatgtcaaccttcaaaaaaaaagtcccatttccataattttgactaaaaataggggtattaattttgtcattttgcataggggcatcatcatcatctaactaagtgcacatgttattcttcctgataataatgcccaaatcttttttggctgctgtcctatggtaaaaagcaaaagaaaagcacctaattacttaattaggtttattactctttaattgtacggctagagcttttcatatattttaaaattaatagtcaagattaccaaaaataatgatcactaattagtgctcaacataagaactacaatctctttgtttttatatgtcaaagtgtcaataggggaattcttagtaggacattatggtagggctaataggttagggactctacttggtaaagtagcatagccaaagaaatatttgagaaagacaagaagaatcccatcctatggtgccacgtggctcacagttggaatgttttgtattgtacaccccttaaagaattcttttagtatacatctctctatctgtttggatacacgacatattacaccttaattaagagaatttgtaagtttttataaaattataaataattaacaatacaaaaaacaaacataaaaaaaaattacaacaaaacatttgaaacttatgttcaacacgtaaataagttatttgaaaaatttacaaataatactaaataattataacgtacacaaacaaaaaaaattaaactaaaaaattattttaaatactgacataagaaatacacgaacaaaatccctttgagggtattccaaagaacattatatttagcactaagaacaacttacatcttttaaaaatggtgtcttaaaaactcaatatttaattgcacgaatagttacatccacgagaaaggtaccaggatgctttttaacatatcttattccaaaaaaaacccttttaaaggtgtactttgaaagactactataaaattaccctgaaataaaatccacatacaataacaagatgtgtatgattttgttccaaacaatgtatgtatatatatgttcatttataaagataaggaaaataaaggattagagaggaataccaaagacatcaaagtggataccatatgaagaaacacaaaagaagacgtgttaaaatgtgcttacataaaccaggaaaacaataattgaatctttcaattgaatatatatattatatttatatatatatatatatgtgtatatttattgaacccagaaaccaaatttaaatgtgttacaaaggcaaggaagatactgtcaaaaaaaaatagaataagaacaccaaaaaaaggtacaaatggaaaccaagaaaatttgccaaaaataaaaataaaaaatataaatccaagacagacaatcaccagtttttgctaataagatttaaataaaggcaaataaataggaatatgatgaactgtacagaaacaaaaccaacctaaaataatttagtcagtatgggttactaatattatgctactatatcatctttgttcccatcaaactcttcttgtggtctctttcgtttgcaccaacataagtactgagggagcggtccgtggtctccgattacccatggatgttctgcaatagcttcaagactcaacctttgtaatgggtctgcacaagaaaatttcgatatatatattttatttaaagaaaaaaaaaacaactagccataaccaagaatggaatactaaacaatttcttgaaatcttgctgacctttgcaaagaatcccttctattaaattcttcaattctgggttcatatcatcgggaagtattatagggttattaacaatctgaaaaggagaacataatgtattacaagatgttaagaggaaacacagagcaaaggatataagatcggcagtgtgtgagtgtctgaaacataccttctcgtatgtatcttgtagtgtctctccgagaaacgggtattgccccaaaatcatacagtataaggtgatgcctacggcccatgtgtctgctgctctacctctataagtcacacctacataaaaaaaccgaggcctagtaaattcacataccaaaaaaattatcgcttttaactaaattggggttgtcgatacctcatttaaaatatgattcaacaatatccactaacaatttccagttaaaatcagtttaccctgaaatttctagtccaattgacctgggaattttttctttacttagacaaataaataaattatttacctagacaacattctggtgcagtaaaaacaggagtcccgggagatcgccgtagctcatcattatcatcctgaaaaaaagaatgaaagaggttgatatccaataatcttttgagcgaagaatgtccatagaaacttgatgatcgaactggacaattgcatgttataaaaactatgcatgacatctctcaaaagataaattaatgcattgaaatacttagaaaatagtggcaaagaacccaacagcccaattacctcaaaaacttggctaacactgaagtctcctatcttcactgtaccatgacgtgtaaccagtaaattatcaggtttaatatcaccatgaactattttctgtttcaaagaaaaacaagcaccacaatatcaataccaagtgatcacttcatatgattgaaagtaaaagagctcacattaaggaagcacatggggcacattattaacactccaaattccgaatgtacaaactgtgtcatttatctctctctgtctatataatagaaaccgaagtatcaagatatccagatattcacatgtgatgtgcttggtcaaaaactagtacaagcagaaaaatgtaaagaaacctaatgaggcataattaggaatgcaaacaaaaatatgaagtggtaagattcatgcaatcatagatataaagcttagtagctgaactttaacattcatacatgatcatgaaggtacattagccctgaaactatgtcccgcaaatacttcctagcagtactttctcctaagccagaagctggaccggaaccctcacatacccatttgccttcaacatactcgagaactgggataagaaaaaataaaaggttagccaacgggtaccttgtaagagatcttacagaaagcttgttgtataaaaatattttaacatattactgaaggtagaaagatacccatataaaagtgatcagtttctggatcatcaatgacttcgacaagattgactatattgggatggttcagcatcttcatgattaggacctgtaaaaaaagggttaatatcacttagtggacacccaactttataaatttatgaacccacatccaccaaagatattagaagaaaaaaataacatcaaatcaatcattgcgctatttctctatgctctgttaattagatatatgtcagaacacagcagaaaaaggaaaagcaaagaatgcaaactccagttgattgtgaaattggacaataggatgcgaaattattcactaaaagatattgcaaaagatgttccccaagttaagagtaaggcaagacttgttacctcacgatagacatcagtcatagctgtctctgatggtgcaactcgcagtttcaacaaatgagacttatgaaaggccttcatacaggaggaagaaaaaaaaaggttagatta

SEQ ID NO: 115807 - DNA, 2000 bp, Cannabis sativa
agatcctggtaaaatataattccaacaggaggactatgagacaatggcacttactgaggagtacagtgcaattttgtagaagaaactacccccaagcttaaagatctgggtagtttcaatattccttgctcaatagggggttcagtcgagacattggccctatgtgacctgggggcaagtataaatctaatgcctctatcaatttttcaaaggctaaaattgggagaagctcatcctacgatagtatctttacaaatggcagactaatccattgctcaccctcgggttataattgaagatgtcttggtgaaggttggtaaattcattcttcttgctgatgtcttaattcttgacatggaggaagatgaaaacattcccatcattttgggaatacaattcctggccacgggtagagctttaattgatgttcaaaagggggagttaaggttatgagctcaaaatgaggaaatgactttcaatgtctttgctacaactaaaattcttacttaatgtagagtggaagttgtaaaggattgtcaagaagaagtagctatcaaaaagaagaaagggaagcacaaaaaacggttttgcattattcgacgatgtataaaaagattcatgagtggaaattgtgaaggtgagtttcatcttttggatagcttcgacctaagcaacacaggaggacaattttcttcatttgatacaagggctttgatggatgcaagaggttgactttatcccagtagaaattttaaagagaaaattagtgtctggctatatgacgttaacgacagcgctcttaggaggcacctcaagttttacagttattttttttaatttgagatatttgtggtttttatttttatttttgtcttttattttgttttagtatttgtttttatgtaatacacaaaccgtgcaaagtgtgaaaactcaaactcaaaaaagagggcaattttgttccagtggtcgcgacgagcattttacgcatcacgatggggcttcgtggaaggtctatcaaagctcctattcggccatacgaccagtcaccatcgtcacacccatactaatgggggttcaagtaagttcttctggctttgagttttatgtcacattggggacaatgtagattttaagtttgggggagggacataatttttttaaaatttattgttgtttgtttttgttttgtgtgttaagtgagacaatgatatttgattgattgaactgctgacgtgtgcttgttgaaaaactatttatcgatgtaaattatcaatatttggagagtatcatttttgttctacttgggtttgtggaatgtttgcttggaatggaatagaacttgcatggcttattttcttgaggcaaaatccttgataactgtttcttggaaaatgatttaggcaattttttttgaactggttgagcctttcaagcctactcttataattttatccctagtatacccaatttgagccttagcttgttctaaaaatcttaaccacttaattaagcttaatttgttcctattttctactttaattctcaatgtcaattattatgtcataagcttttaaataagtttggaggagtgaagtgttatgagttgaattattttggaagtgggagattgaggaaagttatgtaatgtgaaagtatcttcatcaccactagaaggaaaaaaataatatatacacaaaaaaaaagaaaaaaaaatatatccaaaagaaaagaaaagtataaattcttagaaaaagtgatgttgaactcgaaattagcaatgctcaatcttttaaaatttctttgggtaaatactgggaaatgtggatttatgtgggtgcttgtttggttagagtgtgcttatggtataatacatcctaaataatttttcttatctacctcttacctaagccatgacattacaacctagaaagtgttggaaattattataccaggatcttagatctactcacaagtatgttttattaacaccctaaata

SEQ ID NO: 115808 - DNA, 2425 bp, Cannabis sativa
cgtcggtagcgaatttcgcgaaaaccgacgctgaaagggcttaaaaaccgcctctaaagggaatttttgtagtagtgaatgccaaacacaataacatatcaagagcagtgcataaaatatctacaacacaaaataaaataatgaaaagtgaattaggcacctagcaatatattaaaactaataaaagaaaattttcactaattaaaaaagaatgactctccaatatttgataaataaaatataacattagagcataattatataaaacaccctaactataacatttactatttttttcccaaaattatcagaacgccgccttagccccgtcaatagtaactaataacaatatttttttaaaaaaaaaaaaaaaaagaaatgcaaaattcattaagaaaaatccactgttatagaaaaacttcaaaaattgagaacaagcacatgtccaaacacaatctcctaaattagtaacagaagttgtcagtgtattgacaacaccactcgttgatcgcagaatgatactgtaagaaccaccaacaacaacagctaagaaagaataaatatttaataaaataaactgaaaactaaaattaatgtagagcttattaatccaaccaattgtcacagtggattcaataatggagatattaaaaccaaactgatgcgcaagaaccgaatctagtcgaatggcaagcagctccgccacattagcagaaaaatcacctaacacacctaatgactatgccaaccaaaccacgtccttctgtatctcgtatctctccccccaatccaacaaagtccctctccggaatcaccgaaatatccgttgctagagtaaaggattcaagaagaagtgacatccatggagtagctcggtttacaactgagttggcaaggcccaaaacaaataatgtagaatataccacatcttcaatttaattgttgttctggtaatcataaataggctactaatatatgttagaaatgttccatatggattacaaaaatatatttatgtatacatatataaataaatggtcaaatacaagaagatataaagaaaagaaagatcctttgtatgaattgtcagtctcatccaccaaaattcatacctccttattatattccttttaatggctgatgcagttcatcctgaattttttttttcagcatcttatcctaattatcatagcaatttagatcccagctgtgcctggtttattatgtatatagatgtctccattgtgttgtcaattttgttccatacacatatttaccatttttttcttttcttttctagatgatgaaatggctgccggccagggtgttaataattatatatatgtaaatatatatatacatatggattattattctagatcaaatcgataactatggcccacatgtcatatatatgaaagtgatcgactatatatatttaatataatattttttttaattaatgggatacatgggtgagtgcatattaaaattttctgaatgaacaacttgttaataaagatcaaaggagattgcagattatgtgataagtcagggaaaaaggaaaaaaaatatataattaagcatttaagcattatattccatgattgtagagtagataagaaagaaaaaggctatgtatagctacgaaagctaggacgtacgacaataatttaagaaaaaaaaatagacttgtgctatctaatgatttaaacgaggagattcttagtgcttcaatgtcacgtttatgtaatagctacaaattttattttgttaaatgacatctaatgataaaaaaattatatatcaaatttcaaatttaaatattttttatataacttttttaaaacaaaatataagttatagtccttcacataaaatagatattttaggaaatgacaattgataaatcaattaaaaaaatatatcctatgattccaaaaccatgtcattgtcaaaggttaaaagaaaatattgataattgagaaatttatagtaaaattaagaaatttaaaagaagaaagaaagtccctttcaaaagaaaataaaaaaagaaaaggagaaaaaaagagagagataaatctctctctatataatattatacattgttatatctagaaaaaagaaagacccctaagatatataataatgtacagtagatgaaaatactaaatattacaaattgttgtaaacaacacatagatagaaacgtaaatctatagaaaacttatcccccccaaaaaaaacctattgtacattacaatatcagatttagagcttgtttggtaggccaaggctgtattgtattaaataataaatgacattatgtttgaataaagcaatatattgtattaattattaggggcttttttatttttaaacttcaaaacaatttttttacatatatttttacggaattttacat

SEQ ID NO: 115809 - DNA, 1125 bp, Cannabis sativa
taactaattagtttcttatcagcactattataacgaaaaagttactttaaaaacacaagatactaataagagtaaataacagcataagtacttaaagttttatatttgtaagtggcataaacccaatgtttatttttagtggcataagtacacaatgtttgtaaaactgtaattttcttccagttttgtcagtatagactctgttttaaatttattaaaagaacatttgaaagtaactgatactacatatttctatctagacccaatgatcaagaatttaggctttatatgtgccttgtttaagacaataacagagtctgtactgataaaattagagaaatatttaaaacctctattgcaactagcgctgcaatcactttagattttttttaaaaaaagttttaaaaattataaagacatacttacacaaatattggctttaatatacgtaaatttttgataactcttttttataaaaaattattatatgcacagcattttccaaatttctatatttattttatttaaaaaaattattatcatctatttttaacatataatcatttcttatttatatgaatttattttaaaattgtgtaacacgtctgagactacaatccttctaaaaaaaccaagtttttctcattataataaaggtaataacctctcaaaataacgtgaaaaataaaatgttggctatgataaccatattggacaataacaaataaggcctcatttaatataataaatatatttgtatatttattaatttattatcgtagctcttgtaaaacactagatattctgtcacttggattttgttctcttaaaaatatatgagaatatatatagcccatattcttcataaatattctccataaataccttataaataaagactaaataatataaaatattatggataattacaaaacttacttggcttagatatataacccacacccactttttaaagttcaatttattccccataaatgtatgtagttttttttttttaaatggataaatggatgtagtttacaataacaaaaatttacactaaaaaaaaattgccactaaaaataatttgttagactataatatagtgtatgtaatatagcatat

SEQ ID NO: 115810 - DNA, 1840 bp, Cannabis sativa
attgaatagggacgtcagttagaaattatttttctactagtgttggttacattaaaccgaggcttacaaacaaaaatatacaaatctaaccggattgagattggaacttttgctctaacgcacgccaaacagcaaacgatgtattgtgatttacaacagaagcaagaaccccctttatcatagaagaacgaagccaagaaagtagtaattgatccctctttttctattaagcaaaagctggattcggagcaccagtaacaagattcgatggaggggaaacattgctgaacaagatgtcatcaagttcatgaccaatcacagtaggaaccacctgtgatttccaagctagaaagttttgacgatcgagcttgagggtgagggaggaggtaagagaactagaaaatagattccaacccgtagggtaagaaccttgagacgcagcagaatttcggccatttagaccagcaggatcgaaggtggaggtgtgtatagacgactccattggcaataatatgataccatgtagaatagtaaaaacaaggtaaaaaccagaagtaataaacaccaggaacagagcaaaagcaaaacaatgaagcagagaaaattgacaatgtaatcttgactcactaaaggagcctttcctttatttatagatgctgaagtacaaaggaattagtaacagaaaataacgaaaaaccaactaactaatccctgacagataactaacttccgcatataaccaataacagaatttattggttaacacacatccctccagaaaacagaaaaatcacaatctttgggcaacccgtatccaagggtacttgccagacaatgtcattgtacaaggctgggtatcagcgaagtacaggtctcaagtgtaacaacttgaacaaatattgagtcttaagttaaatattcgactataatagactcaccattaagtttcatatattgtttcgaaggaaatcacgtatgtgactaaggttgtatattcctacagggccatgagaggattcttatcgaagtcaaaagaggacagaaagctggccactcgcttggaacataggcccaagccagacagggtccctaagccttgagagagtcggccagggtcacatgactcacccaagaaccagccaaggtcgccaaacccaggcatgaaccggctagctttatagggtgaaaccttaaaactgggcaacttccatgattaagtcataggaccatgtaggtctcaagcaagacctccaaggccgaccaaggttagtttcgaatctaaatgtatgttttttttttacaaaactcaaatatgtgcctcatgttttttatgactcaaagagtcaagaatcacaataaaagccaaaattgaatcttttcgatcaagaagtcacacattatacattctaaaacggtcatgtgaatcaaaataccaaaaagattacaatctaacatgagaatcaaaaagtttctaaaagcttattaaaaagctcaaaacttatcaatggcaggtacaaataagagatataaaagaagaaaagatgagacgtatatagagagagaagatcaaagatctaaaagtatgccatgcagaaagccaacacttggctagacaaggcttctcgacagagactactacaaagaagacgatagctagaaagtccttatctgaccagatgttcaaacaaggacttggggggaaaatgttatcccaaatttttttcacctgacatggcatgtccacgtaagccaagacagagtacatatggaatacagtcttgccaatagcataacaaggcctccttacaaggtatggcaaaactgttgggttttgtgccct

SEQ ID NO: 115811 - DNA, 2318 bp, Cannabis sativa
atacaatacaatacgacctaataacgcgttccaaatgagcccatatataatttggatggagaactaagaaggatacataatattatataatagatatattagagagaacaaagagtaataaggtagttgttaaaattactattatatatttttatagtataaatatttgttattttttagaaggttaatttcgatatttagtatagttattttgtgtttttttcttaaatcctttgaaaaatagagagatcgaatttttaaaatttggagagagaatgtctccctcaaactcttctctaccttcatttctccctccaactaaataacaatgaattttatctctcccttcaattgtctccctctccacccctctttccttcataccgaacatagtgaaagacttcaaaggtcaaaggttcgaatcagggtggctccgtcctttgagtatcagccttgccacattttgcaatgtctcgctagttaagccaaatgattgcacctttgatcattgtagataaagacgatctgttgagtaaagtattagcgaacatcaattctaatttaagaagaattagagttgtcatcttcctttttctgtaaacacttaaaaaaactcttttgaagtcattttttcatgtccaacaaaaatagtgctagagtacataaaaaagttttgggagatttcatttacagcattgatggacatgaaaaaaaaattcatcatgtctaacgatactagacatgaaaagttgaagggggcgtgataaataattactattattttttattttttttaaattatgcaattttcatgtcaagcctgtagtgttcgtgttagagtttatgtaacatcctattagtttaggcgtgttatcgtgattttatactaattgtacattccgttgctaatcaatagatttgttgaaaaacgtgattaattaaaattttacttaattaacatttaaatgaaaacaaataacttttacatagatcccgtatttaatccttaattaaatatcaactagaaggaaagcataacataaagagtatctgaatatctctaagaagtatttttggaaaggcaattaaagaggcgtccagaaattaaggctgatatgtcactccattaatactgaatccctcgatattaggacattatccctacgttagaccctgaaattgtattaatacgctcattttccaatatccataactttggcaaaattatgtgcgaagacagcgcacacatgccacctattattatcaggtggtctccacgcgtacagacggtcgttgcttcatgggcagggcttcaccaaatgggtccaatatcaatatattacttgtatttacctcattagtaggtcatgtttaattgcaaaccctagcaggtttaagtatagtcatacttaactgtagtgtataaatgtaacgtgatacgttcatgtaaggggggttgatttttctaaaagctaaggaaaaaagttaagattcataaacgagacaagaacacttgtataatactcaaaggcttttttagctaaataatattaaattgtggactaagatttgttaacacccaaactacgtaaaagttattatcttggttttgaaaaaccttggtaaacaacatatttaaaaaagaaggaagggcgaatcacatgtgatatattagtctctctctcatattattattatttcttaaaaaaaatactccctctctctcatatataaacataaacaaaccctaatatatctcattttctctctcattcatttacagtcactactttcagcccttaaaataaataaaaaaaataagtaattaaaaaattagaccttcaggtctcctctcttgcacaacctcaccctcgatttctcacataacctcgccaaccccaaccgcccgccacccgcctcaccttcccttctctctctggattgctcaccgatcaaccactgaaaacccaaaccctcgtttcttactcatcttctctctcttcgctggagatgaaggcttggccctatgagtattcattggaccacatctaatatttctaggcatatccaaatctgatccaattatatattggatgttatattttaccatatttaattaattttagtcacccaatcaatcgaacatctattggatgttggattggatcggttttatccattgtatgtatttcatatatatttggtttaatttaagtttaaataatattttaaatctagtattttttggattagatcggatccataggtccagtatgtattggattggactgcatccatccaatccaagaaaaaaagag

SEQ ID NO: 115812 - DNA, 4173 bp, Cannabis sativa
atttcggtatttatgctgacgtggcaatcggtatttgtgcaaataattttcttaaaggtatttttataaataaaatcaattttaggtataatattgaaaagaccccaagatatattgagttatatagactaatatttgtatgaccgataaggataatttttaaaacctaaaggaataacatttatatttttgatataataatattgaagaatttttcttaccctattttaattcattaaaaaaaaagcgaagctaaaagattgtgtacacactactacaaaagaacttttttgcgtcggtcaacacgtctctttaaaatggttgaccgaggcaaaaaatatggaaagattttatgcttcagagtataactgaagctaaaaaagtaccaattagcgtcagctcattccccgacactaaaagaataaccgtggaaaaaaatgaaatttttaaaaaatgtcttttacattttgcttcagtggaaaagtgaggccaattgtttttgcttcagttgaaaagtgacgttaatacatttcacacgattatccaccgaagcaaaaaaaaataaaaatttttaaaactcaattttcacaaaataaaaatttatttcagcatctttatccccccaatttcaaaaccctagtagagccctcccccctccatttcaaactaacaagttgcaaaagaagcttcagccatcgccgcggaggcagttctctaagtcgttgaagtatgaaacccaagtcgactcatcggattctgagactcggactgactccgatgatacaacaatgctaagtgtaattgatgaatcggtgaacacaagcataatgcatgctacagaagttcatcttcttgcttactcttcagtgggtttaagaacacttgttgttggaatgcgtgaactttctcctttagaatttgaggtgtggcgctcttcatttgaggcagcaagcacatctttgagaggtcgggctgctgccctacgcaaggttgctggcaacatagaaaccaatctctgcatattgagtgcctctggaattgaagataaactgcaaagcgggaagcctgaagctatagagtctctgagaacagctgggattaaagtgtcggttttgacaggtgacaagcaagaaattgccatatcgattggatactcttcaaagctcatgactcccatgatgacccaacatgtaattaattgtataactcctgggaatcttgtagaacgcgttacaagaagccacagaaggaatttcgggaaatgctttgacatcagcgaccttgattgttgatggaaccagcctttattatattcttgacattgatcttgaagaacaggtaattttttatagacctaggtttttagtaagttttggattctgccttaaaagtcaaatcttaaatttttttttttaaatttgataatttcagctcttttggttggtgagtaaatgttcagtggggctatgttgccgagtagctccactgcaaaagctggaattgttgatctcgtaaagagtaggactgcggacatgacactggcaattggagatggtaatatgtgtactgtaatgtaatgaatgaatatgttatgcttccaaaacattaaaagcatgtattggcatattctcttattgaaatttaaaatttttggaaatttctgatttattaacaggtgctaataacgtagcactgcatttaataattaaattggttgggtttaattccttttgtggatgagctcgttttaattaactcgattggtattgttttacatgaattgcattctagtaataattagaagggtgttcttattgttgtatgcatgatgaatttgatataggtttgtactttttacatcttggagaaatagagaatcatcataaggaagatgattaatgttgttgttattgctagtacagctccatggtggaactgtggcactgtatttgtaatattgatggtaatttgatctgtaattatagataaaattttcagcaccaccccagtcatattactcatcataattatctatatataaataaactctagaattgttaaggagtggactttttgagttcaggattatgcatacgagtcccaactattgtagaagaattgaccaatattgaggatgagatcgacttggtaatataaacaatcaaacaatcaaggagagagtttgattatgagatgtttttttgtatgagtaaaagaatatcatggttttaattactgtatatactttttatattacgtgataggtatgttatttttttgaaggaagataattagtttcatttcaacctaaatcacttcttcacgttttctcatttttatagttacatcatatatatcatacacatggcctgattttctgtttcaagaattccagcattttaatactttttcttccttctttgttattaatcaaacaagtgagtgttgtttatctggtttgctaaatgatgttcccatttcatatatattggcagttaatactatatgcacatatgtatttctattgtgcttatcatcagtaatatcatgatacttaaaaggagcaagtataattcttgtttctataaattgatggtgcaactccaattttataaatttgacagggcgatctttcacgttgcaaggacaggattgttttggttgtgtttgcttgcgatagttgtagtcactcttcttcctcagtttgtcgtaaaatttctttaccagtactactgctcttcttcctcaagtgtacaaaaagaattggatccactattggatcatcaacagagatgacaaggtgattttacaatttttttccattaatcaaatccttgttttcctttttcttctcttatagcgctttattctttgggctgctcttattgagttctcctcctggctgccaaaatttcattatattgctattcgaaggatggagttcccaatacttgtatttaactttgttgtaattctcataattaatgtaaattagtttaagatggctgtccatcctttaagatggctgtaaattaatgcttcaacatttatgtataagaaatctgtagttgtatattatcataatgatattttcttaagatttttgctttgctttcaaactcaaaaaagtaaaaatttatatggtaagatctagtataatttgagatatatttttattatttgagatctagattttattttttggtgtttaaacaaattttcatattgtttgtctgatattgtattatttttttattaaaggattgatatgatattgtatttatttttgtaaaatatttttgcttcagttcataaccgaaacaagaaacaattagcgttggtgcattggtttttttcttcggttatgaaccaaagcaaaaacgtatccttttttgcttcggtttataaccgaagcaaaaaatcaattagagtcgactcataaccgaagagaaaaaaataagtatttgcgtctacggtaatagcgtcgattacaccaaccgaaataaatactttatgtgtcacttaaaaactgaaattaaaagctttttttgtagtagagacacaaatgacgaaacgaaaatgccaaaagtaaactctttggcttcggttaataggtaatatttgacgccattgtggcacacaatgattaatgcgtgtctatttaggcttcagttattatgtaatataactgaagctaaagggttattaaaaccctacgcgaagtccattagcccacacttcatcttctccttcattttctcctcttctcctcagccatcgttttcaccgtcaatcaccattttccaaaggccagttcatcaattcttcactgtttttcttcatttttttttttttaaatttcttattttcaaagcccaaaaacatattgtcaatattggacgatattattgtagttatttgagtgtatgtgtggtcttttgtggcagttttgggtgttctaactcccactacaaaaaacaacaatttttagtaacaattatttagtcacaacataaattttttgtgattaaatatgatttttttagtcacaacaataaattactcgtgactaaaatatagtatttagctataagttgtcactaatttagttttagtcacaacaagtattgtgactaaaaatacattttctcacaataaattgtaatatttgtg

SEQ ID NO: 115813 - DNA, 1452 bp, Cannabis sativa
taaaaagagatattttttgatattttttttaattaagtagttaaactaagcataaaaattcaaatttgtttcattagatcaaaatttgatgatttaatatttatagttaaatttgtttagtaaccatttatgcataatacctattaaaaaataatctgtgtgtaaatatagtttaattaaaatgaaccattctttggaaattttggagatgtagcatgtaaaaagcacaataagttgatatgacaactattaatggcaggtctggtccttaatataggtggattaagtttgtgcttaggactcatataatctaaaggtctaaaattaatttctccttttaaaattatatataattttttattgattttgaaaagtataatatttttactaaataagaattaattttttttttcttataaccaattatattttagggctgaccctgattattaattgataaagttaccggaaattcaattagttgttatgataggctagctagggtggtccattgacaaaattaaactcaaatgaatgtatgagtgtataaatatgtgtaaagaaattatttaaatttagacttctttcattattgtatggccaagaattattgtcactttatatctcccatcatatccttgtgcattaagtttgaaataaatgacatttgacctcaaaagctaaagaaaaaaagaaagaaagaaagaaatccaatgagtttgaaccacatgaaataatataaagacaaaatatcttgccgacgagctcttctaacatataaatatcgtctatattcttttctattatcttccttcttcttctttacaaaaacaaataaataataaagttggctaagtattgtcagataatatgggtgcatgtaatttttctcttttcttttttgttttttgttttgtttttttgatggtggtcatttttaagaaagtaattgaattttggatataataattcgtcaagtgagatattattataaagtaattgaattttggatataattattctaagttattaggacttatcttaaataaaaataattagttaaaataacttgttacatgagtatctatcatatgtgtctgatttgtatgtacacatataattactttattacaaaaagaaagataaaaacagagagagatatttttttttctcaggtaaaaataattagaaaattaatttagaaaaataaatataataaattaaaaaattaaaaaaataataataaaaatatgtcaaaaaaaatttcatttttgattgaatttttttatttacaaaaatacttacttcagtaaaaataataaattgttttttttgtattattttagaatttatttagggctcgtttggaacgccgtattaggccgtattgtattgtattgtattatattgaattggattatatatcatatttttatataatactatgttaaa

SEQ ID NO: 115814 - DNA, 3280 bp, Cannabis sativa
tgaaatgggttttatttaaggcacaaaacccaacagtagaatcttcccagctacattagcagaggccgcccaacagtggtacttcaaactagctccagggaaattcagttcacagatttctttctcatttgaattccatgcagaattttcctcttctcgttagcttccctctcatttagaagaccttgtagaagtaaagcaaataccaggagaacctttaagagcttacatcagtaggttcatgactgaagcaacaaaggtaaatgggctgactaaagaaggaaggctagttgcaatcttgggaggtattgaacccataagagagttatggaaagatataaaaaaggctaactgtggaatcgatggcagaatccctggacaagcagatgatttattaagctctaagaagcagtacagcgtgtggatacagttggacaaaataaaactcaatagcacaccactgcagccaatacatctgtccagctagaccaaaattcataaaatcctagcagttctaatcaaggtggaaaaaggttaaacagtggaaacagacagggtaatgggaagaaaggcaggttcaatgcctggtccttgttcccaagcttgttagccatcaagagcaagttgcaatgcctggtccttgttcccaagcttcattcctaacttggaggcctcagcagcaaggttggtcacttggttcctaataccaagaaagtgctccagactattgtttagatcctatgtcttttttagataatcttgtgtctagataagtgctcccttctccatctgaagctcagattccttggcctttagcttctctcggtgagcaccagaagagccattggctctaccatgggtaaggctgaagtttaacatggcctgaaatctgaagaaaaaaccaagctagtggcagaagaggacctggccggccaaaccctgagtggtgcacttctggccagccagcttttcgttaatgcaaccctggctgggcagccttctagtggtttgtacctggtcggccatcccaatcagtgcaaaaatttaagtaaaatcaaatacacaacttataaatgtcaagtcttaaagctcactagatgtcagacactctagctcctcatcatgtagctcctagagctccttgtcaaggatgggtagggtcctactaatgtaactacgagcaacttcagcaatcctctgtctggtggttgaataggtcccccagccagactcctagacccctttttcccaaagatctggataaggatgaagtctttctcaggggaggatctatgatcatcaactgatcaactggagtaggccccggaggagggagaggcagtgggcaccttatggcatcactagatctggtaatttgggccaccttggccttgggacaacctgaagaagctctacctgaaggctctgcagcaagatccatcaatctggaagccatatctaacaaaagaaagtaacaaagttagaatacaagttacaagtacttaatgcaagaaaaagcaaaaagttggtattatcaaatgccatcatcctcggaggaagaatcatctgaactgctatcactaatagtagcctttccgttgcctctggaagcaggtaggggacgagtaggccttgcaaaaccttggcctctaggcctattcgacagagcaggatcacttggggtgcctccgcgtgccaagcactggtggagggccttctctctcttctccacgatcctcgcaagcctggagagggggattttatcatctagatagggtgtatgctcacctcctgggaaagtctcctctactgtcgggacatcatttgggcctctagttgggccctcagctcccttaacaccagactcgggagggtacaaaccatatttccaaaagttggcctcacaagccaaccttaatatatttctcctctcaatacggagggaaaggatataattagctctatccctcatccggagagtagggatggagcatgagtaagtcggcaccctctagaagtagtggtggacctatgagatatcctaggcaatgaaataagtcctggcgtatcctcccacttttgacaaacttgtgctgttggtgttgcctaaccactgttagcctagctgactgaagtagaagtattcagtctggttttcccttggaacggatttcaactcaagaaattacctaaacttgtaaggggagggctgaggccagcccaactctacataaagaacgaacatcgtcgaaaggtactttataccttttggggtgatctaagccggacacaccctgaagtacatgggtatgtctctaaagtaagggtgcaggggaagtactgctccctgctctatgtggcactctaattaggccatccatttgaaggccagctaatgttctcgttaggctatcaaaggcctatcacaccagacatctcccactagccctccttccttgatcttgttgagcttctgggtggaaatagaggacgaaggagatatccaccggttctactggtccccatgattaaggactcggggcactacaacctcctccagaatgtggtctatatcccgaccgtggaaagatgaccaagattgttcaaaggccacctggcctcatcatacgaacctaaagggttattggggaatacaacacaagtcttgtattgcctcctagcaggcatggcctcctcaatctcggatgcactatctgagttctccttatctcggtcagcctcgggttgttcggccacaggtgcctcaacctagctggcccttggctctccatcacactaaggttgtgcagcctcctcagcaatgcctactccccctctagttaccaacataacgatgtgagggtcatatggtggtgcgctgcggcacgtctacttggtccttgccataatggaccacaagtccctagtaacaataatcgcggtctctatgataagaagatgtctaggtgaagaaattgccctaccaataggcactactacaaaattcactattcatgtctgtttttaagtgtcacttaaagaatttatgtcggtttacaaaaccgacgtatataccgtagtcgcaaatagttttttattagtgtcaatttcaaaacgacgcaaacaaaaattcgacatttataaaccgacgctaaatacttacttttctatttcatttaaagcgtcggttaaaaaatgacgctaaatgtttcatgacattttaaaactgtcacaaaaaacttattccgtcggtttaaaaatgtcatatctattacgaaaa

SEQ ID NO: 115815 - DNA, 1244 bp, Cannabis sativa
tagatcttggtaaaacatattccaacatagcggtgccttttgtggtactcctattggattggattgcacttcatccttatttgctcattcagtgcttttggagcacttgctttgtgcttgcgacatgaattgaatctggtacgagatcatgaattttgctcattttgtctgcctttcttgctccttctagcacctctttctcttttagcaataacattgattgatttctcatttctttctcggaattttgagatattattcttaactgcaacttgtcggagatatgctgaggtttagacccacttgtttgtccatgttcataatgaatctaagttttgttcattttggcctgcatatcaaccatttcaacgataaatttctgcatagtgtagttaacgtcctctcgatatttcatgctctcatcgtactgatgtttctcttcagtcgacaccgctcttgttgaaatttctattctgtgagttgccacatttccttattatgtttgtctcatgcattcattctttgatttatttctctcatctccaacgccaatgtagtattcgaatcaatgattggactcattgtacctcctacacttgtagttgttgcattctctgatactttcctagaacccatcttagttcgtatcctcaacattagctttttgttttagaaattcacgcagacgacgtagctattgatgtaaaaattggctcaataacaaaattatattatcacattgaattctttacactaggcttgatgtaatcaaaatacactagaattccttttcaattcactcaatttggtctagatctattaattcctgagcttaaacatgctcttgaggatgtatttcgacagagtttttactagtttggtgtgatcaagaattcgtcgtctttatgaatgagggggtcttctatttataggtgcaagaaatctgttagcttccctcattccatcagctctgatttgtccacgtctattaatttccatccgcttgtcctcgtgctttttatttccctacttttagtgctccttaggcgcattgttctttctttcatcgagctttgctcttttgcctttaagctttccactctgcttccttttttagtgacacgatgcattcttattaatcctatcccataggggtgagcataaaatccagaaaatcaaaaaaattgttcaaaccgacctaccgaacactgttggaaccaaaaccgacgaaactgaaaactgaa

SEQ ID NO: 115816 - DNA, 2046 bp, Cannabis sativa
aaaactaacactacgtggcttggcacgtaacaatcacctagaatatatatatatatatatacttattgtgtaaacaataaatataatattttgctttacaaggggaaaaaaaatatcattcacactgcaagaaatttacataataacttactagagtaacttaaatcttaaatcgtaacttaaatttatataacaatttatataaaaattatttaataactcaaatggtaaaaattaaaaagtatataaccagatgattccccttattagttttaatttaaaaaaaggaaataagcataggaaagagttacttcttgttttttattgggtcagtcacttataattgacttttatagaataggtaagagccccaccttgtatttattacttgtgtctcattcattttctttgtaagatcccttctttttttaataattagcaatgattatataaaataaatataatttattattatagataaatattattttaaattttatattctgcaaaaattattacatgccttctttattacatgtgtcttgttcattttctttgtaagatgccttctttttttttataattagcaatgattatataaaataaatgcaatttattagtatgataaatattattttaaatgttgtattttacaaaaattattgattggaccttctgttttgtcgaatgacaaaatatatcatgtattttctaaaatagtaaaaataacaccttaagtttaatttttgacaacttttttttaatataactaacttaaaaacaattcttaacacaagcagattcagaaaatataaacagttttgtcttaataccttagattgaattattattaaattttattttgataaaaaaatcagttcagaatcctatttgtaccatttgggaaaatacagagtctattttatcatttaacaaaacaaaaaatctaattaataactcgttattatttaaagtttttttaatgaacaactgatcatatcattatttaaagtttgatgacagcttttgcataggtacagaaattaaaataagagaaaaatggcaacgttcaaacatataattttagaaaataataaaaagtataatctgtacaaccaataataattgtaatttttttagcaaaaaaaattgtaatttattgattgatggaagcatacatattaattattttataaatatatatatatttaaataatcacatgattgacgtgagctttaaataatcacgtgatttatttttaatgtttctataaaagtcttaaactatataatatttcaataaaaatattattaattaaaaattactttaaattaagttatatgatgagaaaaattatttgttataagaagataaaaaagttaaattatatttgtatcaaaatttaaataatatttggaagaaaaaaattaaaaaaaaaatattttaaattttcataaaaagaaaaggcctcattttatattttaccttaggcattttaataccttcagacagccttgattaggtcaatcacttatcattagccttctttatgaacataggcaagagccctaccttttgaaaaaaggcgtttgtatcataaattcaaaataagtcagacctctcggtcgttacaaaatatattgtctggtaaaaggggcggagcaaggaatttatctgagggggggccaaactatagtaaaacttaatattttttttgaaaaaaaaatatattattaaattcataattaaattaaaatatagaacgtctctcttgcatgtcacgaaaattatctataattggatctatactaaatttttcagcaatttctctttcaatatacactagcaaacaatcacttaaaaattcatcttccatcttgttgcggagtgtagttttcactaaattcattgctgaaaacgatcgctctgttgtatttgtagaaactggaagtgtaagaataagagttaccactctatacacaagtggaaaaacttctgcttttctagtttttaccagccactgacataaatcagagatagttgtt

SEQ ID NO: 115817 - DNA, 1288 bp, Cannabis sativa
cgtaacaatatataatactaatatatatatatataataatttcaaacgaaaactaagatctagtaatttgatttagagtattttacattaagtgttgaaaacaatttttatatatatacattttatttacaagattttaaacattttgtatggagtatgattaatttttaggatttttttataaaaattttagttacattttctatgcctcataaaataatatgaaaacatcgcaaaaaactatatagtataaatattttatgaaaataacgatctatatttttgcagaataacttattatccataaaaatatttataatataaattcgtgtttatgtaacattttagtatttttttattagttatgaaataaattattttaatctattttgtaaaacataaattttaaattgccattaaccaaaaaaagaaatgaaagaaaattgcctatttattaaattaattgatatttttttatttattaaaagaaaaaagcaagtaaaaatagagcatgttacagggcactagtggtgtctagcacctgtagacatgttgtcttgtgattagctagcgatactctttaaaagctattatattaaacgacctgatatttagttagaccaataataatattgatatgttactaattaagatgagattaaggtaaaattgagtagagagattaactaattaaggctctcgtgctgcccactttggaaagtaatcaactaattaattagttaattaaatacgcaattaaatatatatacataattaatcctagtttagcagtaaagtgaagcactaatattatgaccaaaacatattccaacatcatgttgatcatgtgtggctgattatataatattgttacttttttttaattaaaatattaattttaagttatttgaatttcaactaactaatatgtcatcacattagtttgaaacttttgaaagttacaataaataattctaattagataatattatcccttaatttaaattgtaaatttaaatattgttattggtgatgttgaaaattaattcaataacaaatttgcattatgattttgaattctttacattaggattgatctaatcaaatttatgaattatgctagtttacataatttctcttaattattggcaattctctttttaggccttccgtctttcgtactgaaagtagtttggactagggctgtacatcggtcggtttagtcggtttatactatatattttccaacccaacataaagatcgggttataaaattctgcatgcaaac

SEQ ID NO: 115818 - DNA, 1875 bp, Cannabis sativa
aaatgtgatccgacggctgaagtgggaatatgatcgggtctaacgtgagggaccgcgtcaaacgtggcaatatagtagacgtagctggagatagttgggatgatgacgtggcaacataaagacgattcatctttcaaatcccaaccacgtgaaattgcatttcgttccattttgagtcgatagcgactccacgtgtcttgtctgcggttcgtcaatgcaatcatttaaccaagttaagggatccaattaaggattatatctacaaacaaataaaaataaaactcacgcgccacttacacgccgtctacaatactcgcttcaccttgcttttataggcctttttttttttttaatatcttgagtgtagaaaataatttttttttttaaaaaaaaattataaacatataatttttcaacttctgttcaacaattattaactatataattttttttctttctttaaaaaattataaattatataatctgtttttaaaaaatactataaggaacttctaatgtgcctacccttacaaaaagtactacaccaagatacctcttgttgttttggcattaagaaaaaaaaaatttgtaaatattttttttattatcgtgtacattataattatttaagacgctttataaattttaaaaaatttaaaataatttataatataaaagtaatatttaattttattattcacaaacttataaaataaaagaaacacttacgtgataaactgtttgaatattattaatttttaatgtgttaaatttgtttgaattttttaaaattttatagaaaatcataaataactataatatacttaattatgaaaaagaattaaataattttcttagagtgcaccgtataattttctaatactatatatgtgtatattttccaatttgaaaatgttgcatttatctggacgtagtccaatttgatgaaaaaataaagagtagtctttgttataaactaattaatatatcatctagagaaaaataaaagaaggcggtcgcctccacttaattttttgatttaaattttatatatcaataatttatcaaatttaaagcttatattagcaatagaccaaaatataaatatttaaatttgattgtaagagagaagaaaactttacttaaaatagaagtaaacatacgcataaaactatttagtctagcttagtgtccaaattgtacaacatacagtgtgtttaatttaatttatttgtatgacaaattttattggttttgtcagtttatttttttgtgtattatatgtatagtaatttaatgattaatctgcctaagaaaattatgatagaaaaagtcatatatttaatctaatggaaacataacacctgtagctttgttaaggatttaattaaatattacgattatggtagtcggcagaggtgtaaatcacgtgagctaaaaacttttacattattatatatttaaattttaggatgtaattatgtcctattgactgttattggacaccaatatattttcaaataataataacaattcgttggtttgtttttttaatccgggtaacaatttattggtgttcagataatgataatatagtatatgttgagaattagaaattttgttttaaaattaatttgtaataagttgagtagtttatattcttataatttattatttttatatttaatagatatgggataatattatccaatagtatgcattaatttcttttaaaaaaatatatagtagtaatagtatacattaaattatacaaaaatagaataagtgctggaatgaccgttcaatatacttaaacatgaatagatataatatatatttttattgtaaccatatggttacatttttctttaacct

SEQ ID NO: 115819 - DNA, 1150 bp, Cannabis sativa
aaaataaaaataaaaatttcaatatgtaatataaaaattgctaaaatttacaaaattatgatttttatactaaatacgattttttttttttttaatttaaaaattgattttatggaatttccattgctaggggaagcaaatgttttcaaattatttttctcttctattattgtatttgtttacttcttttttattttatttcctgcatccgagaaccccatgcaaatcacaacgaaaatttaagttctaattacctactctcaacaaaggatgaacaaaagaatgaagatgttagaagaaagatgtaaaatctacatcaaaagatagctaccacatgagagagaaatttggaggatgacaagtttgatgaagaatcccatttcttaagggaaattcaagttaaactacttccaccaaatttcaaggagccttgtatgacgccatatgatgatacaattggtctaaagtaccatctaggagcttttaacgagctaatgaaggtcacacttagaggagtcacatataagtggttcaaaaggcttgggctagtaacaattacatattggaagcaatttttggaggaattccttcaacaacatcggccagcaagtgatcacgttatgcatgtgataagtatcacaaatgtgaagcaaggggaacgagaaagcttgcgaagatacatccagcgctttaacatcgaagttgccaaagttgggaggatatccgacgacgaacttacgtttgttatagccgctggagtacgccttggaagtagactacgggagaagatgttgaaaagggaattggatggcgtagaagacttctatgagagagcgaaaaagtacatccatgtcgaggagggaaatcgaatcttcgaaatggatacaaaggagtgatcttcgggaagctcatcaaatccctacagggtctattagacaacacccacaacactcataagctgatgaatccaagtgaaacctccactctgttagaaattattttaccaggatctagatttactaagatgtatgttgattatgattctataatcaaacaccctaaatatgaatttcatcatacgataaaataaacatatataaagtttagaaaatcttacattgatggaaacagaataataatgactcttttc

SEQ ID NO: 115820 - DNA, 3085 bp, Cannabis sativa
  modified_base (3043)..(3045): a, c, t, g, unknown or other
acggggtcttaacatattaaaattcgtattaattcacatatactgaactatataataatatagttcctcaatttattcataattagggttttgataatccatttcataattccagggtattacattacccctgttcaagcacacttaactatgtagttcttttgagatgggctaccagaaaagaagatgcaccttattgatgtaggtagtaaaaattaatccatttaagtcttttttaattgtgtagtcctatacttacacaatcttagaattatcaaacttgatatttcccaagcaatgtgggattgcacaacttacccagtatttctctttacagatcacaggactactgactatcataattaccccctcacggggtccgacgtcctcgtcgaccacactttcagttagggcaaggctctgataccatttgtaatgcccctacttaaattcaagcctccattaggtccttacactcatggaatgatgactcttatatataagtatgtcacactggctacttcctagaatgaggactgaccctacaaactaacacgagtatttccaatgtgatttatcctcactcacatgcttcttgggaaaaatttccaggaggttacctatcctaaaattaccccaggtcaagcacgcttgactgtggagttctttcgtgatggactacgagaaaacaagatgcaccttgttgatgtagcttaatggaggtgatatcttacatttataaaattagcttaatgaattttctctatttttttatttgtttctttaaaatgattacaagtttaagaatttaatagtaagtttctatagtggaccctctaaaaagggtgtatcaatgcacttttattgtttcgacattcaaaagaattttttattttttctttataattatgtatattgtagatatttaagacagtttataaaatttgaaaatttttaaataaattacaaaatagaatacaatattcaattcaaatagtctaatcactttaaaatatatcaaaatttcttttgataagaattacatatatcaaaattatacattgtattgcatgtataaattataatgttagtgtttttaaaaaagtcaggttgtatatagttcaataatttagtatattttggaggtgatgatcatctttggtgtcgtgtttttcaggctaaatatcgcaaaagagaagattctttttggagtttgtctcttcctatttcagcctctaaaatttctcggggcattatgacttccaaaaattttattcgatcagaaatttattggctctttgctgatgggaaacgtatcgatgtatggcactctctttggaactcctggcttagttgggatgagtatacaactgccttcaatccaagaatttaacaaccaaaatttgatctacttaacaattttattattgtgggaggtgatctcaatgtgagtctttttggtgactggttcactctttcagttggttctaaactccatgatcttgaggctaactatagtggggtctggatatgattttcttgtgcgactctacagatggttcgttttcagttaggcaggcttatggttctttgattaagccaaggctttgtggtttggatagtttgtggaagaggaattggactgccccgttcagaagcgtgtgaaactctttctgtggaaggtgggaaagaacattctcccttatggtgaaggctttgtgttatttttggaaaggtgggaaagaacattcaactctaaggtggccttggccctccaatccaaatacatgtacatattatttttttataatttttagttatataggtaattatatatttatttgttagtacacagcccccttataatcaaattgaacctaaagcattgatggtaaaaaaaattgtcaaagcattaaaataaaaattctagaatgctcaatgcagtattattggaagaaaaaaaagactcggatgcggaatatatatatatatatattatgtattggttttcttttttaattattttttacctcaaaaaatagtaagcatgaacgaatgtcaaaaatctagatgtctaataaaaaatttaaggtattcataaaaaaaaagtatctttgtaaaaaaatgacatatgatgcatttatgtaatggttaataaaaattagaaaagtaaaggtttttccacttgtgtatatagttgcaactcttacttttacactttttaattttatagctaccacaaatttatctttcatactaaaatggaaaatatttttttagatatttatttgctaactgctagcgtatattaaagaaaaattgctaataaaattagcatatatttacttatagatgactttcttaatatgcaagagtaatgttatttatttaaattttaattattaatttaataatatattttgaaatatttattacttaactattatagtttggccgccctaactttaattcttggctttgcccctgttgcgggggaactagagcaagaatcgaaattgccgccaaagcgcgccaagcaaatactaaaatgatccccactaatttacaacgtcaatttctctatgataagcgcaaatggttggtaagagtaagaccaataatgttgtagtcccatattaatattacgtatcattgcactaataaaagagaaatgttaaaagacattagtggtacttagcacttctcaaataattatatggttattggtataattaaatgtaagaaatttggcttagcatgcttaaataaaaagtatgattttttaatataccccctgttatattatttatcaataatacattgtatagattaaatatgtgtaataaattaatatgtaacatatgacaattgccatctttttgtaatatttgggaaagttacttgttactatgagtaacctccaccattatcaccaacattaagagtgtaaaaggtattgcacatcttaatttaaaattcttaatgctataggagttatagtatgtgcataacttacatctctataggagttatgatgtgcatnnnttacatctctttattgagtccataacatccatggagacta

SEQ ID NO: 115821 - DNA, 1407 bp, Cannabis sativa
aaaaagaggtaaaaatgataaactttaaaaaagaaagtaaaaatgaaagaggacaatataaaaagggtatagagtataatttcctcataaaatgataacatcatcgaaatgaataggaaccacatggtgacactagcatctccatgagagtgctaaaaaaagtgttatgcttgctatgtgctaaatagtgtgtcaaatttattttgggtttagaaaaaaatgttaaattaaatcgagtgtctaatttaaattgaaagtcaaaatgagtagcaaactttgtttgggattgttctgtaaatttagaatgcaagtaaacgtagttgaattaagtaatataataataaataataaagattgctcccacaaagattgattactaattatcaacaattctgtctttgtttgattactcatttgtttaattctcttattctctctacctgatattagtctccgttttgttagacgatcagcaaacaaagttgcccacttcgtagctaggcgctcttgtttctattctgatcgtagcattcatgatgttgatgttctggttgattttcatgccaatttgtaatttaaatgctttatttcaataaagttgatatttcatgttaaaaaaaaattatcaacaattaatttcaaaaatttatttggttaatgataatttgattttaaaaaataaaacaaggaactaaatactaaaattaacaattaaaaaataacaaaacaaattaataaatgttacaatggatgaatactaggacgcttaatttcgtcatctatccaatctaacatttcataatataattttaattattcttcttcctattatgctagaagatttaccaaagaaatttatattcaggttaggaaatgtaaatttcaacctatatgcaaatttttatatttctatgataaatttaagtatatagaaagcattaggcataaaaatcctaaatgatacacaggacatacagatattctcgttcaatatcaaaatctatgcccaaacaattatagcatatttaattcccacttattttgaatcaaaaatttaaatcatataaatggtgatcaaccattaaacataaattacatagatcatcataatgaagaataaaaccaaaaaaaaaaattacattaatccataattagagtttcaagagactacactaaagaaaaatcttatttctttaggtattcttgattctaatggttacaagataacattaaaagatgaaaacttgaaagttgtatgaggtgtatttgcagcgatgaaaggtactcgaaaagcaaatttaaactttctagatgggagtactcttacaagaagagcagttgtctctagcagtgttgctatatttttaaacactacgcaagtatacgcaatcaagtagtaaatctcac

SEQ ID NO: 115822 - DNA, 3211 bp, Cannabis sativa
  modified_base (3182)..(3185): a, c, t, g, unknown or other
tggtaaaatatttccaacaccaagaccctacaatcaccttcgaggctgaactaatcaggtctagggttagatccataggatcttatgttggtgaagtattaaaatcatgtggtatcaagtatgaataaggatgtcgagttaggtttgtcgcctagggggagttcagttgctttccccctgaacgagtggctcaagaagaaggctgtagcactagcgagccatctaggataggtgcttggggccttgaacatataagagttggagcagtctccctgttaaagattatttcaaagagttttgtaactacctcggcattgctccattccaacaggtatcaaatttgtatagaatattggcctgtttaaaatctttataccatattctgaagtgggagtgcccaaccccactagaaattctctatttctattctgtgaaggcctgtcccgtaagaaagcaaggctacccataccaatggcaggtggtttttactgtctcgcgacccataccaatgattaaaggattattgtgaggctacccaacaggaaggagttcaaggattatttcttttggtctcccccatcagtacaattaaattccaaatcatacgtaagtattgccttttctcaaaagctcggttttgagttttaatttaataaatgtaggccttatcttactaattttgtttatgcgttgtattaactgatcactaggaggcctgttccaactccaaaaattggaaaaaggcacaagattcttcttgatcttccttctaggttgcaagcagctgattcttgttatccgagaacaacttgaaagcatgtgctctccttggcaacaaacaatctactggagactttaaggtcccaaaattctcaaactggcaataagttccagttcttaccgatgaagaggatagagactatgtggctcgcacccattacttgaagaacacaatccctcaggaagctaaagatgatgcctcccaaggtaataattttggtacttgtggatggtcccccaccgtacttagagccgagggtattatcttagttaaatttaaggatagtcagtacaactttcacattttacaattgtgtagatcatattgctcattggtttaatagttggtatcctgagcaccatgttcaattaagttgtaatagttcttactttgggattgcccatgatatggtactaacttcgatagggcgagccatccagattgggacatgtctcctataaatacctttgatcttttcatgattactggttctagggagtatagtaattattttagttcttaatccccgtctgatgactatggtaattttcttgagtgggagattatctctccatatttttcgttttttattttgcacaagtattaatattttatcttttgtcttgtagacatggatttggatctcaaagatatgtttcatagtcctaccaatcccatcaagaaatccaagaagcgcatgactttaacaagagttgccttgggatcaactcgagaacctttaaaaaagatcaagaaaactgtcaacaagaagcgcacctcgatacaactcaccattgaaccaaaaaagtccccagacaactcaacttccccagctgctgtgagcactggtgaacaaaccctaaggtctgttcatcaagttaaattctctagatctcaacccgagattgcactactagagccttcttgcccttgcatgtttatgctggcacagaaggctcgcagatatgatcgctgcatgctaccaacaactggcaccattacaagacctttgagcaaggcgattgggatttagttaacaagggtagcttccaaagtcttgtgacaaggagttatgacctcatgcagtcggttagttttagtttctcttctccttatttttttttatttatttcacttctctcctaaatgtcttcttctgactttacttctcgcatgcatctcttctatctttcgtggcttaacataggggtctccaaaatatcgagatgcttaatgccgagcttcacaaatccaaggaacatcgtgaagttttagctaagcaatggactgattcgtagtcgaagatctcaagaatcaagaaagaggccgaggagcaacaaaagactctcaaaacatacgtcaaggctgcccagaaaaagatcaaggaacttgaagaggcaaaccagaaagcctaggttgaactcataaaaagcttcaagaggccaaagctgatgccagatctaaggttaatacgatcgctaggcgatctatttattgagctcggtttgccaaccctaggatggatttgattttttgggagacaaggctgaagagatgcgagcattctgctagctaaccaagaaggatgagacaagaaatggtgaggaagagcttgaggaagaagaataagaagaagaagaagaaccaactaagtctccaaccatgtagatttagtcatctttatattgattttcaaacaatggcctttaggccaagacaatggtttgcctcttgtggcattttttgtaaaacttttgctttgttggatggccaacattactaatttatatatctacttttatgccttttatctttttttttttttgagttatttatgtttgtctatggcaatttaattcacaaccaaacatttttctttctcgatatagcttacgatattttaagggttacacgcatctccatttcattatttagtaggtgagtagttaatattctgctacatcttttgcaagcagttagtaatctactatactttttgcaagcagtttgtaatttgctattgtttaaagcacacttcaaatattttaaatagttcttttaaaaaatattttgaatatattttgattgcttatatgaatagttaatcctctattcatattttagcttgtgtattatttctcaagacacatttgtatctcgtttataatacatgttataattatgcaagatgctatttatttagatcgcatatatgctaatttaattttctcttaaagaaaaagatttttcaattcttgacttaatattgtcctaagacaatttttaatcaatcatccttttctttgagaaaaaaatttaatttttaggttttcagcatttttgtatatatttataggtggaggctagttattatacacatatattgttgggttttatgccnnnnataaaactctttacaatctgattagt

SEQ ID NO: 115823 - DNA, 643 bp, Cannabis sativa
ataaacctgataaggctcttatggtttcattataatgggtttcttgtcaaagaagaggtatcccccatcaagaatttcatctctagtgttcaatgcctaaaacaaacaataaacacccctagtttgagcactctaaccttgcccacccctttatcttttaaaattctccttacaaagctctcaaaaagaccaagagggggattagccccgagcacataacaaaccataaatgatttccagtacataatttcttcttccacatcgaccatatcaatcttaaccattggggcttttattgtcattaaatattccactcaaattttgaataaaattcgaatgaaaaattggtgtagattgaatcttaccagcattaacttgatgttcacatcatttagttgcttccaaaaagctcataaagtccgctttaacccgttcctactgtaaccgagctattgtggaccttggaaaaatcacctcagcaacatcttcaattgttccaactggatcaatagaatcaatctgctcaacctcctcgacttccccatctgaaaaatccgatgcctccacaccaagaacttttgtcattgatttcatttttaaaagttcatatttaggatgttaaaaacttacttgttagtaaatc

SEQ ID NO: 115824 - DNA, 3398 bp, Cannabis sativa
aaaaaatttaatgtatgtatttgagttagtaaagtctctccctccctccctgagtggcagtgtggggaacaattaaaacacttaaaatataacaggagacaaatatttaagattaggagtatagtcctttgtcaacaagactatcttcttcaaatcggcacttgctaaaaacattttcagaacgccttaccgaaaaaaagaaaaatctatagatacatattgattttatgaagcttgttaaaagaaacctacaaactacaacataacaaaccttcttctacaaatattttacatttgatgattcagtgtgaaacaatgagagacagaaactggtgattttttgaggcccttgctatagttgtaactttatgactagtttttttattgggtagaattttaagtcaaaagagatatcagtcaagcaaaatccctctcttgccttctctccctttcacgccctaccccaccggaaagtgaaaacacacacagattgtcccctcagattcctttcttttccatttgaaaaaataataagaaaatgaaatcagagaaaaacaaaaacaaacccaaccccaaccccaattcctctctctctcatttccaaaatcagtttgtgggccactctttgtttcttttgtcagaattctctgagactaatctcaaacgacataaaatactaagaaataaaacaaattaaaaaaaaaaaaagaaaaagcaattcccatcctattccctactaaacaataaaaaagaaaaagtaaaaggagaagagataaataaatctctattttctctctatctctaaattactcttcccttccttctctttttaacttttaagagctcctctactctttgctactatatttctctcttcatttccagtccactcacatgaagacagtcatggccaaaaacactctagactcctcctcctcaaaacgacacttccactggaccaagaaggtcggacacgaagaaaacgacgacgttgagcctgaaacaaaaccctctttttcttcttcttcttctttttcttccgatgaagtggacaagaagaaagaggcaatggccgaggtaatactgggtcatactccaactactaaagatccagacccacctcgaaacgcagctcagactctcaaaaagaagctcccagcagtggcagtggctcggctccggtcagtcctgacagccttcgggcggaaccgagctgggctttcttccgggctcggaaaccgggtggtgggtacactgttcgggtcgagacgaggtcacgtgcactttgcgttccagaaggacccaaactcagagccggcgttcctgatcgagctagccacgccgataagcggtctggtccgtgaaatggcgtcgggtcttgttcgaatagctttggagtgtgacaaggagaaagagagagaggatgaaaaattgaaaagaggaggggtcagattgttggaagaaaatgtttggaggacttattgcaatggcaaaaaatgtgggtttgctacgaggagggattgtgggcctaaagattggaagattttgaaagctgttgagcccatttcaatgggggccggtgtcttacctgggcttgggcttgttgaagagaataataacagcagtgataacaaggcttctgggtctgataatggaggaggagatggtggtgagctcatgtacatgagagctaagtttgagagaattgtggggtccagagattctgaagctttttatatgatgaacccagatagcaatggtgctcctgagcttagtatctacttgcttagagtttgattcatctatgattggtttcatatacttgttctactttttttgttggtatatttggagaaggtggtgttttttcattttcttttggggtattttggtagtttaggggtggagggcaatacaatatagtattataacattaagatgttggggggtggggtcaatgaaggtgtatatgtatagtgtttttcttttttctttttggaggggttcaatccttttattaagtgattatgagacaaaagaggccaatgcaatcatcactgtctttgcattttggtttatttttttctttcttttctttttcatcatatagtgctcaagtttgtattgatttcaactctcaatcaacgatgagaacaaaaagatgggccaaatttgtaaagaaatccatgcttataattgtatttattttgttttattccccctttgatacctaatcaatatcaatcctggaaaattcatttttcttgttcatttcatcgtttttagtctgattattccttctcaataaaactgatatttgtagtatgtaaactcactttctcacattagtttgtccaaaaggtgccccactcattttgctaatacaaattcaagaaaatgtatacaacattaaaaattgagaaaagttaaactagaaaggattgcacatacaatttcatataaatttttacataatttagcaatttcataacattcaaattataataaagaggcatagatgaaacattgcttcttttttctcagggtagggaaggacagcctctgccacatatatatatatatatatatttatgtatatatctacaaggatacattcattgttcatgtctctatatactttatttattttaaatattagctcttattcattaatttctcttattactgttcatgagcttggatttattaagtaatgatgttatacacacactcaagcaaaaaaagaaaatgatgttacacacacataccacataccacataccccataaaatttgtttgagcatttggtctaaaagtataaggtgttattccaatcattgcttttgatatataatttagtgtggcaatgatcccaataacattttgttttaaatactaatcatagaagtcatcaaaagcaaaattctaaagggaaaatccaaccccaaattccttatagcagagttggcttttctcctattgttgactgctttttccatctctcttccttttttttttgtttttgtttctgtttttttttttttttggtactttcaaccatgaggaatcatgcaataaataattaataacgttcgagtttgattctttctgtttaactagaacactttcatcactattaactaaaacttttgatagctatgtttctattactctaagttaggagtgtgtatcatccaattccaaccgattcagtagaatcggatatttaatcttaattggatctgatctgatgtaaattttgaaaatccaatcagatcgaatcggttattggatgggacatccaatttaatggaactaatccaattatcatccaatagtcatccaattatatttatatatttttaaaatacatttataattttatatatttactatat

SEQ ID NO: 115825 - DNA, 1736 bp, Cannabis sativa
  modified_base (1659)..(1692): a, c, t, g, unknown or other
ccctttcttccaagggagctccccactccctctctcaccctttacctccctttcttccaagggagctccccactccctctctcacttttttctccccatacttccaagggaggcccttgctccatctctcacgctttggcccccttacttccaagggagctccttgctttctctctctctctctctctctctctctcactgtttgctcccttttcttcccagggagatccttgcttcctctctcaccttttgctccccagacttcgaagggaaatccccgctccctctctcaccttttgctctctgctcgtccaagggagctccctgctcccatcactctccacatgcaccaagggagctccccgctcccttggtctctcttcaaattcttttgctacttccttctcccaacacttacccaaattatcaagtgttgcaccctcattataagtatattgtgatggaaagaataacgaagggacgtatgaccaagggaaagttcgttaaagctatagcacgcctccgacaaagcctcaagagaggaggtggttgtagaatggataccacaagtaaaagtagtggaaacactatttgtctaactctatgtacaagctcgcaattgaccaacactcctctactatccatcttacacgctgaccctcatggtacaaaaggaattttgacctccaacttttgggaccacttgtattttggagccattagagcttactataaatacctccctctttcattgaagaaggggttagaaaataattatttgtaagggagttcagagattcaatacaacactatttttctccattaatattctgagtctcacttaagtttttcctcttcaaccctttacatttaattttcaaactaaagtttagttgacgagttcttaccatctacaatttggcgtcgtttaatgacaagctctaactacgttagttcctaaaccattcactatcattttgagaagtcaagagattcccatcatctccaagaaaatggtgttcactcagatgaatactagtcggccaccatagtaagagaacatcaatctcttaccgcgagagaggtccaaaggaagaataacaaacgtgtggacaacaaaaataacacttagaaagggccccatcactacgtgacttgataaggacatcgatgactaaccccatcaatagtagtattcaactatcaagaaggccatctagttgcggtgccctccaccatttgttccatcaaacctcgacacttcaaggcgtgggcccagaaaagaaaagcgagtgtactcagtgaggtcaagctcttgggcacactactatgaagatgagataagtaaccttcgctagatcaataagaggctacaaactactgtggctgacatgcaaaaagtgttaagtggcatactcaaatgcaaaacccaagcctcacacttccaccacaaaagtcactgagtggggaacgcaatctcaaatgcatatgctggaaaaggtgactccataccatccactaatagcaccctaaagatgaacacggaaggaacccgttgcgagacaagagcccaatgggccagttgagacaactcaagcctacccaccatgagaagatttcactaagggaaactccccatatgttggaaattattttacnnnnnnnnnnnnnnnnnnnnnnnnnnnnnnnnnnaacaccctaaatatgaactttcgaaaacgatgaaataaacacat

SEQ ID NO: 115826 - DNA, 1693 bp, Cannabis sativa
ttttttaaattttacttaacaaaattaacaaaatcttgtagtttcttcatagtttttgattaattaatcaaaaaattgattttttaatgattaccaacacctaaatattggtatgatagtttgatatcaatttcaattattttttttttatttttttgaattgtcttaatatttatggtatttgctgcttatttcagtctaaatactaataaaataaaaggtaaaagtaggtgagagcttaaaaaaattataccgatcattattttatttttctttattttgctgatattatttttttttttaagattttgcagataaataaatataactaagaattttatcaatggcaggacatatacaaacttaatatgtataattaatgcatttaaaaaaagtataattaatgtagttatgctgcttatattaccaatacaaatttaagagccaattcataacaaataatttattattaactcattttgttgtgttgtaataaatttatttagcatgggatagtttttcattaatattgtacacctttttctctcaggttgtaataatttacacaggtgaaagtgataattgattttataataagcaaactgttgacatgtatgtaactttaatattaccgtatatgcagtattaattagtggcatttgtatatatatctttaataattataacattctaaataatgtctcaaaagaaaattaggaagaaattgtaaagctagctagatacaaaattaattatattttgcaatttaataatgtgtgtttgaggttgactttcgtttgtaagtatctacaaaatatgagattttttttttatgaattaaaaaagtgatttttctaaggtttaaggtgcgttcgtgtaattctaaaattcctaataaaaccaactactcatgtttttgcatgtgtacttttgatatgatatggcttcgttgtcctcttacacaaattattgtaatttaattaaaaattcacacatcgtgcaataatgtaactttatagagaagccaaatgccgtatattaatgattcatttcaggcttcagctatatcaatgaaaccaacttaacttgtttatgttccataaaaaagggttaaattgtttataaaatataatcgtaaatacttatggtcagtaaataatattggatattgtgttacctatatatattttctgaaggaaaagccttagtacttacgcaaaaaacttaaagcagaagacatcaaattattaagatttaagttggttattaaactgtactaattatgttacaatgtaatgtcttataatttttaaaatggtacttaaactcatttttcattgatttttttttagtttaaccaacttaaaattagttactagcggtatatatatggttaattggtccataataatattttaatattaaaccaatatactatatccatatggtcataatactttcatgtcagactaattattattatattctattttatgaaaattgagctccaaattaaaaatgtaaaatttaaattattacttaatgacatatagattctaattaataatctttagggatattgggggctaaaccccccaaacttttgggtttgtgacagttaaccaccaaaactcaatttttggcggctaaactacctgaaccccacttccgttttggtccgcactattccgtc

SEQ ID NO: 115827 - DNA, 3696 bp, Cannabis sativa
  modified_base (3669)..(3671): a, c, t, g, unknown or other
tcaattgttatgttcttttgggtgggatagtttaataaagttgtgttatgaagctagattgtttggtattgattaatctccttatcttgtcacacatactaatctttgttatgctgtcttttaacattatgtaaaagatcacaagtttatctttctcttcttcttggaatagcgtattccataatagacacattttagtgtaagttctcttgtttctcattatacttttgttcaatattttatagcagcataactctttacttgctcatctccatatgctgtcaccgtttaactgaaggaatacctgatctaacgatagtatccaattttagttgctgttcatcatccatcaagcattttgttgagtgtcaacttattgttcttaccgtgtatgttataagtatattctaatgtaattaaaaggcataaatgggttaaattaataacattttcattatgtttgataaatggaagtattaaggtgagtgtctcgtcctaaatgggttaagatttgaatgtttctatatttgactggttgatacaatgaaagtagtacagtaggtgactatctcgttctaaactccaacaataagcacagagccttcagcttgcgttggtttgactaataattgatcaagcattttactcacatagcataggtggctttgcaatggatgatgcggggcatcgtgaaaacgggaggcacaagggtgatcagtttaaaccaactcagggtcaggtatctggaattagttttcagaacacagtaagaaactaatctgatttgatattaattattatatgctctttatcttatacatgtacaaaaaaaaggatttcaaggaattgatgatgttgctttatatgcagtggatgatgcaacatcagccaacaatgaaacagataatggccataatggctgaaagagatgcagctattcaggaaagaaacctggccctttctgagaaaaaggctgcccttgctgagagagacatggcattcctccagcgtgatgcagccatcgcagaacgaaacaatgccatgctggaacgagataatgccattgcaaccctccagtatagggagaactccatgagtaatggtaatatgtcttcatgtccgccaggttgccaaatttcacgtggggtgaagcatttgcaccacccacagccgcatgtacagcagatgcaacacataaatgaagcttcatacggtaacagggaaatgaacacaaatgattccctcccaatgtcagcagatacttcggatgctgtaaagtcacgaagggggaagagaatcaaggagcccaaggcaatatcacccagtaagagggctcctaaacctccaagaaaaattaagaaagagaatgaggagttaaataagatgacttttctcaagtcacaggagtggaagagcgagcagagtatgattggagaaggtgatgatgataacaaacagctggttgtgtctaagtccgattggaaaggtcaggacttggggttgaaccaggttatatatgacgagtcaaccatgccagcgcctgtatgctcctgcactggagttctaaggcaatgctacaagtgggggaacgggggttggcagtcctcatgttgcacgaccaccatgtcaatgtatccactaccatctgtgcccaacaaaaggcatgctcgagttggtggccggaaaatgagtgggagtgctttcaacaagctgcttagccgtcttgctgcagagggtcacgatctttcaaaccctgttgatctcaaggataattgggccaagcatggaacaaaccgttacatcacaatcaaataagatttgagtaaaataatatgaattggaggaacatatgggtagaaaatggcacgtagtaatcaaataggcatttttgacaggagccacactaaaagctggatttgggtaaatttggtccgctctccttgaaaaaaatctactctctatctctatctctctcttactccacctctctccttttttctctaccaattcgatcagaaagaaatgacaagatttcgttttcttccaattagaaaatgagtcaaatatgtcatggaacaagattgtgtagagctatggttacttaacatgaaactattatggaacagaattgtgtaaagctgtgtatttcccctgcctcgtaaaatgtagagaagcgttcagatcttcatgatgattttagatattagctaatgctgtgtaattgttactcagtcctctaatgtgattaaatgaaacatctcgtgaaggccctctattctgtgttgtagaaaagaaatttagagattttaattctcccaaattaatttgggataaaagcacatgtcagggatcatgatggaaaaattaactatgtttatttcaactttagattttccaataccactcaatttacaagctaaggggaattcataggaatttgagaattttttgtcaattatcattttgctttcattaactctttttcaggttatttcacgagctataaagtaacagcctgatattacatcctcatccaatttgcatttctttttttggttttgtttaagaaaacagctctcagtaattttaattccttatgactgatggttgaacagagaaaaggaaaaaggaaaagaaaaagaaaaaaaaaacttataaatttacaagtacctttaattttgaatctgatttcaattttctttttttaatgtcagattataaataaattaagaagtaaatatttaaattttaaaaataatttctcaaatatatttttaggaaagaaaatacctagaaaaaacaaactctaattttttttccattttttttttactttttatccaaaaacactcctacaaaaacttttgggtgattttacaatgcaccccttaaaatagatatactgatgcactttctacgtgttttggaatccaaaaaaaatttgtcaatttttttttagattcgtgtacgttataaaaatttaagatatcatacaaaattttgagaaatttggaataatttataatatagaaagcaatgttcaagtctatttcacacgcgtataaaataaaatagtcacgcgtgtaacacacagtttgtttggattctgttttcggcgtgtaaaatttttccgaatttcaaaattttatagatttctttaaataattattgctaggtgttttttttgacaatctagttgtcaaaatattttttaattaatgtgcattttgattgagtatttaaattatttttattacaatgattttgtgcatccaattactcttttcttctaaggaaagattctttctcagctgatctctttttggtttaagaaactttttgtaaaagaatgaattctcttatgaaaagttatctaactttgggaaacttgactttccctttttctaatggataatttcggttttgcctttattagaacatatcaaataaattttatttgacagatttgaagtccaaattcatgatcttggttcaatttggaaagtttcttttctagtcctgatttgttgctgcaaaacccgattctaatgctggaaatcaggaaattttttaagaaagttttgtacatcggggaaatcgtttttgtggctgtttctagggttgctatgttctataaataggacctagagagcagccaaacgtttttannnttctagtctcatattttcatatctt

SEQ ID NO: 115828 - DNA, 868 bp, Cannabis sativa
ttggggctgttgttcaagattggaagggtcagactatagctggtatatgttcttctaaaataggtgcactctcttctcttatggatgaggctcatgctcttctgcaagctcttcaatggtgcgatgctgttaaactccccttgcattccattcactcagactgtttggcttcagtaaacaaaataaacagtaattggaaggatagatcttcattatctgacttgattgggaaaattctagaatctttatcttcttttcctagtgctaagatttgttacactccaaggaaaaacaatgtaattgcacacactcttgctaaaaaggctctaggaacggatagagatttagtttggaattgtactagtttcaattcctgtttcatctgattttgtaaccgaactactttctttatcaatgttacaaatcaatttgttcaaaaacgaaaaaaaagtctatcataataaattattttattaatattattaattatttagtgacaaaaggtataataaaaaagaaaaaataaaaaggcacaacaaaatatacttttgcaaaaataaaaaacgtataataataaaagttaaaaaagtacacacaaaagatattttattagcattattaattatttagtgaacatataataaaaaagaaacataaaataaaaagacacacaaaagtatattgttacaaaaaataatgtattattaatattattaatcatttagttataaacatataataaaaaaattgaaaaggcacacaaaaaaatatacaaatacaaaaataatgtattattagtattattaataaaagggaaattttatttacaccccaaaattttctaaaagcaccccattttaataatttt

SEQ ID NO: 115829 - DNA, 3080 bp, Cannabis sativa
  modified_base (2163)..(2178): a, c, t, g, unknown or other
taattttttttttttttttgaatgccgaaataaatgggagtatataggtgcacttattttagggagtctgttaccgccttataaagtatctaatattatatatttaaaatgaataaaatatattaaaaaaattttaaaaaaataaaacttttgtgatgtattttaaaaaaaaaattatatataatgtaaagtaaaaatattctgtaaaaatgtaaaataaaaaaaaattaataatatatttttttttgaatgaaagtaattcattaaataggaacatccgctattacaatagactgaagagcagaaggaacattgctctcagtaaaaagacgatcaggccaataacaagcaccgcgagcaacacaatcagggccagccctgggcataggcagactaggcatgtacctatggcccacctagtctaggagccctaaaaaatttcccttttaaaattacacaattttttttgctgattttaaaaaataccattttttttctaaataagggcccaaaaataattttttgcctatggcctactaaatttcagggccgaccctgaacacaatgtgcgactttgttagcagatcgtttaacatgagaaatagaaatattatttaaagtagcaagaatcaattgacactcttgaacaaacaaaccaaagacagagggaagtgcaaccgagctattaagagcttgaacaatagcaatacaatctgtctcgattaacacattcgacaaattcttcgtctttaaccaactaagggcctccttaacactcaacacttcagcaacaacccgctgacagaccccaagatgcaaggaagaacaagcttcgattagcttcccatgacaatctctaatgatgatgccagtaccatattgattcgtagcttcaaaaattgccccatcagtatttatttttagcaccccagcaggcggtttcacccagcaaacactactgccagcaacagcagcctcatgcagcaggggttcaaacctgttttcttgagccaacaaccagctaaaatgagtagaccgagctagccgaaccacatccgcagcctgggaagaacgacccttccaaagtaactcatttcgagctttccaaatgccccagcctaccatcaaaagtttatccaacaaagccactttacccgctgccaaaaactccttaaaccagtcggcaaaagtagttactgcggaaaattgcaaccccacatcagacctatgccaacaagattgagcaaagtgacaaccaatcaagacatggaaaatggtttcttcattagaattgcaaaaaacacagcgagggtcaacatggacatgtttagtacgcagctgggaacgagtaggaagacatctcgagatagctttccaagcaaaatgaagaaccttggggggggaactttaactttccaaaggactctccacagatcagactccaatggaaggctccattcacctttcatttcctagagatggtggtaagaacttttaaccgagtagaagccagtaggttctttacaccaaaaccatgaatcaacattaacattgtcacttaaaggaacctgcagtatcaattctatatcctttgcctcaaataagtcatgtaaaatctcaagatcacattgcttactattaacttgcatcaactgtgagattgtgcaatgagttaaagcaggatgtgtgaatatgacacaaggattcacaccagaaattagccaaggtaacattaagcactgaagtagatatacctgactcgattctccttctagctccatcacgaatcagttgttgagattcaaacacactccgccaaatgaaacttgggttggcacctatctcagcagtaaggaaattttaataatatattttaagtgatagagtcactacaaaaaatcttacttttaatcacaacaaaatttgtgactaaaagtaaaaaaagttgtgactaattattaattgtcattcccatgttgtgactaaaaggtccgtggttaaatgtattagtcacaaaattacaatttgttgtgactaaatgtggttttagtcacaatatttgttgtgactaaaagtaaattagtgacaacttgtgtctaaatactatgttttagtcacaagttgttttttgttgtgaccaaaaatcacatttagtcacaaaannnnnnnnnnnnnnnnaaaaagttgtcactaaaagtagttgttttttgtagtgagtaaaactctaaaaaaacatatggtaacaattcctaaacttgttaataaaaagaaacaattcctaatacttacccatacagcacatttattttatttattaatatcttcaagtatatcttttgtatactgtgaaatttaaaattaacgatttcaaaaaaaaaaaataataaataaattaaattaacatacatattgaaactgtagccaatgtttggatttttcaatgctaccaaaaagttcaactgatgtacacaaagccacaattaaaactcaacagtagcatctttcatttttaccctacaaattgacagttttctaattaatgaaattagctagcttctgcattgtttaccttttaccactttaagaacttactattagtgaaaaaagaaaagagagctttataaagaaaccctctactctcaatatagggctgaaagaaagaggaccactttatttagtttcaatgatatctcaaattttcacaaggaaaaatgctctacgactttgactagttctgcctttgttgataatttggagatggagtggtccttctatatatcatcaaaatataataaagaagtttaattaagaatgatgtggttatttgtaaggatctaaaatagttcatgtcattttttagtgtgattcaacaactctttgctaagcatcaaaatataaaaggaaatagtatccaattaaaatggacaaaagaagaaaactagttttaacatttttttattatatattaatttaatgatgtgatgtttttacgtaataagatgtacttagtcatcctattcgtaccctaagagcatctccaaggagctcatcaaatttagtgtcacactatcaccaaattt

SEQ ID NO: 115830 - DNA, 5813 bp, Cannabis sativa
  modified_base (5757)..(5764): a, c, t, g, unknown or other
ttactaaaattggaaaaaagtccttaaatccaatagtctcaatagtttagggggcatttttaacgattttaaaagttcaggcggcatcattttgtacatgttaaagttcagggggaaaaaatcttgattagcctatatattattatgttttttttaaaacataacagtatgaacaaaatcaaaaccctccttcgttgttcgaacaaaactcttagcttcccatgtccattttcttcgattttcaacttgaaacctagcgatttaggctctggtagttgtaggatagcgagtcattgaaaagggagagcttaatgtaagaattagtttcattttaagtcaaatacaattgattttatatagtggttttatgaattaaaataattattgagattctgaccctataggattgttctcaggttgtcattggactagttttgatatttccttgctaaaattgaggtaattttgggttaaaaattgagtttggaaatagcttaagtctgaacattagtggccttgacaaattaagggctcgattttagtttctattacgtaaatatggtagtatgtaatgtatatatgtgtcccatgaagtttagggtggtgtggacaggttttggtagcatttcggtgagtgtgtaaacttggaaaatcacacttttgtgcccctaacaaaccgatcaacagattgggaaccggtcaaccgttctggccaaccagtttaccgtttctggcagccgcaagaactctggaatcgtatttttgccataacttttcacttcgatgtctatagttgaagttctatatattgttttagactcgcaatgatctttaaaatatgatacatgatttagagccagaatataagtttgattttattgtatttgaactacggggtcttgtaggaaaccttaagttgtcctttgaaactattaagtagtgttttgggaaaaatactcattggtttattattgttatgacatagggcccgggatcattgatcataccttatgcaggtcagccaacatacttgaagtgaaatatgacgtaagaaaagtataatgtaccacatggcatgacaagttctgaaattatcgatgttctaattaggcaatgacaatgtgatgatactatggacataatatatgggctcaccagattaggtgatgcaatataactggtgacattgagcataggtacaggcgttaatgacatacgatgagtactgagtgtaggtacagggtcacctgattaggtgatgcaatatggctagcgatggactgggcataggtacaggagtcagtgacatatgacgagtaccgagcataggtacaagctcacctaattaggtgattcgatattcctagcaatgtatcaagcgtaagtacgagtgtcagtgatatgaaaatgccttcttttggcatagatcgaaacaattattaggtttcttcctaccgacataccttataaaatacgggcggcactaacatatgaaatttcctattatggcatagatcaaaattgttgttaggtttctccctagtagcgtaccttattaggtacgggcgatagtgacatatggcttcacttacatattttttcatgggagatggcttcttgtacgacaccatagactgagttgtcgcgtagattgtctctatgtcatctgttaagaatgagaaagatgtaaatttagaggcacttactctggggtgctgctcagcattgcaagtgaattttcctttctttccattaccctgcctgttgctgttgttagacctcttcccatttgaatccaaactattgggatattgtggattgtggatggacatccccgtcgatgcggtgcattgttgatttttcttttgcccaatagtatccacacgtcgaacaacttctttgagcttaatgaacccatctgatcgatctagaaaatcaaccattgatcccacagttagccttttaatgtctttccacaattcactgaaagtctcaatgcccccagtattgcagctagtattccttcttcagtcagtcgcttaaccttcgtggcttcggtcatgcacctgcgaatataagcgctaaggggttctcttagcattgtctttacttctaccagttcttccaagtgtgagcgaagctaacatgaggaggaaaattgtgcatggaactccgatgagaaggaattccctgagttaaatcttcctggaggcaatttgaaatacaattgtaggccgacctctatcagtgttgaaagaaagattctacaccgtacattgcctcttaccccatacagatccatcttcatttcaaaataatttaggtgtgacaaagggtcttcttttccagtctacattttccaggtctttattttgaactttgggggtgtctcaagaacttcaatttcaggcgagaaagctgaaccgcgtgcctggtcgagtttgagatcagtgtgttttgggctggtcaggccctgtaccatatttttcactttctttacttgtacttgcacaagtggatgaacttgttctgcttattgactggcctgtgtcacatgaagatctctttgaactggcaggatctgaccctctaccgtttcgcccacaatttagacttttggccttggattgggtggctatccattgtgagtttatgcggtatgccaaaccacatacccttatcgtccatttaagggaatagtagatgccatatccagttgttgattggttatttggtaggccattcttatcagtacggtggactgcctagcacaatcatcaatggttgcctgcagagccctcaaaatctccatctcctggttcctccattctatgaattgacgtctctgttcatcaaatgcaaggtttatggttgctcagaggtcttcctaatcatgatgcaaaatgttattatggcattgcatgggcccaagtgcctctcagaaattttggagttcggtgtcatctcaaactggccttttagtattagtagtggaccgagcctcagtgctgggagtggaatgatcggctgcagaactagtgttcccagtatcttgtagaccaattgtgatccaagctggaggagaagtcactccgtacagtaggaggttgtgtattaacttgctcggggctggtccctagtggtcctcttgcgttttgagggagtttgcgtgttgggatctgtcaccattgggctgccctgatcagcaaggcctccgctacgagtttgtacaaccatcctatttacctaccaaaacataagacaaagacttgtgttctctcaatgaaagcacaaaaatattgactttgcttctagccaacgacagtgggtcaaaaataaagcaattaagtaagataattaaaagaaagcaaaaacagtaaaataaagtgaacatcgattttaaagaggtttgaccacgtatgtatggtactagcctactccccttgtattgtattgatatgagagaaggaacgaagtgttcttcctcttaaatactattattattgatctctgagtaactttctctcttagatcgctcttttctctatagagtatatttctacagaaattctttcaatcccattcatagagaggctatgtcactatttatagggactttgtacatgagggatggtttccttttttcttataataagtaaaataggaaactacattacatctataattacaatgtgagatataggaactaggatgtgttgctgttattctctgactgaattctatgattataggattgtctttacgtctggacataacaagattgatctccaaagctaccatctctcatactttaatcggcatagacatgtcttattttcctctgcccaggtattgaaaatatggaacacatgtcgtccatttctattgctctgtcatggtggagaaaacaggatacctggttatatgttatttatattttaatttccattcaaaattaatattatcttttattttatagaattaaataaaaagggttcatttataatttttttatatatatatatatatcaactggtttggaaagtatataagcattcactagatattcttttaatttctagaaggttgtttcacattctgctgtccattgaaatttatggtttccttaaagtatgtagaagaatagtatgcacttatttgtggattttgaaataaaccagctaagtgttgttattcttcccgtcaacttctggacatctttatgcttcctacgtgaaggcatgtctacaaaagctttgattttttctaggctcaccttgaaccctcaagaactgactatgaaactaaggaattttcctgatgaaactccaaaaatgcatttctttaggttcagcttcattccttactctcggataattgcaaacgcctgttcaagatctttgcaaggactttcggatatcttcaactttatcagcatgtcgtcaacgtaaacatccatattcttccccaagacattcttgaacatcttgcgcaccattccccagtacatggatccatcatttttcaacctgaagggcattaccttgtaccagtagattcctttatcaatttcgaaactggtgtgctcctgatcagccacatgtatttttatttggttgtagccagagtatacgtccgtgtaggttagcaattgaaaccctgaagtagcatcaaccatcaaattaatgcatggaagtggaaaacagtctttttgacacatccttcatgtccagttaggtctgtgaagtctatacacatcctccatgtcctgttaggcttcgggaccaaaaccgtattggcaagccaaacgtgatatagagcttccctgaggaagtatgatgtttgtcaacttgtccacttctatttttcctacttttatcttgctagatctaaaagtcttcgattttgccaaacaaactcaactttgggatctatgtttcgagcattacaaataacattggaactactgccggtcatatcagaatgactccaggttaacacatcactatttgtcttgattgtggaaacgatttattctttcactgtaggaggcaggttcttccccacttggataaccgtgatgggatatttgtcatctatgcatacttcttccacctcttccattggttctatgacacgttccacaccaacctggggatcaagctaatcttttaggaccaccccaagtgctggtttggtagatgttccggcttaagagttgcttccttcccagaccatgagtacaattctagttgaaatgttttagcaactcaaaccacttctctaatatcctctgatagttcctatgctttcggtattgttggggacctttaggcataggtgctagactgaggtcaccactctgatatcaattaaaaatggtctccccaagataggattataagcagtaggacaatcaactataaaaaaagtgctacacttaaaggaggatactgcgttacttcaaggaacttccccattcatggtaatcacaagttgtatcttgcccatgaggatcaatgtatctccatagaagccttattactaaatcacacagggtaacaggttggcttctaagagatcaatggctcctttgaaaatgatgtttactgaggttctattatccacgaggatcctagaaactcttcttttggctatctaagcttctataacaagtgaatcattataggatagtgcacgtgactagcgtcgtcttctgtgaaagtcatggtgaaatttgtaaagcccgcttagttnnnnnnnnaattagcagttaatcatgattatttatgaaaaattatttatagctattt

SEQ ID NO: 115831 - DNA, 1380 bp, Cannabis sativa
agtatacgtgcctcgcacgtagttttttgctagtatatagatatatgtatatatgtgtgtgcatgttgaattaagtgtggatcgaaattctgatttgttgagagggtaaaattatctgggagggtgttatgatgagaaggtgagggtggagcagtagctaggcatggatcgatgatctgatcatcatgatcacaaaaattgtactaattaaaataagaaaagccgttgaccatggaaacccaattttgtctccgattgtctcctaaggccacgtacggtcactttcaagggacaggtgtcgcgatctgattggggaagtggtcataaaccagacacttgcgctgttgaagagtcaaaccccggatctggaaggagaaataaagagagcgttgcttagggatgagaaagcgggttttagtttgagaggcatatggattgcctaagccttgtgcttgttgatgagccacactaaagtagactagactatactcatatatatatatatctttatatattatataaatgtatgattaattcaagattttgaagaatgtttcttttccttttaatattcttttttttccttcacaatttaattggaacatgcgcgctaggaccactcgaataatctcatgagattattcaattaatgcatatatatatattaaccaacggtgttaccaattactgagcttgttgcgttacgtgcgtttactttgatataagtaattaaaactgttattagcctcttagagcaagctgagtgagtttgatgcagcagagagagaacgaagaacagtagaaaagatcaaaattaatggaagttaaatgtggaaagtgctcaacctcacaatgcacaatgatgaagtgtgtttagcaactactcataattagacgttagagcataactgtaaccaaattgataaaaaaaaaaagtgattaacgtctaaccaaccaactaacaacactaacacctgatcactatacaataagagaatggctaaaaggtaccattcgtgtttagcacacactctttgttatcatatctttattactgtaattgagtcgcgagtctcatataactacaaaaaaaaaaaataaataaataacttttaaggaacattgttaatcaatcctaaagtgccacttatgaaaagtgtgacattattagtgatagtgcccaatagtaatactcataaagaaactttttcatatgcttttataattaattttttattcgtttataaaaatagaatcaacataatcttaaaaaagaaacaccataatctcaaaatgaaaataatttttataaaatgaaaatagtataacctcaaaatataaataacataactttaaaatagaaacgacttttataaaaat

SEQ ID NO: 115832 - DNA, 2444 bp, Cannabis sativa
ttttttaaaaacaatattgattaaaagtgaattggtttttaaaacaagaaacaacattttattgttttcaaaattcttgttttttcgtaaatttgttttctgaaaactgttttaaaaaaataaggtcaaacaattcaaattgctttcaaaaaataaaaaataattttttagttatgatgccaagcatgcactaattttcttctttctttctaattagacgagccacgtgtcacgtactcatacagtgtgagtgggcctcttagttgttgagagaattatatcgtaactaattttctttagttaaatataaaaacacaagaacatgtgagaaataataataataatctccctatcacgcttaaaatataagcattgctgttgcttcaagttttttatttttatttttcgtataagcattgttattttgagatgtattaattaataatgtgggagtgcgacgggaacctaagtgcgccaacttgggctgtaatcaaattgggtaacatccttatttattggcatctttgtttttgagtctatcttattaggaaattttaaataattagactgcaagtttagcaacattaataagagtattgtgattatgaacaaagtgtcattttgcaaacaattagtaatataaaatatgtaaaactcgatacttaattgtttcattgatgagaccagtttttattaaaatgtataaatttttgtaaactggtcaaccgaataatcttgcccaaaccaaactgaaaaattcgatgaaaaatacaaacaaaaaaaccaaataaaaatataaactgtccaatatattaattgggcaatgagcaaattgaaaataagtccaatatccacacaattaaaataaaataaccctctttatatttttataattttaatttaatttttttattacatcatcatcaacttttttaaataacatcattattttttttttcaaattttaatgtattttattcatttaaaatatataatattaatatatacacatattattatataaaaagaaatattaaaacccaacaatttttatttttttgaaaaatctgctattataaattaagaatagtcatttacaacaaaagagaaaatgacagagaaaatttcccctatccaaatacattcattgtccaacattaaaacttgtttagccaaaccatgagcggcttgattcgcatcccgcctaacatgggaaacacaaactaaagagagagaggacaattgatattgaacatcaaccactaagtcttggaaagatgaaaggctacatgtcaaatgatttataacgttagccaatagcagcgagtcagtttcgacataatctaaatttaagtgtaaagaactagcccaaataaggctatggaaaagagctttaacttccctttcttgaggccataagctacccattaaaggttgtgaaagagcagccaaaacctgtctaaaagagtcccgaactaacgcaccaactcccattttgtttgtagaagtgtcaatagctatgtcaacattgagcttcagtttatatgggggaggaggctgccacggttgggaaagggcagcaccaattgcaacagaaattgatgatataggtgttgaattatgctactgaaaattgcagagatgagcacactactagaaaaagtaccattttcgtcagtttataagtgtcatttaaggaatttatgtcagtttaaaaaactgacgtatatgccatagtcgcaaatagttttttattagtatcggtttttaaatgacgcaaaaaataattatctttatttaaaaactgacacaaaatatacactcttattttttatcttctgcatcagtttggaaattacgcaaaattatttgtgccatttcaaaattgtcactaaaaatttataccgtcggttttaaaatgacacataaattgctgaaatactttttctttcacctattgcgtcggttataaaataaagcataaatgtaggtaaggaaaaattataaattttcatgctattttcctcacctacattatcaataaaatattaatccactagtgcctaacaacctcttcaattcttatcacataacaattaacaaactagagtactaatgtctcttattatggccctcccatggccaaaataaactagcacactaagctataaggcacgtggtataagagtgagtggacatatttccaagctttcctaattgtgttagccaaccattattccagaattaactatatatatataagtgcactcttaataagtattacttataaatgggtaaaattataaaattttaagtttttatgcttaatttttcaatgtaattaaaaaaatttcacatttttatatcatattggctgagattattccatcagtaaaaaaaatattaaaaaaaaagttttttagcaaaaaaaataaaataaaaaa

SEQ ID NO: 115833 - DNA, 2505 bp, Cannabis sativa
tttagtcacaacataagaatcatgatttataattagtcacaattttttaacttttagtcacaagttttgttgtgactaaaagtaaaagtttttgtagttatattaaaactttaataagatttttttttttcgtaatgttaaaattttattttattgatttttaaattttcattatcatgtttgataattatgacagtataaaccactcaaactgcatgtactacaccgcattttcacagtgtggtttttgtgattttaagatcttacgctacggttgtggtttaagaaattacaaaaatcacatatgcagtttggtttgaaaaaatcaacaacttacaccactcgcaccgcgaacacccctatttaggagtaatcttaaaaattaaaataaatctctaaaaaatttagttgaattagtttcatgtactgtttataaattttttttaaaaaaatatctataatttttttaatgagaaaaaaatatctggttctaacccaccctaaatttgtacggtttaaaatatatgtttaaccattttagatttttattatatattctaattaaaaaaaattaaaaataaataaaatatttttgtatatatatctcatagcctgttgtcttccaagttcaaaatgtaaactgaaatatttatgtatatatgtagtctacattgaattcccactattattgtctctaagatatattgttcagtcacatccgacatagttcaccttatatttttctcccaatagatttgtgtaacatattattttattgttttgttcaagatttaatatttgttatatttactttggaaaaaaaaaaaagaagaaaaactttgctactttaatagcatatataccacataaattttgttagtatgtcattttcttttttaaatatattattaaaatttagtttttagttattacattattgtattaataatttattttattatattaaatatatacaacgactacaagtgagatacataataaaaattactttgaatatagtgacgagtacaagtgagatacaatgatgataacgtctttaactgcgatgataacggttttgaaatcgtatgatgagtaaattataaatttattaggaagttgaattttggtgaggaaaaaaaagatagagaaaatatagggaaaaaaagttaaaaataaaaaaaaataataaatctcatatttgttatggaaagaaaaagaaaattatacagaaaaacattcaatgtcgacaaaaatcttcatatcaaacttgaaaaattgatttattttttttgttgtctactctttttttttttttaaagtttcccgactttttttctttcgtcaccaaaatttaactttcaaacatagttaaaatatttgaagaattgtattataattttttaaaattattaatttatttttttgagtaaatgaaaaaaatatatcatataaaaaaatatcaaaattcaaaatttgatataaatttataacttaatcattactaaacaaaatataactgtacgcgaagcgcggtttgtttcgtagtttataatacgaatactaacatatatacgatttgcactaatggttgactttaagaacttatcaactaaattttagttaaaaaattaaatgcaaagagttgaaaatgaaaagcttaagaaatatttataaaacccagtaatcaatggagtaaaatattactgaatttaatattagagctctcttacaagtaatgattttctaactcatttactagtgttcaaatgtggcttttatacttgagctctaatggctctaaaatataagttgtcccaaaaataaggggacaagttctgattgtacaatgaaggcaaacgtgtcagatgggtagttaaggagtattggtcggatgtcaacttgtacctaaattgagatgaatggcgtctccactacttgtacttgtatttgttgtacaaccacctcgtctcttcaagcattgttgaaggcgtgctagctttaacagactcgcccttggtcgtacattcctttggtatcctttcaagtacaacctatacttatagtgagggagccacactaggaaatgactaagtgttaggagaggaaacaacacttagtgatttggctaaaaattgagagatggagcaacacgtggcaatttggctaagtgtttagggagggagcaacacttggtcatttggctaagtgttgggagagggagcaacacttggtactaagtattgggagagggagcaacacttggtattttagctaagtgttgggagaggaagcaacacttggtaatttggttaggcgttgggagaggtagaaacacttggtattttggctaagtgttgggaaagtgaaggagcaaaagagcatgacgagagctctgttgtcgagtgaatttcgcaacaccaaattatattgtattattaataacaagaagaattttatgtgtaaagacaagtgcgagtattcaacctagaatggcaagtactc

SEQ ID NO: 115834 - DNA, 1391 bp, Cannabis sativa
agcaaagaactatccaatcaacccaagttttaataaaaccaataaaatttaatgtaagcccaaataaaaagtctaacagtagggagttggtttggaatgctaattcttaatgaagttattactcaattttcataaaagagaataaaatgtaacttttatttattcaatcaatttgtccttgtaatttcttactactttgctgtaatatcttagattttatattccattgaaataatctccctagctaggtactgtaaatacacacgtacatatattaaaattattataatagaaaaaagcaatgagtggcacatatttctccaaacaacttgtggctattacaaagatatatacttctcttactaattggtccttattgcttctctgtttcttccactctcttttcacttttgtttttcattatttcttcctcaaatatacaattcataattaagtaaaaaagaaaaaagtgtaacaatttgtagtttttgacagaacaaagtaacatggcaatgatgcttagaggccatggaagtgctgctattggattttcaagctttccatcatcatcatcatcgtcttcatcttcatcttatttaaatcaaaatgcaaaaccctctgtaatctcaccaacaatattccacttggtatgtacactctcttcttcacaaaataatagtttctctttctttctcaattattttctataaataattatgtacattaattattttgtccaagttattttataaattaattaagctacttttttaaattaggagatggtatgtaaacaattaacaattcgcacaagtaattatgcctgttttgccgtacaagaatcttctacttctacaggtgattattacaagtcattttgttaattaatattcatagaaatttacattacaaattttcttaaattaaatccttatgctctaacaatatctgaattttcttttttaattatatgcattaatccttgtgctacattaatataagatttgttccacttaattttaatttttttaatcttcagtagctactgatgaaaataaggaagctaagccggctaagaaagcagctccagcgaagccgaaagctaaagcaccggtgaaggcgctgccggagatgatgaaagaagaagtaatcccttcactaaaatccattcttgaggctcaagatgatgttactgacattgagctttctttccaagataataaggtacacattttagttcatataataatgggtgcttctaaaatgcacctgaatgcagtgatgcaccaactacctattttggcatctaaaagaatttttggtctaattttttttaatattcatatacgttatagttatttaagatacaaaattttgataaatttggaata

SEQ ID NO: 115835 - DNA, 1580 bp, Cannabis sativa
  modified_base (199)..(200): a, c, t, g, unknown or other
ttttcatgttacttttatataattttcttgttattttcgtattatttctattgaaaaccgtaaaatattaaaaaaaaattatttaaacgtaacaaaattagtaacttatataattatatctatattttatgtcccccatatttctagggtgtaagttgaaaaatgcttcttttattcatcaattaatcaaatttacctnnaattttatatttatttgaaacatatccttacaataagagaatcacatggagagtatcttgaagtgacaggggcaaaattagtacaatgtttaaaaaaagaggtaaaaatgataaattttaaaaaagaaggtaaaaataaaagatgacaatataaaaaaagtatagagtgtaatttcctctatttatttttctagggttaccagcccaattccggcccaaatgaaatgtccatctaaactttaataactacaaatttatttgtcttgccgaactcaatggaaatagatataaaggaaattattgttcggccacgccaaaaaagttagttggcgagtaggtgaatttggacctttggtacctataaaataattatatttcatcatatcccataattaattaacagtcctacttaaaaaacacttatggataaagtattataaatgtcaccttacttactcttacttctcccctataatgagctcccctacaaattagcttggccccaaattaaagaagtacctcaaagactcactcacactagcttgtttcaaaatttgtactaactaatttcccatccttgtgttgtatatattatacattacaatgtggggtgcctttattacaacactctcggctctactattttggactatgcttctattttcattccccaccattctttctcattcggttgattctcctaccccaaatcatcacaacggcaaccactacaggcggcggctacatccaccgccacatcatccacgaccccataagagactatcaccgccgccgccgccgccgccaccagcatggttctatttctactcaccaccaccccctagtcctccatgtgctcctcatgacgctggccaacctttgcacgcgtcaccacccccacacttgcactccaagaatcgccgccacggccaccaccaagaaccattgccatgaagacaattaaagaagatctagttttgtagctcttctaatggggttatagtaataataattagttacaagaactaaaagagatgcaacatatataaggagtgaaaaattaagtcagacatctaacgttgtgtagttttccttttcaaaacagaatattatgaaatttacttttaaaccacacgtttatgttttacaaacgacgacagactttatgtagtttaattgttgttttattaaataaaacaaaacttttaataaataatccgtagtgttttttttttaacttgttcccccaagcacgatgatttaattgttgttttcgtgataatattgtattgggataattacattagacaccttaaattagatcttaatatcaaaaataacttggccatttaactattctattttaacgttaaatataac

SEQ ID NO: 115836 - DNA, 3654 bp, Cannabis sativa
  modified_base (36)..(36): a, c, t, g, unknown or other
ataatctggattacattgaaacagagttttatttanggcataaaacccaacagaggtatcaagttgttcatggcagtcataggagggggcctattgttccttctcgaggaattaggcagggagaccctttgtccccttatttgttttttatttgtgtggaaggcttcttgggattacttcgtaggtatgagtagaatcagttaataaaagggtgtcgtgtggctaggggtgctccgccaatttctcatatgttgtttgttgatgatagctattttcttgtccaagctaacattgggggactcaaaaagtgtggagattttacatagctttgagattatgtcaagataaaagattaatttgactaaatctactacttttgggaggttgtttgtgctatttgaatatacatgaagctggatgcgaatagtatgtatttgggtcttccaagtacaagtggtcataacaagtctactgtattatgttttctaaaagagaagacgaggaagcgtatacaaagttggaatggtaaactcttgtcgcatgttggtaaggaggattgggttcgtaatatggctcaaaatctttcaacttatgctatgaacattttccttttgcttacaggaacatgtcatgagttataacaacttatggctaacttttagtggaagtcgtctacgaattccagtcaaggaattttgtggatgagataggagaggatggcgtgtagtaaagaggttgttgggttgggttttttattctcttcattatttgaatctagaaatattaggtaaacaagcttggaggtttctaaccaagcctgattcgttgatctttagagcctacatagcttggtattttaaaaatgggaacttcctttcgacaagactttgtagcaatccaagttatatttggtgaagtcttgttgaggtaaaagagttggtttgtaagggggcaaaaaaaggaattggtaatgggaaggagactcttattttggtgatctatgcctaccgaatggttcatttttgagtctaactagtttggatcctggtttggccaaggaacatgttagtagtttttttgtggtgggtgagaaagcttgaaatgttagaattgtcaaagacttgtttgaagaggaagtaacaaccaatattcttggtgttttcctttccgatttagtttctaagaattattggtattggggttttgaatctttggacacgtatacagtaaagaatatgtttaatttgttatatgcttatacagatggtagtgtggataaggaggttatggcattttggaagaagttttggtagttagaacttcccccaaaggaaaaaaaaactatgtatggagagcagttagtgggtgtttgtcgacaagagttcagttgaagactaaacatgtggatgtttctctattgtgtttggtgtgtcatggggcaggtgaatcaattttgcattgtttagtttcttgtaattttgcgcataattgttggcaggtaacgagtttggctatagtcccagttgatgcaaggttgtttggggactggttcttacacttgttctcacggctaggtgaggagcaaagtgttcatgcggtgatgttagtttgggcaatttagtttgagtaaaaaaagttaggtggagttcgttgtcaatttggctcgttcttgatcaatggaggaaagctcaagaaagaagtttgtttccttcgtttggtacttggtatctctcagattgggctgagctatggactaaaccaagttatgaaaaactcaaggtaagcattgatgctgcattgtttgacgaggagggaaggcatagtttcaatggggttgttcagaatcaccagggtcgggtcgtggttgggattttaagattgcggcttgggcgtgtttgtctagagattgctaaagccatggctctcaagaaagtggtttcgtggttaaagcgagattttttgagtgttaatatgatcaaatcagattgtctagtattagtacaagctgctaaaaatttaagtattttgtcatccacttttgatggtgtcgttgaggatcgtaaacaacttctagcttcttttaatagtgctttttacgttttgtcaaatgatctgtcaattgagttgctcactatatggctagagtatttcatttatatgttggtcgtatatatttagagttttatctcccttttgatgttgctaacattgttgaggccgagttggtctagttaaataaaatttttagtaaaaaaatgtagttcttatgaaactttgaagtaaaaaatatggatactaatagtttcatttgtcgcaataaggcagatttataatttattttttataaaaatcttcattttgattaaaatttaggtatggagttttaatttaatctttttcctaatttttttttatttaataattaaagaacaaaataacaaaaaaaaacctacaaatatattttataataattaaatttttataaaattaaataaatttattaaaagtaattatattttttgtttagtaagtataaatatattttatcacaattaacttttacaaagtaaaaattttgtgtctgtcactaactataagggatgtgcataaattatccaatccaatgacaaccgaccgctaaacattggatatttaatttgtgattggatcggatcggatgttatttttaaatatccaattggataggattagatgttggatgaggtgtgtttgggggagaaaatatgggcacaaagcaaaaacccaataaaatagaataaaagcattaaaaggcccaaacagaatgggtgggtacccaaaagctcgaggtccgggtacattaaaaaggtccaatattgtgcggcccaataagaaccctagaggatagatacaaacaaaaagcactaacgacaagaaagggaaataaacgccgacggaaactatagaaaaggagagatggaaggttaaagccaaagtttactgaaggaggaagggccaggcgctggacatattaaagaggaggacccaaagggagtcctccgaccgaccggctgacggaagacttgtccctagaacataataaggtaacacaccaagataacgccttagtaagggacaaatacttccgtcgggagaagacccaatccgcctcaagtaaggaaaggaattgcagcagagaaaagagatgtagtctacaaagagagagataaacacttcaaagaaggatacaacaccgtcagaccaagagagagcaatagtaaaaacaacagttgaccgaaaagcagacacgtagcaagatggaaggaatagagagaaaggacacgcgtcaagagaagagtaggtaaacaacaggttgcccgtgcaatcaaagaacgtaccatataaataaaaatcacccacataaagaaagggagaggattaggaactgaaaaagagagaaatcacacaaaacaaataatgactgttcttgactaaacagtgtgttaaaaaatccaatacatccaacattcaatcgaactaattagtattttcttttagtttgaattaacaattagattttatattgttatacgtaaaatctatatgtatatataaaaattaacattgaaattatattatttttttcttagattagatggatccaatccaatccaa

SEQ ID NO: 115837 - DNA, 1298 bp, Cannabis sativa
ttcgctacttttgaaacaaagtttgaggtttgctaaaaaaactcttttaaaacaaagttaatctcccttattatatcaatatcaaatagtccaaaacaatacatgtaaatacaaatgattaaaaaaaaagtgatttattttcaaagacaaaaaaaaaaaaagatagaagaggacaaaattaagtagttattaaaaataattattttctgtgataatccttattgtttactactaattaaacacaagtcatgaaattttcaagcgtttaaattttaaacaataaaattatttctttggtcaaattttcgattaaataaaagagttattaaatatttacacataactatttttttttttttttgaaatcataataaatatatttttttttgctgaatgcttttcttttatttttagcgtgcaaaagaggaaggcgggcaatgagaagaagaaggctttgggcattgtcttgaatgaggtaaggcgaataggtgggggccatggagaggggaggttttattagaattgggtgaaagtgggaccagaggcagaagaagagtgaagaaggtgctatgggagtgggtcccacgcccactattcgcagtggtgtttgggtcttgggccccacctcgtccgccccaacttgagggtaggccacacaaacataaatgggccactaccactggaaagaaatggggtatggctaagaagaaaaacaagtgtggtcccatcttaccttttatttgagggaactttgtatgtgggtggggacctctttttttatttacaaaaaatttaaaataaataaccataataatttctttagtaggccccaatttaatgctgagtggcccccaccttttgttttacagctttaccaaagtcccgccacctatatgtctaattgttttatttatttatttattattattattattttcaaccaatgaataaaatttatttatttatcattgatgaaaattatttgtaaataatatatattaataaagcttagtcagaaaaaaaaaaattaaaaggcgtcatagacataatttactaatttacacaggttacaagttcaaattcctctccggtcaagaaaaaataaaaaaaaaataaaaataataaaacttattttatttcacttattaaattgtaattgagtctcattaaaaaatttatgataattttactatttcatgcgtcatctcacatatatatcactaatgaaaaagaattatacagtagaatctctattcaagaatacacttgggactaagaaaataatattttaattgaga

SEQ ID NO: 115838 - DNA, 2446 bp, Cannabis sativa
  modified_base (34)..(38): a, c, t, g, unknown or other
aacattttttgaaaactcaaaaaaaaaaaaaaannnnnaaaacaaaaaaaaaaacaaaaaaatagaagttagaaattctgtgcaaagacatcggaccactatcaggacctacattggtcctatcaggccttacaaatataaattttcgcaatatcctaccctatattgggacacgttattagaccctacatcggtcctattggacaaaacactaaagttgaataatttgatagacaatcaaacactataatgggccctacgttggaactatcggacaaaacactaaattggaccatctatcgggcactatatcgaacctattagaccaaacacacaaaattaaattttaaagagacaatcagacagaccattaggccctacatcggaccttcatcttcaacctaatccatcttttacatcaggatgcatcaggcctgactaaaatcccagtttctcgcccaaaactcacaaataacaaatttaacctaaatctaactcaaaactcataaatcaaaccctaaatctatcaataaataatattttaaccctaaattaataataaaaatattaaaaactaccatcaggacggaatcttaccttggctgacattgcgtggtggtgggtcaagttttgtggtcgtcttcgtggtctgagagcgagggacacgacggtggtggattgagtgggtcttcgtgctcaaatggtgggttcggtcgagtgggtcttcgtgcttagatgggttcgagagaaagagagagacgagaggaagagagaaagagttgatttttcaaatgggaagggtagaatgagatttcaggaaaatattatatattctactaatattgaatagcttatgtttaggaaactaatttttgcccgataaatgcatatatattcaaattttcttaaataaattaaaaaaatgaagaaattaaaaagaaaaaaaaattatatgcgatacttcttaatattttactttatgtatataaagataaattgattgataatatgtacattatatattgtcttttctgcgttaattcacttttattaagaatcgttaattcacattaataaataaataagatgtgaaaaagtatgatatatatatataaaaaaatatgcaattaagaaatataaattaaattgatattaatattattatataaatacaaataaataaaaaaaattattacctaataaataaaaattaatgcatggtacattttctttttaagtcaatgtatgtactttaaactatataaaaagataattcttttgttttcttaaaaaaatatatcaaaagaagaaaatgaaagtacattttatttttttggtcatgtaatatgtagagtgaaattgttggttggctgagtgtgcagtgcacacaccaatttacggtcaaacacatgccctgattagtgattagttggtatatcatcaagaaaatctaaatatataattggagtggcagaatctaatcaatttggactttgttaccacgtttgaggcactaattctaattgttcagacttgagaccaatatataataacccttctcctgttgactaaactttccaatcattgatacctaaactataatatattatcctccctacatttcacccaatcaaattattattctttctttaattttgctaaaaagaacacagtaattttatgccacgtgaaattaaatcttagtttttgctagaaaagataaatagcttaatttccaagataagagaaaatgcagtgtgttcaggtggaatacctaccaactcaaaaaattatttccctttacagatagattagtttagacgatacaacatgctatgaaaaaacaaacaaacaaacaagatatggatattggataagatttccattatgccaaatccactaaaccccattactcaaatccttcaaatcataatcatcaaaaccattaaaagtactaattttgatcacaacatttaatataatacttttctttttaagatggacatatgatatgcatatgtacatatgaaaaataattatttttaagatggacatcgaattccttcttgaaaaatcattgaaatttcttcttgatttttataatggacattgaattttcttctagaaaatatctagttttcttgcaaatatcctatccaaactctcaattggcctggaacaaacaacaacaattatcaactgtctaaagttttatacaaagcccatttgtgtcagggttctaagctgcatgataatgggcttttgaatagggttgtgggcctggaggagaatagcctaaattattcaggagaagttgaaaatacatctttctttatctagggatctagtagggttgagatgcaaaatgaccttaaatttggtaactaagttagtaaatgtctatttttttaaaaaaattaagaaaatagccaaatctaataaatta

SEQ ID NO: 115839 - DNA, 3393 bp, Cannabis sativa
aaatgaagatgcatcatagcaatttaataaccatctctatcttcatacatatcttagccacacaatttaattttgattaaaaatatatttttcagtcacattcatatctataaatttatattgacaaaaataaaccatcttaatctacccgttaatcataaggacgactctgtttcctcttgtaatcggaacatagttggtctcctgcaaagaaaaatatttggatgatgtgagattgaatgtcttgtaagatgaagaaaaaattattcactaaaatctcaccaatgcctaatatctaaaatatgtcagagatgaaatatcagggaggtacttttagaagagagatggggacgggtaaagagtagaaggtggtaacaatggccacctaaaataatttctatatatgttagcataacctagagaatggaatccagaaactgaatctcactagaatattgttgggcaactaaactgaatctagatgcctcattttattaattcctggattgtaattaaaatagaaatttataaaggggaccatagaaacaaataaatattgttaggcaactaaacaggtatacagaattacttcctctggctacaattaaaagatgatacaaacaactgtgtacaacttctgtgaagcataaaattttaaaaatttctaatgaatttccagcatatttgctatttacttaaaaggggttctccctaaagcattgtgccataccgatgatagtatctggttcaaaacatgagaaacaactacatcaaccggttgaaggtcagccacagcagcaccaggttctccatgctgtaacaatttgaaatatccagtttaggttcattacacttactaaagataataaatcttattttctagtctcttggcagtcaaattaaactattttatgttatacagaaaccagcaacaatgaaactatttatcatgattaagctacaatgatgaaaattactaatataagcattacacagtgtattaacatacaattccaagacccaattccatctttcctgggcccaaacgatctgatgtaacttgaccaggcagtgtgcaaacagataatgcaacacccattgttccaaccatttcagatgcccgtttggcttcagcagcaacatgagcaagtgaaagcccagcagcagcagcagccccagcaacctagttttcacaattaaaggatacagaatccataagtaatatatgtcactgaaaatttagcaaaggacattaataattgaactacagtattatggcataatcaaatcaggatttacatgcatcataaatatttcaactctttacaatctagtcctatatttgcacatgcataatgcaaaaaagagcaagaaaaaaccttgtgaacaagaatcgtgccagccaaaccccttcgaccagctatgcctctaggtggaggtagtgcacaatcatctccaacaatcacaatctgcaaggtttaaaatgtgattccataagagtgttaaaccttttcataaatatgatagtacagttaattatttaactaaaccaacccagagattagaagaattagataggaaaaggaaatccaaatgaaaacgtacctcaatgttataaccttcagattttgcttgttcagcagccaaaccaaaatttaagcggtcaccagtataattctataaacacccagatcgtaaaaccatgtatcaaaaaatgagtttcatggctctttgaaatttaaaacactacacttcttgttgtaaaatacatgtgtggatctatcgaatgatgtattgtcatgctggctgatgccataatgacaaaaagaaatataccttgactattagaagacagcccattggacccgttacagctcgaatgccctaaagttcaacgacatcagattatcctctaattttatataactgatagggtgaacatcctctttaattacacgaataaattggaagagatcatacagctagaattgaatcgaccggtggagaggcaaaaacatccccacaaattgctgctgtcagcatcccttcccccacaaatccagcatgtgcaggctcatgcccacttccacctcctgcatcatttaatccagagtacaacaaaaggatcatttcatacttccaactcaattcaaattatgcatttcacttagttttggaacattaaaaaaaactaaaatttttctctagtcttgactctgaacaaggttccataacttaaagattaaaaaaaaaaaagaaaagcgcaatgcacccagaacaggcatagagattaaccactatggatattttatttacaaccatacaattaggtgggtgagtttgggtcagtcagtccatacactatgcttaacaaataacaacaataacaataactagaaacaaatgctaagaaaatataataaaatacctgatataatagcaactttactatatgttgcagcagaaacatcagcacgtaatacaaccttcacctgcatttcccacaatgagcaaagaaatgatgatgatgatgataaatccatagctttagaatatacaaaataaaaacaaaagaattttaagtaaagaccaagaataggacctgaggaaagccatctaagtattgcaaaccagggtatgtttccacaagaccctcaatgaactcagtcaccacatctacacccaccaccacaaaaacaccataacattacataatttaaacatgcatcagccgaccctttcaaaaactttaatcaatcaacgacaaatgatcaatctttaaaatcaacaaaaaccagcaataacacataacatcaacaaaattattctagtttcgtttcgggtttcccagaattcaaaataaaaacaataatgattaaaaacccagaaaaaaaaaatcttattacacaagatggaaaattggtgcatgtatattagaatcaaaaacagtatatatttgagtctgcgggtaatgcatttttaaaagaatagtgaaaagggtttagttgaggaagggagaaagagcgttatagtggtaccaaccattggggtcgttcatgagcttcttgccctgaaaagccatggcgaaggaaggaatcggagtcagaaaagagagagaggttggtgagtgaagcaataaagtcaaaaaggcctcctcctctgtcttctctcccctggcggaatactggttgtttccgtcgtcagagagccagaatattaaattaatttataattttatttggatgaatattcatataaatatatatatatatataaactaggtatgagttacgtgtcgaggcacgtaaagattagttttaggtaaagtttagttatttttttttattttttcttatttagattgtatgtaaaggtatgatcatacgaataatt

SEQ ID NO: 115840 - DNA, 1381 bp, Cannabis sativa
  modified_base (1329)..(1338): a, c, t, g, unknown or other
tagttcaggggcatttttaacgatcttaaaagttcagaggacatgatttgatacatgttaaaatttagggaacaaaaatcctaattagcctttatgaaatggagtaatctttgcacttgttggataaaaaatattgggtatcgcgaagataaagttcaagcaacatgtcgcttggccttaggagacatatctattgccgaacactattctaaaattcaaatcccagttctagatgttatattttttatctttttaagcttatataaagaataatgtattgactttgggcaactctaaagagataaaagaataacctagagatcagataatatattgaagagtaagagaaagagatttcaagcttctttttcatgttaattaatcatgaaagtaacatgtgaaccaaacatacaataataaaaaataatctttaatttttttattaataagtaaataagattaattaacgaaagccttgatgattagcatcatggactcaagagttatgttgcctaaaaccataatgctaaataaatcagggttgcatgaatccaaattttggctcaaaaagtttctccattaaattttgtatcacatcacatatttttaatggaatgcatatttatataatagttactttttatgggcacattttacaacatgaataaattaatgaagatcttaagtagtaagaataggtcaataattctagggttatgatgtactataggtatttgggacatttaggggtgtcaacaattcgtattcataataattcatgttcatgtcatgttgagacttagatattacaaataaatattaaattcaaaccgaattcacttattaattgcgtgaaaaactaaaacccaaacttaacttattcataaataaatttacccaatctatgtaacctatttatatatttttacataaagaatcatatttaatttttgttaacatattaaactattaacatgtttataataactttaatatgtatgtgactctttcatgacaaatttatgagtataattaaaatattggtgttctatttaactaacttaatacaatttatatgtaataagtataatgttgtatattttaaataggttgttgtcctattattttcaagttaggtgtgttaatccaaaaatgactcgtttagtaaatagttagctgtattaattcgaaaaataacttaaattcatttaaggcaaattcaaatcgtgttaatgtgcctgactcatttttttatccaactaaaaagcccattctatcattttttatagacataagttgaaaagtacctcttttattaatcaattaatnnnnnnnnnntctaattttatatttatttgaaatatacctctttttatatgta

SEQ ID NO: 115841 - DNA, 5031 bp, Cannabis sativa
  modified_base (1459)..(1468): a, c, t, g, unknown or other
agtatttttgtaaaaaaaatagcaaaagttagtatatcatgtaaatttccctttttatttctattattaaaaaaatatatttttcattttattttagaaaataatattatatctattataaaaaaaaaatattgcaatattttttatttacataatttttagaattgttatttttattacatattatttaatttaaaatactatttgcatttataagaagattattttataattttttttttaaaaaaataatatatttagtcttgttttgcaccgaacacaacatagtactaatatatctaattcaatcaaatcctaatttataatccaatcagtccaatccaatcatgtatactaaacgggatcttaatataaattaaagggaatttttgtagtattcccctataaaggatcattcttgtacattttttatctgttttggtattcataattatttttactctaattattttttgtatgatgatagctacaaattatagctatttaggatcaaaagtaaatttaaaaaaattctaaataacttacactgcaaaaaatcagatttaaacaattatttactatacgtataagaaaaaatagtagcgcgagcaatataatatttaaatcttatttttagtatggtaaactactagatttattttaaaaatttacaagtagtcttaaataattataatttataggatcataaaaaaaaattaaactaaaaaaaatttttagatacaaaaaaaaaaataataagtctaccaaaacacctattgaaagggtgtactatacacgtaccctaaattaaaattctaataatgaaaattgtgtgtgagctagagagagaagagacgttaactgtgtataatatgtgtataattatgcaatttagaagaagaaaacaataaaaaagaaaaacagagtacaaaggttgtggtgtgtgagtttgtggttacatgcgtaagacatgactctaatcactaattaaaaaaagattagattaataaattgaatggttcaccggccaaatcaacgggttttcttttaattgattatttaactacacagtttgtactctaatgaaagatgtagatatagtattaaatttgacacaaatatatagaaaaaatagtaattttgttccttcaaaaaaaattagtaattttgttctgccaacagtaattatgttctttacaatatacaacaatttactcaacttttacatttacagaaatttaatctttctgttaggttccgttccattattttgtttaaatgctgagatgtctttgtaaattatcaactttgctccctaaactttgataactatcaaattgtactctctcattaacaatgataaagattcaatttttttttattaaatcttaaaaaatcaatttagatattatgaaaaatcatttaaatgattaagaaaattaaaaaaaaattaaaattnnnnnnnnnnttaagcgatttaaaaaattatttatttttttattaaaaaatctatttagatataaaaaaatcatattaaaaattaaatttttgtaaaaattaaattttacgggaccagtttgagtctatatttttttcttcaaaaatctagatttatttaagtaaacataacaattttttagtttgattttttgttcaaaaatattagtgtgataaaattatttattagatttttaataattttagtttgattttttaagatacgtgtttataaataatataaagtttaatgaaaatatctttttaggaataatttaattttttttttagtaaacttaatattttaataagttttttttacaatttattaattttttcagaattaatagaacattataattttaaattaaatttttttaacaaaagggggtaaaattttgtattggtcaaagttcaagaggtaagaatgctaaattctaacggtaaaataaatagaacctaacagaaagagcataattatgtaactgttatattttgagaagaatttttaacaagcatatattttagggggcaagatcaggtagtgtcaaaagttcacgggttaaaaatgccaattattcaaatatatatagtgtactcttaatgattattatcccatgaataaatagtaggggaatcacctcatatactattttttaactttttttttttctttttcatttttacggtttgtattattttaatagttcttatgtgaatttggattgtgatttaggttgttctgttgattgctatgtgattttctgtaaaaatatatatataaaaaaaactgctttaaagtgtaaaagtaaaaaagtctaaataatattaggaaaatttaagtttttatatataatttttctatctaatcaaaaaatttcttatttttacattatgcgctggggttgttccattgactgaaaaatattaagaaaaaaagtttttcgataaaaaaaaattgagtttgacttttgtattttatatataaatatatatttgatataatgtaaaaaatatatttttttaatatatttttttattaagtagttaaattaaacatataaatttaaaatttccttttattattcatcaatttaataatttatatttttaaaattaatatttataattaatttatttagtaactatcaaaggataatacccattcaaaatgtttcatatatatattttgaatctgacacaaatattaaagacttgttatatttagtacactatttgtttttttaaaatagaatattctttttattaattttactctatcagcattgtcttcttataatgcactatgtttgattgacttatcaatgaatatttattttacccttcaaaagaataaaaagttatataataaatgttattttaatattaattgaaaacatataaaaaaacattacaaaaaataggctttagtgtcactttttatcgtcgtttctctctttaaatcgacgctattaaatttcctttagcattaacatcaacaaaattgatgttatattttacctatgacgtcgattaaattactaacattgttacttaaactaacgatgagttcacttaatttgtacaattttagcattagtgcataatcggggccaaaagagcaataacattggttatatggctgctattagcggtgacgatgctttgacgcaaaatttcttatttacttatcatctttattcacaattatttacttttctccctctctatttatgaactcagagtagatgaacagtgttgcagattctgcattcgcccggtatcctctctttacacaaatttgagatttgcaatcctagataattgttatttttgggaaccactctgaaagttgttgttgtatttttaattctatatcatttcacatatatttaattacttttatttcaaatattatttctcaatatagataagtactcatttcaaatcaccttttaacaatattttataaataattatataaaaatattattagaattattaaaatttgaatatttatcaataaatactaaaattattatcattactattatgaaagtaaaaggatttaaggatatttagataagtacttttaaaaggtgatttctaatggtctctatgaccccaggcgatttctaatggtttttgtgactcaacttctttatgattgatctggtagtgatttgtggattcatggctacggtaatggccaatagttctgttgatgagattgtgcaattgactgataaattgggtatggatcaagaagaggaatgggaagtgaatgaagaacaagcttctgagtttggagacaaatccttggttaggagaattgtttccaaacaaagcttcagtgtaggattgtttaggacaattttcacaaggatgtggaaagcacttagggaatggaaagtgaagattatggaagaagataaggaaaacatttattttgggttatcatttcaaagaagaggtgatgcaaagaaggtacttgagaagcaaccttggcttttcaatggaggttttttgattcttgaggaatggccaactagtggacaatggagagatgctcgattagataaagtgtccctgtgggtgaagatgaggggtttcccacttaaaactttgacaatgaataatgttaagagacttgggaacatgacgggggaggttcaagacattatttggaataatccgcaacaaatctttcttaatggatatgttcgagtaaggactggtttcccgattatgggcgaggtgtttgttgggagattcattcctgtggatggtgggaagcgatgtgtgcaaattaagtttgataaattgcctttactctgtttcaattgtggtgtttggggacatgatcaagccacctgcaccaaggctttagcaatggagacgagtgtgaatggtgatcaagttccaaaatatggggtatggttaaaagatgatgatcatatcccaaattgctttgtggctcatgttcatcgtagagctaagcagcaggaggaacgactcatggctggtgttgaagtattgacggaggaggtggttcgtcggccgaaggtgtctcgaatggatgttagggacacgaacaaaggtatggcttccatgacagggcagttggagaaggaagcggttactagtgtagatcgtgggaaggaggttataggtgattataatatgcaaaaattaaaagggaaaatgcatgtagactctgatgtgggccacacaaataaagagatgggctctgtacaaagcccatatatctttgaagctggacaaagttctattgggctagagaaaattagacccattagcccattgagtcaattacgaggggaagcatctgtaggtagctttgaatctcagttaaagaaatcaaatgcagggaatgaaaaaggggtacgatgctgtgaggaggttgatagcagggttgttgttggaattatatttatccaggatcttagatctacttacaagtatgttgatttaacaacctaatattgaacttctaaaacgatgaaataaaca

SEQ ID NO: 115842 - DNA, 2191 bp, Cannabis sativa
aatacatttaatcacacaatcttctttactttccactgtgttgacaatacaataaacaagaatatcagtgtgaaaagggtttggatgaatttattaatcaaataagtaaatagttgatcacttgaaccaaataacgcattaaacaagtaatgaaattaaatatattccttttttgatatgaatagaaaagattacattgaaatacagttttatttagggcataaagcccaacagggacatcgttgataaattagctatgattctttggaattttttgggagctcgtaatgacttactttggattaagaagaatgcttctgtggagagagtagttttggctgtcattacttaccttgaaatctagaattttgctcagattaagaatggagatgcttcaacatcttctggacagtctttgactggtgctgagccatggcataaaccatatgttggtgagttaaaggttacttgcaatgttgctctttctatgatggatcactagaaatcatgaaggtgagtttgttgcttctgcagctattaaaagaaagggtgatcttgatcctcttgtgacataagcaatatctttaaaagaggcattgagttgggttaaaagtacctggggagatgcaacctcttttgaagagtttgttcttgctgctgtggtgatggaatcggattgcgtcgtgctggtgcaatcggttaacatcaataagaagattctctcaccacttggtcttataattttagattgtatcagtctcatatagtctgtttctatgtttcacatttctgttaagtttgctaaacggtctaggaaccaagctactaattcattagctcgttcttctagttcatttcctgactgtctttctagtacgggagatgtcccttctggtttggatgctattttaatagctgatttgcttttttaatgaaagctgcaatctttgtttcaaaaaaataacataatttacattgattaatttaatgctcttgtattaatgtgacacatcagcatctttatcatctttgtttcaaaaaaataacataatttacattgattaatttaatgctcttatattaatgtgacacatcagcatttttatcacaaaactaaaataatctcacaacagtatctcacacatgaaacacaaacctcgagatctctttgtgccagaaaggatgctgaaaagcacgctgcaacaacttgtatcctgctcctattttacaatttgcctcatctatttttcgccaataccagctactattcaaaggagctttgtgctcccaccactcctcatttttaatgtaaacactatggacccattttatccaatgattgtctttcttattggcaatggaccacacatgtttgaaaagtactgcttcattccagtctgaagtgttcacgaatcctagacctccaacaacatttttcctacacaaattgcccgaagccacactgttaggaccctcaaccaagccctgcttccataaaaaattgctacaaaccttttttatttcgtatatgatcttctttggcaagaaggtatgtattgtcagcaagacagagttcattagaacaactctacctgcaaaagagatgttcctcgagctccaaactttaattctagcaaccactttctgaactaaacccgtgcattcatctactgaaattcttttggcacatattggaatgccaaggtatttgaatggagttggatgtcttgtgaagctagagatatttagaactctgagtatttctctttcttgcatcccactgcaatcgatagcagttttttggacatttgaattcaaacccaaggattgggagaatgtttttaggccctgaagcatgtaatatatactcttgtaatcaccactacaaaagagtaaaacatcgtcagcgaagctaagatgattcaacttcatatccttgcatcggtcatgaaacaaaaagtgttcttttttttcaaccttaaccagaatctgacttaagtactccatacccaatacaaaaatcaatggggacataggatctgcctgcctagacctcttttagcttcaaaaaaatcgtggagaaatccattaaagagtaaggaaaaccgaggagtggagatacaagtcataataagcttaatgaatttagtgttgggttttgtgccctaaataaaacccatttcaaactaat

SEQ ID NO: 115843 - DNA, 1834 bp, Cannabis sativa
  modified_base (1152)..(1156): a, c, t, g, unknown or other
  modified_base (1657)..(1657): a, c, t, g, unknown or other
tttttggtgtaaaaatttcattatatataattagtaatttttaaaaaaaaaataataatattattaataaagaagaagaatttgttaatagttgaattggttgaacatttgatagtcatgtaattaggtcagattttcgtcatattcacttgattttttttctaagatatttagttaattacatgataattatatagtggaatttgttagactcactcacacatagaattaatgtaaagtaatttagcttaattaattagttgcaacaaatcatgatttaattaaaaggattagtatgcaatatgcacttattgcgcaaacccaccccactaattatattctaattaaactacttatgaattgagattaatgtttttctgcacattatatcatgtagttccacctaaaatcttttatttagcatttgtaattaattacttatttcacaaattaaaattcatatatttatttgcactaatattaatatatagtattgttggacactttagactattaaatttttactatatttataaagatgtaaaaaattaataattattattattaattatcatttaatattataatgaaatatataaatatcattattttgtattattttattgcttaaataatagtaatatagtaaataaagaagataaagttatgtaaaagccaataaatcataataattaatgacactatactaaataaaaaaaggtagaatttattgtgtatcaaatttggcacataatattatattttgggttaaatttggcataatttttagtatgtaccaaatttgacatactttttaggacactattagagtaatatttttcttttaagtgtgttaaaatataacaatgtactgcttttttaatagatgtcaagcaaatcttgttgtaatagctacttcaaggctcaaactattcgactttaagtgctcgtcacgcctgtgtttcctagcagagtttgttaaattaaggcatataaatttatatttgattgaattttgattctaaacagagaaataagtcacctggaatatcttttaacaaattacgtagtacatacaattagattgaagagattatttcacaatacacaaaaaattacaaaaatatagttgtacaaaattttaaatatttnnnnnattttatttacaaaaaatacagtatttttatgttgtactattattactttgttgttgattttttttggttgtcgttttgataacattacagcaagcaaccagtctgtaatcagtaacactttcaagacacttcactttaggaataagtgtaagtaatgtagtatttagctcttttaacaatctgccataatgtataaaggagagcactatactggttacatcctcctcaagaggctcccaattatcctgtaaaaaatagctactaaagccatctggtcctggcgctttacatccagtaggggtgtacgttggtcaatatatcggtttatgttacattttattcaatccaatataaagatcgggttacaaaaatttaagtgcaacccgctcaattaaaaaaaaaaatagtaacctgtccaatgaaattggtcggtttggttgggttacccgtcaaaaccgaccactaatattttttaatttttttttatttttacattcaantgttatattttagttaattgtaataatgagacaaatatatatatagatagaattcaaagttcaaatcaaccaccgtaaaaaactatatttgtttgaactttatattttttgaataatcatataaattatatctttatatattaaaagtgtctatctaacggcatttcttggtttaac

SEQ ID NO: 115844 - DNA, 3700 bp, Cannabis sativa
  modified_base (3661)..(3674): a, c, t, g, unknown or other
tgtttgtgattgtaaattttcctataaataattgagggaaactctatagctagggcaatgtcttgctattgaaataatttataatactgaaaataaaatatttcgttgcacacttggtaaggaattaattgaattatatttttaaattatttaatttttttttagaaaaatttacttgtaattttaaataattataataaaaaaattagagtaatgtttttttttgataatttcaaacaaatggggtttagtgaaacaccctttttaggacggtgtagagattttttcaattattgaatgtgtctaacaccaattaacttggcatatactaatttatagaatattttttgatttttaaattgagaattaaaattttaaaaataaaaaaaaattacttttgaaatatttggaaataatttttttaaacaatattttggacttcggctccaacttagaccttggaactcgaatccacaccctaaacccaaacccaatttaaataaaatcagcaaatgaaaataaaaataaaatttacagaatatatttttattttctgcttttaaaattgaaaaacaaaagtagttatagaatgcatttttgttttttaaaatcaaaattttaaaaataaaaatattatcaaatgttacttaaataaatacataaaatattttggtgaggcattttagtttttattttttaaatatttgaattccacatttttcttttggttattaaaagtaatccgtcaattggtgttaatagttattagttaaagtaatgatatagttaagaaaaaaataaatgttcttaaaaagaatcggtggttgtaattatatctctgaatttgaaaaaaaaaagtgatattttaattagaaaactttaattcaattttgttttcaactacataaattcagggatacaattaaaaacaaaaaaaatacaagtgttatatacctagcttgtatttattggagtagtatatagatttaatcaaatcttaaattctggatttgataatcaaaattattatattgcttatattatgtatgttagagtttatatattattacaagtcaatttaagatcaagtatataatattatgagtgtgaatctcatgggaaagatattgaatttatttttgtgcaatgaggaaaccgtaacaatttcaagtatatttttgacagaaaataaaaaataaaaaaattattttaaatgggaaaatgactggccttcattgaccgatgatgtattcatttattaataatgaaatgttgaaatatatagtttaagataagaatttgatggtttgaattaacatatgtaaaagatgaaagtaataggggtgaactgaatatctctttaattatgaaactccgtaatatttgctgaattattgttgcttttattataggagtattttttttttttttttttgcatttacaaaaattataacttattattatttttattggataatgtatattgtagttatagtagatatttggttaatttttataaaattctgaataattcatggtatccaaaacataattttaaataatcaattacacatatataaaaaaaactcacacatgcaaataactatttcaattctattttcactaccataaatattcataatttactgaaatttaataaaaacgtctactataactacaataaatatcatcatataaaatattgaattataatttctcaaagtaccgataacaaaaaatacctttataatatgaaacaaaagtaataccttaaccaaaatatctgctagtatttatacataaattatgtactttggatgtaaattgtttcacttttgaaccgatttagttgcatagtaaaaacaattcaatatcaaaattataaatgataacatgcattactacaatatgcactaggaccaatctagaaaggagactacattcattttcaataatttataaacatatatttatatataaaagaatgattagggggacaataagaatgatattttgggagtttaatcttctttttcctttatgattatgcttccttaggttgggaggagttgatcatcctttgtactcttccacttacttgatttgaatccttattactttctctttttctaaagtcacttttgtgacttaatcacattagtcttgcataatatgagtatccatggaaagaaaagaaatgaaaaaggctttttttttttctttgagaagttgagaaaaagcatcattgggaaataattaatgtattagaatagtatatttggtttagattactttagaataaaactataaaaagagagggccatctaggctcaaatgcaaccaaaagatgtgaaataaatatttttatgttagaaatttataaaaacacgaagatgtaatattgcataaaattgagaacactaagaataaattaatgatattgttctaccggaataattgaaaaataacattaattgaacaatttaataccgacctgttaagttttctttcttaaatttctaaaatagaaacaacaacaacaaaattatagttgaactcaatttctttatcaaagacttcaattaataagaaaaattcacacttttactttaactacacttctcacatatgttcattaactataaataactaatgagtaaaacaacaaagcattattcatcaatctatattttaattaataaaataattaaaatattaatataagtccatttaaaagtctaacattataagtacacttagtagtagtagtatatatgtttaaggtttttattattattagagttttttgcggttaaactctctcagctattattccacttgaagttaactctctaagctcaaattttaatggtaaaaccctctaaacttctgaaatgttatcaaatttaaggcgtcatatatttttttaacgattaactgctaacatggactagttatgtgtataatttggtatacgtgacatgtttatatggtacacctaatattattatttaaaaattataaaaaaaaatatttctaaacttgtaatatttttttttatataattttatttaattttaaaataaattttgaaataataataataggtgtactaatataaatgtgtcacgtgtacaaaaatagacatataaacagtccatggtggtagttaacttagaaggttttagcgctaaaatttaaacttaaaaaattaagtgtaagtgagatagttagtataatttagccgccaaaaactattattattattttaaagcatatgttaagttttatttaccttttacctaccatgtcctcgtcgtgtaacgtgttcaagaaaaataagatattctaacactgaacttttaaataaaagtcaatgaattatttgctaagttatgtttagagtcaaattgtttgtatatcaatcttgtgtttttctaagattggtaaaaattattacaaaacaattgtttattaaaaatattattatttttttaacaaataaaaaatattatttaaattagttaaaaagctataaaaaaaatacattaattgaattttttttttcaaattttggagtgatgggaccattatcaataaaagaaatacgacatgcaaaacttgctctataacctgttctgtgacagtcagtagtcccgnnnnnnnnnnnnnnaaataccgggtaagctgtgcaatccc

SEQ ID NO: 115845 - DNA, 2977 bp, Cannabis sativa
catgtcacctgcttcgtcgtccacaattacttgattaaattggtcacattgagagatggtcattttctggagttgtactagacttttgacagtggaggaattcattaaatttattattgcactacatttgataattttgatctctttcaagtttcggaatgacacattggatggcatgaacaagcacttcaagttcatttcttctaaaatagggggcacaacctaaaattattaaaaataattagggaatcaaaataactagaaaatgaattatattccaaataaactactataataaatgttcaaatgcaatttatgcttattcaaatttataaaaccgtaatgtcatatacaactttaatcagactttatttttgacaaatttttgaaggggttgtttatatttttacaaaaatttacataataaccaacagaacaacttaaatcgtaattcaaatccacttaaatattaacagaacaacccaaaccgtaaaaataaagaaaaaatgatatataaagttattccacatttttaaattatactttaacatcatagagagtggtatgtgaatgactgtatttataactatagcaggtatgtgtgcaatataatagagaactaaaaaatggaaaaaattaagaattatttaaaattgaagctcaactatgccaccagtctttagtgattatttttgataaattatgctacaaatagtatttaatcaataaccaaatctcttataagattggtcttagtaattatttcagactatagtattaatattttatggtaattctgtttcaaagatgaaaacaacatgggatgtgtagcatttttcaatggataatgctatatgcatgttattaaatattaatcatttatattttttaagtgataccatatcacttttaatcctatgattcataggaaagttgagttgtcataacatattactcaaccatataaagagatacatatacgtagtacatatcatcatagcattcaaaaaattattttcagtgttatctttactaaaatttaccaaaaatcaccacaaaacataaaaggctcaattttttttcttggaagtgtcatcttttgttacattctttaactaccttttcaaaacagtgtaaaacatgttctattagaatataatgcatggaagaccaattgaaacaaaaaggaaatgtgtacctttacactctgctcttcaatttctgtggtgcaagtcttgatgaacatctttagttttggacatatacttatatccaatatttctaaagatgggcattcgattgccaaatattgttcaacattaaaatttctgaggtgtggatgatcatcaagctgaagctcctcaatctgactttcttcttctctagcttcttttatgactaaaatctcttctatattctcacatttctctatgcttagcttcttaagatgaaccaaggctcttgccatagcagaagaaaaaagatactttaacttttcacatttagcaacctttaaatcttctaaattctgcatgtaagatacatcttggagttgatctggccaaattatctctatagaatcatgagattccaaaaaaaatttctccatcgtaggaaatgttatctacaaaagaaactgaagattaaattaaggatatcctaaaatataacaaaaaaaaaaagagaagagaaatacagtaaatcatttcaacttatatttcttaccatagtgatgattagttttccttaaagtttaacccacaatcgttataaaacttaaaaaaaaaaaaaaaactctgttttaagaaggcccatattttgttacttcattgttttttccattaggcttctaaaacatattttgtgcaaatttttactattctcgaactaggatagcatgttttgtcaaaccatagactgttaaattcttaacgcgaaccacatgagacaaaactgtacacatttaaaatagagatgcataaaatacaaattaaaactaaaatgaaaattgcacctttctattgaacaacggttcatcaggtttttcaatttcattgctgcaacttttttggaatgtcttcattttcgagcaactatcgatatccaacatcttcaaggatggacattcgattgtcaaatgctttccaccactgaatcttttgagatttgaaagaagaagaagtgtaacttcctctagtttaggaaacaaaatggtctcattcatacttccttcctctccttcttcttcttcttcttttgtggctaaaatctcttgcatattcttacaatactctacccttagatttttaagttgagccaagtttcttgccacagtagaagaaaaaagatactttaatttgtggccatggctaatatttatatcttttaaattgtgcaggtaagatacttctcgaggttgatctggccaaatcattcccaaggaaacaagtgaactcaaatctaattgctccaaaataggaaatgctaccacctgaaaaataaaatcataatcaactttatataaaggaaagaataaaatctagtttttaaggtttaatgttattatttgagttgtttaaatttaattaattttattttatttagtaggtgtggtattattccttaaacccccaactaagattcggttagttagttagttgttcattaactaacttaactatcaaatatgacaacaagtattttgggttccttggtctatataaagaggactactcctctcatataaaagagtacaataacaagaagaataggcacaacacagtagagagagatgttaaagtgagaaattgagagagagagctgggattggaaaattgtattgagtaacattgtcgattacgtttgctcgaattagtgagttaatgagtattgaaggatcacaccatggatgacttactgtgattctttccttatagctcctcaaattgatatttctaattctcattatcaataaaga

SEQ ID NO: 115846 - DNA, 2943 bp, Cannabis sativa
  modified_base (57)..(65): a, c, t, g, unknown or other
ggtcagtcatcagtccttaaagcagccagagtgaagtactcgtgtataagagccatnnnnnnnnnggtgtaaggacccaatggagacttaaagcggggacgttacactatttgtgtggtaaaaatccttaaagtgatacccgataatttaattaaagtagactaaaatataaaactcttatacttgattcatggtctctacaattgtcaaaatgatcaaaagctgagaaaacaatctgcactacctcctctatttttttataagaaaatttatacataaagcaatataatgtcatacaagcacatcatatatataatagggacaaaatttccaaaatttagggaaatatattcgtcacactcatacaactacacaaatttatatatgtataataattcttttccccaacaaattaataaaaatgtggaatgttctttttttttttacagttagaaatgtgagtcatgaatatatggcacacgaaaaagagggtgattctttttgtattaattggattacgatcaattgagctggattcatttcaagaacttttatcacgtgtttcgtttgtttcttgttacaaacaaatattagaataagtaataaatacataaaaaaaaaaaatagatgagtgctataatctattataaatttttaattaatttttatttttaaaattatatgttaaaataattttatttttatatattggtattcattgtataattttaattggtttaccatgtgttcaaaaaattctaagtttatttttaatactgtaaattatttcaaattgtttaaaattttatagatatgatgttatgagtataaagaatattattgtgaaaaaaaattaaaaataaatattctagcatatatttttaaatacagaaattaactaaaaagttaggagtagtgcttttcaaaaatttattcaatcttttataatgtaattatgattacatagctttttgaatgtaataagaattttattatgaaatataataattattacattgtaatcctaatattatgttgcttttaaaagcaaatcaaatattgtaatatgtattttaattttattacaatactcagttacaataaaccaaacatatcattatatcataataaatattaaataatgaataatattagaacaatatacataaatatagcaaaaaaatttgagtatgggaataattttttttatcattgtaggtactttttagttttggtataatattaaaatttaaaaataattatttttttaaatgagatattataattataataaacattctacttaatttttgagaaattttaaataaatatatattgttgataatagaattcaaatatttattattgtacgcgtgtttcatgtaattaaatgtgttaagtaattattttaaactttattttttatactctaattattttaattttttttaaaagggacaagatatctattataattttaatttatgcaatcatttaaaaaaaaatgggatataattctaccaaagaagtttcctacaaataaataattaaatatatatatatatatatttatggagattgcacaaataggaaaacgtgcataattcaataattttttcaaaaggaaatttaagttttcattatcaatattatcgatcgacttaattatacatttcataaagtgcttgaattgaattgaattaaccaactttgaatttataatctagttattagtgtaggttagtgattgttaggtgttagtggccggtttttaattattattattattattatttgtaaattgtaaggatttttttcccatcgaattcttttagtattatatcccggcctgttgcattgtaatcggtcaaaaaatcatgttgttcgatctttagcaaaacgagcattagatttaaatgaggctcgggtgtagtggccgggtttgcccgttgatttagctgtttaatttgcctatcttttgtatcccaatcttttggcttgatgtcttttaatagaatttctcagtttcaaaaaaaaaaaaaaataataaataaaggaatttttaattaattcgagctttactataagacagcagttgtactaaaaattatataaaaacaaggccgttttaaatattttaggtgttttgtgcaaaaaatttaaaattacgaaaaaatgtaatataaaaaaaaaattgtgtgcaattaattaagactacaattttattattagatcttttttaaattgaagatctaaactttcaattataaatttcttatttatgtttgtataatagaaaaaataaatagatcttttctttcaaaaaagaattgggctttcaaaaataagaaacttgtataatggttcaaactgcagaatgttaatacatgtagaatgttctataataattattaaattaaattatataaattttgatacttaattatattacagctaatacatttttaacatttctcaattaatttcatagaaactagaaagtacttatatgcatgacagatgtactcaattatgttattaaaaacaacattgctattaaatacattacacctatgaaatgaactcttacaatttacaaataattaacactataacaaaatagttattacaacataacacttcatataaatatgggttaagtaccactaacatcacatattacataacatgtacgtaaataaatttcaaatctcacatatttttaatttaaaataaaatatatatttgagagtgaaagttgatattattgtcacctccattaatgtggagatataacttatgtccctaagcaatactttattaaaattgaatacatagaatacatacatatatagagatatgattttgtcccgtgattatactttcacggaatgcattccgtgatgtacggcagccgtcagatgatggacttatttgatctga

SEQ ID NO: 115847 - DNA, 2196 bp, Cannabis sativa
tattatacaagacttgagaaatcgtgtggagcctctaaaaaatatcgtgctaataattaattaatacatatataaagttgcaatatattaatttgtaagataataataagaaaactggccctctctcctcgaagctcacataataattttattttccatatcaaatattatatatgattattgcaatctgtactgtatacatgtatataaatcaagttcaattaattatttggatataaaatttagaaaaactgacgtatatcacagctgatatatatttatacgattttgctgattataataattaattaacatggtcagtagtgatgtcattaataaactacaagttacatcttttggtcggatactccaagtccaacctataaaaggcccttttctctattttatttcccatcaaaaccaagagattcaacaaactcaaataacaatcgtacatctctatactcaagctaagaaatcaaaaatgggttcctggtcagctgagaatgccacaaaagcctaccttaaaaccttgaaaatggtaagttactttttcatcaataaattacactctaattttttctagtaattatatttctttgtaaatgatgatgatgataaatattatgactaatctcaatttttcttatttaatttcagggacacaaggctaatgagccagacgaagtcgagttcatatcggcgctagcagcaggcaacaacgcgcaactaatggttgtggcctgcgcgggggctgctgatgccaccgcgctagctctcgtggcagcagcccaccaaactggaggacgcgttgtttgcattctccaaggaaacggtgggctgatgcagtccgaggagttaatcctcggactagaccatgcttgccacgtggagtttgttattggagacgcacaacacttgctcttgactcactatcgagacgcagattttgtactcatcgattgtaatctcgagactgttgaaatggctgccctcgtcgacgccaataaagagaggcgaaacggcgtcgtttttgttgggtacaacgctttcagaaaagggtcttcctcgcaatctaatagtcttgtggggtgtagaacgcagttgttgcctattggagaaggtttattggtgactcggattaatggtagtgatcaagctaatagaaaaattattagagcaaatagtactaataataataataataataataatgttaataatggaaaaaaaacacataagagaagtcatagttgggttgtgaaagttgacaaatgcactggtgaagagcatgtgtttagggtcaaatcatttcctaatcatggtagacagattgaagcttaattatatatttagatatagttatgtgtttaggctgttaattatatataatataatgtaatattattataggattcatgtattttactacttttgagtttctttttccaaaagggaaaaggaaagagtatgtataaattactaagttttgatgcgatatatggtgggtgatattattattgtatggatgagattgtagacgtttattactcagatctcaagtgtgtggatgtacataatatattaaagaatatgaatatgtaattgtaaatgtatgccattaaatatatatctatatgaaaaagaagcattaattatatatattattgaaaggttggtctcatttatttagtgcttctataaattaatttatatgcttaaataatcatacagctgtagtttaaattctagtattttgatatgtatttttaagaagttaccaatatatataatagattttaatgttttatattaaatgataattcaacttccgtaaaacaaaatgatattgtaagagttattttagtcaatatatttttcttaactctaaccctgaaattttctattcccaacctctagctaaggaatgatggtgtaaagtctgaaatctaatctagctaattaattatatctctgaaaatatttaaccaaaatcaaatcgtactagcaatagaagactcttttctcttggaatttttcgttggatcagtttttaggcaacttcaaactgaagagattccagatcaggagaaacaaatcaaaagcaccgatcgataacaggaaccctatctcttcaatggtttgcaaagaaaaaaattaattgtagtaatttaacaaaaaaaaaaaaataaaaaa

SEQ ID NO: 115848 - DNA, 4106 bp, Cannabis sativa
  modified_base (31)..(53): a, c, t, g, unknown or other
aattcatattaggatgttaatccaacatacnnnnnnnnnnnnnnnnnnnnnnntaaaataatttccaacagttcctcactcccatcactccctgcatgcaccaaaaggggttccttgctccactcactccgcatgcaccaaagggagctccccgctccactcactccccgcacgccaaaggagctccctgctccacttgccatttgccactctctttctctatctatctattctcaagctcctttgttcctttgctccctcactctcccttatactccctatctaatgccacttgttcaacacaatagagcaatacttaagagtatatgttgcaagtgagtgaccaccaagaagggcttaggagggaattctttctaagcctcgacaacaaaggtatcaacacttaactaagtctcgtagtgtagttccacattatgagtcttagccatagtgggagagataccgaagggatacgcaataaagaaaaaagccataatagcaagcacgtctctaaaaaaggatcaaatgtacgacgggtacaaaggtacaagtagtggagacacccccttttgtctcactcagggtacaaactgagtcccgaccaccatttcttcactacccctctgatgcgttgatcttcatagtacaaaaggaattttatcccccaatttttaggactacttgtatttcagagccattagaattcaactataaaagattcatttgaatacttgtaaaggggttggaaaaccattacttgtaagagagctcaaatattcacaacaatattttactccattgatgactgagtgttcttaatttttcttaagcttttcatcatcaactctttgcatttgattttctaactaaagtttagttaatgagttcttaccgtcaacaacaaaatgacttttcccatggaattgcaagccaccacgtccacaccacaaccttgaacttcattttctacactcgtatccacattcaactttatacagtctaacactggcgctgccacttcacatttatgatgctaggcttataattacgagttctattgtccgtatagtactcttcaatgaatttatggcaccaatcaataattattaaaggattaagactagattttctatgtaaagaaccattcctcatgtaccaaattttctaagaaaaaaatggtatagaattcaaactcatctcttcttagttggtttttttatcatataaagaaattttataagattcctctttgttgttttttatgatcttccaccaaccaatcgcctcccaaaaattcttgctgcttgggcacctccatagagaatgaaaaacaccctcctctacgcctgaattacatatgaaacaagagcgattgaccttcattcccctgcaagacaaattacaatcagttggtagctataagtggcaagccttccacacaatttacttcaggtgccactctcaactttcacacaaattctaccatgactcagttttcttcatattcgataccttggatttttcgatgctcaaggccactttgtacccattcttaacattgtgctccctattccttgaataatacaacatgatcttatcttcaagttgatagtcactacacatgatactaaaaattagctcgacattgttggaacttattttaccaggatcataatttactaacatgtatgtttaattaacacataagtaatctaacatcttaaaatatataaaaaaaaatgaaatgacatataacacatataaaatttaggattacttactattatcttaatttttgtccattgacgtggcatgtccacataagcaaaactaaggccacgtggaatataacgtgttaatagttgagaaaaatcaccatgcacaacacgtcaattgacaagggttctaaatactcaggcaagcccgaattacaagaaaagggccaattaggaagatctagccggaccataccctggctagccaagggaaactatgcgtcgtctaggccctaagaaaagggtaggtcagccatcacaaataaagagcatcaaggggagtctgattagatggtgaggtccacagccttctctctggacggtttgcagcttggtttcagctacgagacaactccaacaacccacaaagatagggattcaacctcaaattatctacctatctttcagggatatcatttagttatttttgtaacttaaatatatgataaaagagttatttttcctattttgaatggatatttacttatttgaatattgatcttttgtaagccctaaaactatataaagggtcttaaacacttagaaaagggaccataagtcactctctctcccactcacgcaacttcccattcattggacacttagtctattttctcatatcacttgttcagaatctgtaacacatcaattctcactattgtagcattcaaagagagtcatagctagaaattacaaggtttaagcctacaatctgcatggtgttgactcaaactcttaagtctccttatttttatgattaacaaatatttgattattatttgtcactaatgatttgttgataatattttctaaggcaaaattaacttcaagggtaaaatggtaatttgaccgaaattctcgaaagtgactcaaagtggattacaagactcaaagaactcaagacaagacttcatgaaggtttatttacatttcctagtcttgtatagtgattttcaagtccaagcttaaaaaagctttaagtacgaattttaacccactaacttgtgtgacaagttatttcaccaaatgatatcttaaatttttaaattaacttttaaaatcacatatcatttaactaagagaacaaaattggaatttttaaaatcgaataatcgagtagagagttatggccattttagtgcaaaaattggactttttgccactataaggatatagttaactgtttcctaaacgataaattgtttctcctagaaactggtttaccgcttgggaaacagtgaaccgaatctcccagtggcagtctcgtttttgtgtataacggctagtttttgtttaaacactgtataaactcaatttttactaaataaattaaattggttgagtatttatttcatatacctaacctattcaagtgagtttaatgagctcccaagtctaaaatccaacaaacacttttcacacactttgagccaaaagttgtgtttaatttttaaagtgtggttgctaatcactctaagttttgtattgtttcatcatacttttagagtgagtttgcttgtaattttaaatatatttccatattgtgattaagttgaggttggcacaggcattgtaaactacccggttagagtaaaattgttactacaacaatgtaagaaagaggttaatagtccttggcagtgcaaaactattgtaagagatttggaaacaccttggtgaaaattccccgttgtaagggttagacaagcccgttaacttggctcgatagtggaactcaaagctaggtctataactttgaagatcaagaacgtaggtggcttagctctaccgaaccttgtaaaaatttagagtttgtaatttcttagccttaaactctttactttacaagtttgattatttgctctatataactgcttgccatattatttgtatttacttgattaagttgattaattacatagttttgtgtcaaaagttttaatttatcaaaattagcttaaaattctaattcaccccctcttgaaaatatatattgaattaacaattggtattagagcaagggctcatttatttgattagctttcacaatctagagcatgacatttctcagtaattcacaaaataataaattagaaggtttgggcacaaatagagcaccatacttcaatggagtagatttttcttattaaaaaattagaatagaaacttatcttcaatctatgaattttgatttgtggcatatagtgtctaatggtccttacattgctaaatatgttataaatggtgaagaagttattaaaacttatgagacatatgataagaatgataagaaaatactttctaaaaatgttagagttttttttttttttt

SEQ ID NO: 115849 - DNA, 2924 bp, Cannabis sativa
gcatgcacgttgtttttcgtgcaagaaagatcactgggggtacaatatgtcttcaaccctccttctcggattagaaagactgcttgaggtctatcctactctcgcaaacccagcgatactttacccttttgcatttgaagtaaatttaatgttcaaactccttgcgcaactttagcctttctcagtgaaagtcaaaagtttgttgccacagggttcaacgtaatcatcacttacataaacctatacgaaaggaagattgtttacacgaggatgcagacctagctttccctctgagaaaccaacggtctcccatgccatgaggagcccagaatctcccttacggaatttacacctcgaagagattgttggcatatacaaccgggttctcgcccagaatcccatgttttcccttcccagaagcctgaaagtggatgtgcacttctaagaaactatcccagaaggacaatatgcttcctgaagcaaggcaaagctacactgaactctcctcctcaaaaatggagatacaagttagactacgagcaaatgatcgggaatttgagtccaaaactcccagctcatttgtgggggtatgatatatccgattgctgacacctacaacaccttacgtcaattttctaaagtcattcagcccaagagtatgcatggcaacaaaaatgggaaacgttctcaaccaaagtctccccaagagaaatacacttcggttcttccctcaaaagctaaactcaagagtgaactcggagataagaagcatgttcggccaaaacatttttgaaaatgaaaagacatgcccgaatcccttcttacacatctccacaggcttcatgtaggcttagcccatcaagttgcacaaagggctagaatgaaaggccgacatggaccaaagtaaggaaaacatctaagtttaaggtaattgcagacatcactcctgagactcgaccttatgaaggaactagacctcgaaagggatgagaaagattatgaaggaccttttttcgcggaggaaggccatcttctggccaaacaagcaacctcctgtgtggcgaacagaaaaacatcacaacactgggaaagaaaagggtcaaatcgaaaagtaattctcgaacttaccaggagataatcaaggctaatggaaaaaggttgaaataccggtcgttggaaccaggtgcttcaataacataaccagcccctaaaagtctaccacaacaaatctccaagtaaagaacaacaaaaaaggactctatttactattacagccccccgtggccaaggcaaaaattttattttcttcacggctaaagaagtatagttaaaggggggatgtataaaaaaagaagagaaaaagaaacaacattaatctgaagggcatgtcgaaggttcaaggttagacactgcctgattgggaggaagagtctgcaccggacatccgccccacagtctctgtgtaaagatcgtgaatagccttcatacttcgtatgaagcgggccttgtgagcattctcctcctccaactgctggttcacctgctgcaaacccccaatctggaacctggcatccgtaagtttggtctgaagggtctcattggtggcacgcaagtcacggttgaccgccttgatttactccaactccgtcaccagcacgcctatctccgtggcaaccctttccgtcaatagggccgcctatcagaacgggccaagttaaaaaaaggttgaaatgtcagaacaagggccaaagcaaataaaccaaaataaagagagaagtggaggcagtgtctcgaggccataccccaaccgcctgctgctttgcagaatgggctagtgtgaaaatgtttgcgctactatagagcgcccaggtttccatgggaagttcagaggcgcttccggtaacctggtctaggatttcggcggcaaaaggtctagcctctctgcccaccttgtatgccagcctcttctccaagacctcgacctccacagtcgggcctgcaaggggtggagtatgcatgtcctcagagatttcggtaggaatgtcaattgagcccgacccggttcgccatagatccggcctagcccgatatcactttggcccagcttggcccgacccgactactttattcagtctagcaggtcaggcccgagccgagataatcgggccaagttgagctcaacctgtatttgttttttgaaaatcagtttatttatttatttattttaaaaaatatattcaaatctattaggtaaaggaaatgagactaaaccatcaccggcaatgaaaaagcactacaaaatgcaatcaatataagtttagtagccgcagacaaattgtttaaaaaataaaaatcaacaattgtaagggtgatttatagttgtatttagacaaaggtaatccaccataaacatttagaaaaggacattaaagacacacatttctataatcatctcatcatctatgtacgtgttgtctttgtcttgaaagtgtattgttgttttcttaactgtacttgatgtgatatacaattattataactatatacggctctaattttccatgtgtatgtttttgaataatgtgaaaaatccaaaaccaataaacggctaagaatgttcaaaattgatactgatgattcttcatacgctgaggatcataatttgagtacggaaattatggatattcgctggtaaactatttgaattttagattttttaacacttaaccacaaaaattgatttttttaggggcaaaactacctaaactctcattctattttgatatgtatcattccgtccaaaaatcacggttaagtgccacattagattgcctatgtgtacacacatgtacacacttgtacacgtgataaatttttagtagttcacgtaatattaattttaaaaaataattattaatatttaa

SEQ ID NO: 115850 - DNA, 754 bp, Cannabis sativa
ttatatattataaaaattataaattataatatttaaaaaagagaactaaaatataactaagtatacgtgcaattgcacgtaacttcaacctagtatatctatgaagcactaacaaatgcttgtacatttataataaatttttctttattatattagttccaccgcaatattatatctcacatgtaatattagaaaacatattgaaaaataaacatatagaaatagaaatatatcaactatgcatatggcccccaattttttttttaattatattaaaaaataattaaatatatatacatcaaaataaataaaaatattagctatactcttttcaactacataaagacatgaatattaggaactttctaacaactaaaaaaaattgttaatttaggtatggtttattatagttttatttcttagtatagaagtcatataataaaaaaaaaattaataacgaatttgaaactttttttgcaattaaattaaaatagtatcataaaaaagcactacttttttttatcattcaacaaccatgcgctcactttcacaaaatatcctaccttacaatattattaaagctttatttatttatatatatcttggtaatggcaatcatatttttccttcttataattcttctaatgaaataatattaatttgccaaaaaaaaatatatatatatgtagggcaagactatggtaggacctagcaaaagttccgtaccggtagggaacttttttttaccattgat

SEQ ID NO: 115851 - DNA, 2765 bp, Cannabis sativa
ttagccatgtgcaaaaaatagagcgatcttaggcaataaactatccactaatttctgttaagttagtttcagcttcaatttttcttccaagttgaaattagtcatatatgtaagtgctactctatatgggaatacgttttgttcatttttattatgttctcatatatttcctggttctgagtgttgattgtgctccaactcataacaggtgtgaatcattttcgacatacccacgtacatacgatcttctacacgcgtgggcagtattttcagagattagtgagcgtggatgtagtatggaggatttattgatagaaatggatcggattctacgaccaaatgggtttgtaatcataagagataaaccttctattataaattatatccggaaatttgtcactgcactaaggtgggatggttggatatccgaagtagaaccaaggattgatgctctgtcctcgagtgaagaaagagttttgattgctagaaaaaagttgtgggatgaggacctgatgctaatgtgataaggtaaaacatattccccatcaatatgtggtacatcaaaattttgccttttttcgtagagattttttctactgtagttgatggtgtttgctgatgttacttgtgttctaaggtatctggtgtgccccagtaggagtcttcgcttaggttcggcatgttatgtttttagctggtagacgagaatatacaacttatagaggctcagagatggaaatgcttatggtatgtgagacttaatagagatgcagctgtgtatacatcaaaacaagaagtgaattatagctataagctattgcataacttgtagggattcttttgtggttttgtatatgtactagttgcattattttttaactaatataaatcacaagttattgggaaatgtatgcataaagttatggttaatcttgtaatttcttgtcttttaatgcttaatttattgggaaatatatgcataaagaaatggttagtattgtaattttttgtcttgtaatgcttaatttataatttatgctacttttctttgtgatttatcatttgtttaatatgtgcatattaacacctcatactattcatataattgcgtcacattggaaacaatggttctctaattaagtctttatattgtagatctaaaaattgcatgatgatcaagcaagagtttcattttcaaattgacgatgttaaaagaattatcttaggatgatttgaggtatggcataggtacataattttcccaatattcgtacttgtcttctgattgtgcacacagtaggagtaggagtccttatctttgtccaaaacttcatgacatgtctcaacacacttgaagcagccattatcaagaactttgaaagttagagaacccagtaggttggttccttctttctcttcagccatgggttagggccttgaatcgaaggctaagttcacaacgacccgttttaaaatatagtcttataattacttatattattctcaattttataaactcataaaaggagagttaagtacatctgtacatggttagtaattaagctaaattttctgctaaaataaaatacattgagataaaatgggcacatatattaattgaatcatgcttgcttatgaaatccctctcaattgtacaaaaattgaacaaggtagatgattaccactaaatgatgaactccaagtactatgctcacaacattaaaagaagtttcaaaatttctctacaaggatttagaaggtagctcaactccaattgctgttttaatggcagtagtggcttgtgacatgtgagtggtggaaaccagtcgcacccttgtcgaagtggattatgatgcgtcaatgaaatgtggatattaatattatcaattttgagatactattaggcgtcaatagagtgtatatgcttcgaaatgagggaaatcaatgtatagatatcgtggctgcaaagctatgaagcttacaacgactttaactggtggggaaatgaatgcaaagcctacgaaggatagagttgaagctcatggagcctcaaataggtggagatggttgcaaagctttagagaaaattagggaaatagagatggtgaaatgggaggggtataatgggagtagaaactcaaaaagagggtataaatgaaagaatttaaaatagcaggtaaaaatgagagacctttacttaaaaggggtatactatttgtttacaccaaaagtagtcttgatgacgtggacaacaatgtttgacatgtggcaagaaagatgacatctcaaagttgagtagtcctgagtcatagcaagttggcatgggaaaggtccctagtcctacgcccaagttgacttcgggaactcctgaatggaagttcgaacttcgataaatcatttccaactcattatatttaagtattttgtaccatgaagacatggagcaatcaaatccaagtcttgggagctgaaattacatgtacctgcaccccagaagttaacctgggcacctagggttagggtttcaccgagcgctcaagttcaagttcacatcctcaactagggtttcaattttttggaccgtcttagtgaaagtaggtcaaaatttggattggtacatgaactagacctaccacgaacatatttgaggcatgagaatcaaattcaaagaaagttcatttttgaggacccgaagctgccggtgcctgggcacccagcgcccaggttgacaatttttcaatttaggtgacttccaagtatcagat

SEQ ID NO: 115852 - DNA, 6453 bp, Cannabis sativa
caacttgatttgggtattagggttcttgagtgtttagggtttgttaatgcacatttttatgtgatgtcatgtttaagttattaattttgatacaaagattggttgctcatggcagaaatggcttgcttttatgatttgccaagtgaacttgtggagaaaattatgttgtgggcaccagctgattccctagtacaatttaggtttgtgaacaagttttatcacaccctaatttcaagtttgatcaaagacccagaatttgtagccaaacacctcatcattgccaaaaacaagtctttagtttcattactttgttacacaaacccttctcccaatgttgatcatcgtttagccacacacccattgttaaatataatctacaatgatgttgagaccaatgttttgggaactgtggttgatactgtcactttaccagtttttcttaaggaagggttcaacaatgtaatgtatcactgtgatggactccttttgctagtgaataatcatgggagaatgatgttatgtaatccttctttgaaagaatctgtgattctcccaaaaccgatgaatgttggattcgaagcttatcccaatgtaggatttgaactcgattctaaagacaacaaatacaaatgtgttgccatttggctcggtgaagatgaatgtcaagttggggtatacacagtgggatctgatcattggagagagatcaagatgtctgaagacatagttgatgctatagccgatactcaactatgcaacgggttatgttggggaggcatttgttactggatggtagtggtaagcgatgaagctatattcatcctcagttttgatatgagtaatgacaagtttcgtttggtaaatttgccaaattttgaagctttgggtgttgaagaatgggcactcgaagaatattcacttcgttttgcagtatggaatgattcagttgtgttgtgtttgaccccgaacggtgacaacacctcttttatcttcatgatgaagaaagacgctgcaggtgcttgttcttggaccgaatacaagcagattggaccgctagaaaagcattacagtcattttttactacccatttggaagaacaatgaaattctaatgaaagttgttggagatgataggtctgcatttcagttggcttcttacaacattggccaaaagttgagaaatgttgtttatgatttagatagcaacatgaacatattttataattcggtttgtttctatgtaaagagtttaatttctgttaaggtaaagagtagtagacctcctctgaagtatgtctacacaagaagacctaaagttgcaaaattgcagagaagtgatgaataagttcaaaggtttagtagtaaatattggtagattggtttatatacttacaagattaagaggggaattaaattgttttagcaattggtttgaattttgtaaattgtttttgtacagttcattgaacaaaataatcacatgttttgagtttttgatttgcataatcctaatcaaagttgatttaattaagtttcttctctttctttgtttttctttcttattgggaattaactcattgtttcattgagttacttttagtagtcttcttcttcttccattaatatgctttaatcaattaaagtattgttatggcacactaaagtgttagcacttctatgacatgttattttataatttagttagcgtttatctataatttttataaaattgggattcgatattgaattatattaatagtggagaaatgctaaagagtatttatgttgcctaatacacttatgaagtgtaatatcaatgttggtacaatttaatatcgaatcttatttattttaatttaataaagattatagaaaattactaattatttataagacgtaaccttagtgccttataataacgctctcaataataataatattataccttgtaaagtagtctttttggatttttcaatcaattatgtcaaaacaaaatgagttagtagtgattgatatttgatagtatcgaagcaacattctcttgttttgtatattttaatattttatttatttatacattaattggtaatttaaaattaacaattgtgtacaaaaatgtcaaacattgcctccactttaattcctcttgcctttacggccaaatacataataatagagaaggtcattcttcattgtttctaattttagttttttcttttaattatagttgaaaagattaattgtactttttagtatggacataaaaatgttgcatgcatattagagtgatatttaattatattctagttaatattaatgtacttatgtaaacatgacaaatcctatcaataatattagatatcttttttgatcaagaataatattagatatcttccactcaaaaaaaaaaaaaaaaaagcatatcttctaatcaaagaataccaaaaaatacatatatggttataagaatatattttgagtgaaaagatttattatgagattttttttcaccgaattaggaatgacaagatgagtattaaactctatatttttagttcatgccaattcagtttgttagagagtcctacatcgctaatgtgtggaaagataatagaatatataagaggaatgagctactcctcccattgcaaattagttttgggatggaacctcattcatcttatccccaaattctaatacagttcatgattgatattaaaagtctcattgtaatatgtttctaaataaacctattcattcatatagtatatttctatgtatctcatgctaatgtattctccacatgcatacatgtatatgagttaaaagaaaaaatagagtgagtttcgaacctaacgaaaactctaattaattaattgtcaccttgcttggcgttattttcaatttcacaatcgcctgcttctcttctcatttatacatacacatatatatattcatctatagttgcatatataaatatatgcagtttacttaatacactacactatcaagtcaagtagttatatattgattatatttgagctttccactaccttaaatttatttatttattgatcatatatatatatataaaaaaatgagtatatgatgatgatattgtattgagattctcatatttttatcttatgctatattatttttctctatttggagacagtgatatataatagttttacgacatcattatgaagcaattaaacgacagtattgcaaaaagtggaatgagattagaaaacgacatgtcgtatagtgtttgtttatttagaaaatatcttcatgcaagaagagatcatcaacttaagattatggggaagaagactaatactaatactaatactcctttattctcaccacctaaaaaattcactcctgcatctttgctccagccgccgtctcttctagaactccgattaaccccgaaattaaggtaattaatatagtaattagtagtatgattatatgttaatttaattgctaaatttactatatattgcatgagatactataatggttaatggtggttcattgaaaattatatagtataatgactatgtataaatattattttagagccacacactaatataaatttgtttgttaacttataaatttattatatattgagagagaagattcaaatttgggttttttttttaggagaaagtgtgaaattactatgtctataactacaatttattaagtttattatttatttaagttttctactagaacaatttgaagaaaaaaaacacgaaatatagataataatcaaaccaaatatttggggataatataatcaattaaaccaaatatttgggaatgtaattttttttttttttttgaatggatttgggaatgtaatttagtttagtatgtataatgtaattgcttaaaaaatataaaaattctaaattatgtaaaattataattttaataactttatatcaaggtaaattatagtattttaggtaattattagagaaaattatctcgtatggattaaatataaaagtattgaatcatatacataagaacatgagataaggtgtcttgacatggtataaccatgcgaaatggcatgccctatgataaggtgatttaagattggtgagcaaaaatattcactatcgtcacgagagattggagaacattgtcccacatgaattaaattctaataatcactaattaattttgagataaaatcatatatttttttgatagtgatcatgaatgctatttgaggatcgagtctctctgattttttttatttttatttatttatttatttttacaaatgagtattgatatttggttaaagtttgtgttctattatcattttgtttataaatttaattttttttttggtttgaaggtgtgatgcaatgaaatcaagtgtgtcgtttgttgagaaatcttcaagtaaatcacaacaacaaatcacattgttttataatggagaagttaatgtatacgacaatatttctgctgagaaggttaacaaacaaaaattcaaagctttaattttaagaaaacgacacaaaaactataaaacgacactaattgttgattgcaggctcaaaagattatgcttattcttgatgataatgatagtgatgttagagaaggttctaaattagaaggaatgtactcatttcaaaattccaaaccaggtaattactttaattattagttaatcttattattaattattattagttatattaatataatataaaaagtcaaaagatttaatacataaaaacacaattattgacttttgtactaaactagagttcctcctcaattggcaagaaaatacccaatccaatcttttcttgaaaaatgtagtcttgcaactaaaatttacataaaaattatcggaataatttaaaatataattttttttaaaaaaaaataatatatgaagtaatttcttaaatttaatttttattttttttttaaaagtatttttacaaatttatatatctacatgacctttgattttacacaatatgtgatgagctatcttggtttttaaagagattcttacgctatttgcgaatatttacatcataaattcataaataattctaataactacgtaaaaaaaattatatatactaatatcaaaatatatataatattattcatgcaaaaaaaaaaaaaaatacatgatatattattaatgtacaaacaaatgatttaacaagagaggatggcatttagaaacaccaaatatacacaaagaatttaagattactaaaataatatatatttatttgcatgctatacagaaaaatatgatcaattggaattttaagttgttacttagtagattttattgacaaaaatcaaggaaaagaagaatattttggtcttagataaattagaatttacaatgttaaaatgtatgttaagtgtttcatgattatgtcataataaattcaaacacaaaaaattaaaattgatatgaattctcctaatttatgatatactaaatgattacataataagtcatccacttaacattgaataaaaaaaatatatgaaaaaaatctttgtatatatttatgtatttaaatcgagcattcttagactaatgatattttacaatttgtatatttaattatactgcatcgtataaaattaaataaaaaattagacactaataatgtattttagtatatatttatttacttttattaattttaagttttgtatttattatttattggtttggtgacttggtttttagaatgataagcaaaaatccacatggaggagttggagtggcatcaagacccatcaattaatcatatattagaggaagagacaatattgtcaaaacgacaccgtcctcctcaatctatttcaccattttattcattaattaccatttacaaaaatctattgcaataatctactaatatcatgtatcaataataataacattatttggataaaattatatttccttttattagtggtgccttcatacaaaagtctatactttcttaatggacattaagagaatttattagtactaaattaaataaggactcacatgggtccatttattctgataagtaactcaattttttttaatattggagttgttcttaaagctaaaaaaaaattatacctatcttttatattttttagagatctatcttataaaatagggttaaaaaaataattattttaagagcaataaatattataattataaattctattagaactttgttattcatctcgagtattctgattattctgattcacgtggtggatataaggtggtcaataaatttataattaaatttaccgatcaacttgcatttactactggttcagttagcaaatttaaattgacaaataacaatcaattcttagaaaatccaatagatttaaaagtgtcttttttttttttttt

SEQ ID NO: 115853 - DNA, 2277 bp, Cannabis sativa
ttttttttttttttttgcagatatggattttaggatgacaaacctggaaagaagaccttcaggtggcacttcttccggccgtcctcaggccaaggtgggctagacttttgggtcttctaacatgactcaaactgtcttgccttcccctcctttaggtcctcccccaggaaaccaacctatggttatggatcctcctccgaggagtacgcctcccactcataggtcatcaggcaaggtagctcaaaggcatagccaggcgacttgttcatccaagggtaatagggcgatcgaggtagcctaaaattatcttggcaaaagtttgccaagtgccgatgaggagctccaagagttagattttgagaccctggattacttgatagcgagcactcttagagatgctacctccgtaagctatttatttgtctaactttttgtatgcaagccttgtgtaaaacttttctatctttttttgtctttggtttcaggttttgttgaagctcagccatgcccatgccagggctaagggctctaccataaccttcaagaagaaacttgagggccaaaaaaactgatcttaaggcaatgtcagctgctcttgtcaaggtgcaggttgatttggacttggcatcgacccgtctgggtgaggtccaagatcagtatgagtgtttgaattaactacttggtctccataaccaagaggtgacaagtctgattgttaacaactctaggttaaagaaataacttgagaaggagcgtaaggagaagtaggtggcgcttgatgggtaaccgacaattagggatgagttcttagactaatctgcagaggttttgtatgaggactttctgtacaatctaaggtcaaccttaagtatatggagtcacatcttcatgagagctctctatctcaagggaaggagctatatgagagtaggccaccgtcaggctaggccaacagagtgcgaagatactggctggccaaacctctgagatgcatgctggccagcccattggtgccttcaccggtcagcctgttggctccttcgatgaccatcctgttgagtctttggtcaaccagcctatggacgaggtgtcttccagttagcctcccattggccataccacaaagcctgctccagaagctctgtgtagagttcagttcacttggacccatttactcctgtgatcactcccgaggatatttagagaattatttttgtctttttcatgcttttattttgcacatttttttttttgttattgtatggcctataggccctttactttagaataatgttcgtatatggccttaaagcccttttctataaacaaatgaccgaccaggtagtctttaatcctagccttaacttcttttgttagacatataggtgtccaaacttactctttttatgtctaatctgatgtatgtcatttaacctgaagtgcctgcttggccatcaacccctatagagggaaaaggaaaagtcatcctggtggagcaagaagactcttcaaatgatgacgctccatctgtgattgttcagaagaatgcccctgccagcgtgcagagtacttcaacttgcatttatttctttgattttcatgctttcatatattttatgtctgctcctaactgcgttgttttatctgtgcggagatgtctcagaagatgcttcaagccttgaagaagagagcaggagatagctcaggcttgtctcctctagccaagaggtccaaggatggtgagactccatccaaggagaaggcgctagttgacgaggtcattgatctttccgaggagcgacccgttgtggaccctccagctcagaatgtcacaaaatccaagagttcaagaggagagacctcagacggatctaaacaagttaaggctggatccgaataagctaggggcccttcaacaaccctggcgctgtgcacggaggccacaagaggcaaagacatgcttcaacactacttgactcattcacttcctgaagtgagcaaccagttgtcaagagcggacagcgagttatccttagaactggtcagttttgaaggaagttactcggataaaaattcattcttttttatttcattcttttttggatagctctgattttgacatatttagtatttaccatgcaaactgatgtgaaaatggcttctgcttactcttgagccaaattagctactgtcaaaaaccttgccgccactagcacgatgcagagggatgtggacttggccaagaaggaaactgaagattgttaactcaaactttta

SEQ ID NO: 115854 - DNA, 1704 bp, Cannabis sativa
tttgtgagtaatacttgttaaaatgatacgtatattttgtgttgcaaaataccacaacaatacagagctcttattataattgaactctcttcttcttcttcttcttgttgttgttaatttcaaacttttatgtgaatgagtaattgcccacacattttaaggtaatactcaagatagtgtagaagactgtgtagttttttgttatctgaaggagaatctaggttcatatcttgatcatagtctgcaactgaaaggatcaagggttagagatcaaatttctcagtaaaaaaatgagtttggcaatgttcttgggtgggactatggtttaccccaattgatcactagctatttcactaatatttttcagggtattgaatgggaggaagtgtttaattgtgttcaactatccattacagatgctcaaaatatggaattattgcatcctattaaagatgatgaggtgaaaaaaatctttgtttcatatgcatctgaaaagtcttctggacctgacggtatgacttctagtttttaccaaaagtgttgggatgtggtgggccaagatatatcaactatggtaagaaatttctttgcaaatggttggttacctgatggtattaatgagactaatattgtcttaattccgaagaagaaaaatccatatatgatgagggatttgagacgaattgcgctttgtaatatttcttataaagtggtagccaaggtaatggctaattgtatgaaaagtgtcctttcacaaattatttcttatactaaaagtactttaattttgtgcctgatagatagattagtgataacataatgatctcttttgaggtgatgcactacttgaaatgtaagagagttgggaaaaaaaggatttaatggctttgaaactagatatgaattgaatgacctttcttagcagctactctttgtcgtacggtgtttgttgataaatggatctatttggtacttgagtgtgtgaattcaataaagtatactattgtaagtaatggtaaagagttcgatcctattgttccttactgtggtattcgttaaggtgatctgttttctccatacttattcattatttgtgctgagggcttgtcaggtttgattcgtaagtatgaggcaagaggttggcttactgtgcaagaagcgcatcgaattttgaattccattttgaattcggttcattgttttgaggttgctttaggccaaaaaataaactttcagaagtcatctattttctttagcaataacatggcatctgagactggagatttagtgtgttctttatcaagaattcttgaagttggtgagaatacaatatatttgggtcttcctagtactatgggtcataataaagatgttgttcttagttttttcaaagagcagatttgtaagcgtatcaagagttgggatggcgatgtctttcaaaagctagtaaagaaattcttctaaagatagttgtacaagccttgccaaattaggctatgagtgtttttttattgccttaaggaatgtgtgacgacttacaaaaattgatgagtaagttttggtagaaaacttcttattcctaaggtaatgatatttactagatgagttgggaaatgatgtattgttatattatttattaaataatataatatttaagattaaaattgtgacatattatatataatattataaatataatatata

SEQ ID NO: 115855 - DNA, 2833 bp, Cannabis sativa
cacccctggccagtcctatggccagcataggctggccagcctccagcaaagggtagcccggccagtctctcttctggtaggcacttttggtgcctctacacctttcaacctaaacaacactttcagttacgaattggcctcaaacaacccacaaaaataggggtttaacttcagttatttacctattctttaggtataattaataagttattttgttatttatttaatgtgtaataaataggtgatatctcctcattttaagggatatcaacctactatttcttgtaacctctctcctatataaagagccctaaactaaacctaaaggctctaaaccttaaattctgattcctaagttctcatccttaagctattgagttcaagcactcaaaatcctagctcaccctctctcctacacgccattagaaatgtagtagagactaagtctccctcatctctcttctttaagatttgcctcatattctcactattttaatacaaagagagccactctaaaacacacaacacttgtgatctgtgttgtattatctctcatatcaatacaaccaaaacgggagtaggtcattacttgctaactaaggaggtcgaacctctacaaaaaaatataccattggttggccctttttatttacttgttctaattgtttacactttttgattttgatcatatatatgacttcagtattggttggccaaatttgagatcaacgggtttatttaaatataccacataacaaagatctgacaaaagattttgtaggtaacttttttgaaagcctaaaaagagttttaccagtaaatatttttctctttatcacataagaaattgttcttgctcatgtgttaagatttatacaagaactttatatacactttatttatcctagtagcccacactactccttatatgtggtggatcgatctggaagactacggtgtgagatttattggatccaacttacgagaagtttcaagaatactctgatacccattaaggggtatttatttctttcatcaaatttatattttagatttaatgtatatacatctagagatccttagaactatggtacaatgatattcagaaaattattattccactgcgtacctgagttagtaccataaaaccaatagcggtacgatgataatcagaaaatattattctactgtgtactagatttagttccacaaaaccaacaagcgcaccaagctatacgtcaacctaggcactgggtgctctttggggggtttctcggggcttgttttgatacttatatggcatttgagattgcaaatgaggtctcctaccccattttttaccaaaataagaagaatgcccatagtagaatttgtatttgaggaccgaaaacatgcgaaccaagttgcatgtcaacttgggtgcagggcctagtgcccatgtcaaccaaggtggtggggccctattttggctctcaaagaatcttgtttgccccccgagatctcttgtattttcgttattttttaaaacaaaaaacatgctcggaacactttcgatgaaaacacttggaactggctcagtttcacaaaatgttaaccttggcgcttggttccaatatttcccatcatatgcttacgtttgattcctagaaacactagtatctcaattattggtgaaaacagagaatatgcctggaagacttctcgggagaatgtttagaaatggctcaagttgacaatatgtcaacctgggcactagactaagcaccagatcaacatgggcgttgggtcccagttctggttcctagatggctccttttgtttcccgaaagcaccaaaatgttaattgttgacgagaacggagaatatgctcaaaagattttcatctgaactattgttggaaatgggccaggttgacaatatgtcaacctggtcgctaggtcccagtttcggtctccaggttgatctgtttctattccaaaagtacttgattccacgttttttatggatacaaagaaaatgctcgggatacttcgtcaatattatggttggaagcgcattaggtgcatcaccaaatggcctggggcccgggtgccccaaacagaaagtgttatgattctgattttgatgcctctaacatgttcgtgtcaggtcttattcatgtctaagtaaaaaggtttgagctatttgcactaagactgatttaaaagcaaaaagtattgaaaataaaaaggcatgcattccaacacaacatccataaagtgacgacaaaaagcaaattttagtgtattgagaacaagaagagattaatgaggtcgaaaggaatataaaatggacaccatggacatggatgcttagactatattttttcaaaagggagacatttataaaggtcaataaaattcaaatggttggacgtccagagttggttagtattttagattagtgttgtaaataagggtagaactttcgacacattacaagcccggaaggcacgggcacaattaggcatgaaaaatatggacttgggtacaacacaatacaatactataaattggcacaacaccgcatggaaagtatgtaattaagcacgacacggcacgaaaggcacaacacataagtataaatagactagctcaaaagacacaacatgcaacaaacccaaaaagcacgacacgaaatattaaaacagctgataatttaataataatatgtacttgtcaattataaacaagttaaaataataataaaacttaaatataacactaaatattgtaattctataatttttggagttttttcatttttacactttaaacaattttttttttttttt

SEQ ID NO: 115856 - DNA, 2817 bp, Cannabis sativa
aagtgacataacacgtcaaatcatccctttttaaagtattattttttaaaaaatgaagaggctaaacctcatgaagacacctataagccacataatatatgaaaacctataactaatggacgtatttgaaccaaggcagtatactgccaaattaaaaaaaaacagtaaaaaagttatattcaacgtgtcacagtataattgaaagaaaattggaaaagctagtaaagcatataaatttccctattgatttggatgggccctatcatgttactaggtttatgacacagatgaaagaaaattaaaaaattacatgttacaaactttttatttgatttattgacaattaactatgattaatttggatcattgaatccatcaacaacttaatcatagctatttaaatcaaataaattatatgtttgttaaaaaagttaaaattttaataagcgaacaaacatgaaacaattaaggttagttgattaaaggattttattcattttatatctaattttttttttttaaaaaaaaataaatcctaatttgaaaattcagggttgttacaaccctaaatatatattcaaaaaaaattaactaactatcaaaatttatgtttttttgtaaaagtatatatgattaaaataaatatctaataagataaaatggtaaataattaatatttttctaatattataatttaaattaataaaatatattcaaaaaaactaaattttcaaagcttatatttattgttggaaatttaacaaatttctagattaattttccaaatttattattattttaatgtcaaacaagatcatttcatatttttattaaataaataagtaaatacaatatataaatatcagatcttataattaaaattaataaaataaaataataaataataaaattttgaaataactataatagcaaatttgtagaaaaaatcaatttcaaatttaatgtctcctaatatctaaattcaattttagttaataataaaattagtaaaaattaattttaatttgataattagatttaaatttgaaaaagtaagaatctacataaaaatctaccaaaatttcaattttatttcattaaaaaatgatttttaaaacttcaaaaattaaaaaattggaaaaattccgacagtatgcaatgcatactgtccgcgagcactaggggagacttgatcaaggaaacaccatgcaagcatggtcatttggggcaatcgggctagcgttaggtgatactgactaagttttctcgtacaacttctatctgaatcgagcttgtcatagcgagtggcccaaaatatgaagcctccatgcgtatctagggtctcaccctattcaaaatatcaaaactttaaaaaattatatttttttcaattttaatttaaattaagttctgtaaaaggctaatttacttatttttgaaccaactttccaaataaaataattccaaatcaaaaatcaaattatttttcacaaaacattttgtaatatcacaatcaatgattaaactcacataaccatcatgaagacatccaaatcattcaaaaaattattttaaattcatacttcatgaaaataaattattaccatggttctgagcccaatttctagaaattattttaccaagatctagatttactaacatgtatatttgattataattgtataatctaatattctaaatacgaaattcctaaaacaatgaaataaacatgtaaaagttataaaaaactgtacaatgatggcaacagaataatatgaatccttatattaaaatctctcactgttgatcctttctgttacaaagtatgatcgagatctgaacatagattctccttcagttgacaatttgaactacataatctttcttactatcctgagtatttctttgaactgtgtgggcaatttctcaatactaaggaccacaaattttgagtgagaaatacaaagagaatttaaaaataatggatagaatatattaggttttctttttgatggaatatgtcagacaaaaaagagtcttaggttatcatttgaataaaaaacactatgttctatttatagagattcattaggtttagggttagagctaaattggcttattttaaagatccaatagcttaaaataaacctcatggctaaaccccttatgaaagcccatgaattaaatttttgccattattgtgcttccttaacgaagcaaatttatcgttcttcagtaatactattttcttgctctagttatttaaatattaattctatctctttaacaattgtaaataattatcaaataaaattactatttaaatatatttattaattagaccttacaatgtctcttaattaataaataaacctcaaattctcttttcttcttaattatgcctttccttagtaaaatttacaaataagatatagtctttatttggaatccaaattgataaaataaatcaattaattgagactacaaaacaatattatctcaattagtgtggtagccataggcctatgtaactaaactctcaataagtagttcaaatttaccaagtaaattctctatcttattaattcctcctgactccattataaattcagaattacacttctgattatatagaatgctctattcaccaagaatagatacgttataaattatttattgtttcaatctaaataatcaaagatcatcaatagatgttttacatgaagtagggacaaatttaccgttctaccctctaatgtattttatccttaaaacacttagcttcttataaaagatattttcagtaaactaatataa

SEQ ID NO: 115857 - DNA, 2029 bp, Cannabis sativa
  modified_base (104)..(114): a, c, t, g, unknown or other
  modified_base (2002)..(2003): a, c, t, g, unknown or other
tattctgctgcagtcaatgtaaggatttataaactcttatgtgtttaatttcatcgtattagagaaaattcatatttagggtgttaatgaaacatacatgttannnnnnnnnnntcctggtaaaataaatcccaacactttaatacattgtactaatttaacataggcaacaaatttgatctctggaaatttccaatgtacccaagtgcttatgtatttgtcttaacaatgaaatattgaattttcactttacatacgatattcatcactctttacatgtctgttttacttgttcactatacttgtcaatcgaaattgtcaaagtgagcaaaacagctcaaaaggaagaagaagaagaagaagaagaagaagaagaagagaggaaacatatatgactatgagagggacgcctctctaaaaggaatatcagttttctagtattcaaaatgtgctctaagtgccacgaatgtagaaaaagaggttaagcgatgcccaagaggccacaaggtcccctaattaaataattacacaatataaggggttgagttccgcctaagaggccacaagctcccccaataaattcttaaatcctaaaaaacgttaagcacagcctaagggccacaagctcccttatatccaacgagtaacttataagaggtcgagggtgcccaaagagtctatattccttcaataataaggttacactagaaaagagattgagaaagcccaagtggaaaaaagctccctcaagcaaagtaaaagatcataaacgaggtcaacagagctcaagaggctaaccctccctccacgtgacaagtacccaccatgaaaatggatagagatagcacctaagagccaacactcccgcaagaagggtctaaacaagaagacctcaaggcataagcgttaaaagggataactacggagctgaaagatggggtcaaagctcatcggagttagtctacaagaacacttaaacagattcttataaactagggggcaattgtttatcccaaaaattagcaaggctaactctcgagattagccgacgcttaaccaaaagatcaacatatgtgcacccaaaagatctctttgaatgtaaggttatgcataccatgtgttaaccccaaaaatcgacacttatgattttagaaacttatccaagcacatcgaaggtcgaactcatggtcgtccatgaatggaatgttggggagatggggagatgagggtgatgatgttggtgacttgggggatgaggaaatgagggtggtgatgttggcgacttggggagatagggagaggagggtgatgatgttggcgacttggggagatggggagatgaaggtggttatgttggggacttggggacttggggagatggggagatgagggtggtgatgttggtaacttagagagaaggggagatgagggttatgatgttggcaacttggcgacttggggagatgaggggtggtgatgttgatgacttggggatatgagggtgatgatgttggcaacttggggagatggggatatgaaggcggtgatgttggcaacttggggagatggggagatgagggtgttgatgttggcgacttgggtagatgagagtggtgaagtaggcgacttagagagagaaagctgagagggaaatgagcaagaaagaggttatatgtgaatgaggaagtggttatgattcttcactcagtatgcatcaagcatgcttgttcaatgatcaacaatcactgaatttttccctaagtgttaaacatagagtcgttaggccaacgatcaagaacgcaaggcaagaacgcaggcgggtacatgtcagggtacacccatgatgcttgcatgacctgagtacgagtagtggatgcgccactactacaagccctgacatcctgaccaagggtgcacaatagccaccacctctactacccgggaccacttgacatcaaacaaaggtacaaggcgtaagactactgttgggttttatgccctnnataaaactctttacaatctgattagt

SEQ ID NO: 115858 - DNA, 1646 bp, Cannabis sativa
  modified_base (1483)..(1490): a, c, t, g, unknown or other
aaaaaaaaaacaaaaaaaaaagacaactgcgagtggctaagaatttaaaagaaaaatctaataaataagcaattagttaattatagtgatacactcgtgccacactaaaatacctataaactaatgtcactaaaatcacttaccggtaataattattaagtacttaatcttccttgtaaaaccattactttgcataagaatttaaagatattgaaattttgaaaacaaaatatacaatttgactaccatttttattatatttaaagaattggtttcaagataaataacgccatatcaaaataatattaattaaacaataggtactttattttgttttgttttattttcttagaggtaaatgaaaattttcaatttaaaaaagaaattaaacatattttattgcatgtagatatttttcaatgagcataatcaacaaaaatatataatccaagccatttatttatatagatagaaggaagaaaactctaataacaccttccaattagctatcaatgatgaagcatacaaaaagcacaaaggatagttgatttccaaccaaatgaatttgtgacaaatcaaacttatcagtgactatgagctaaaaatcttccattaaaaattagaaaatgataaaccaactaccaaatgagaataagaagaaataacaaaaccaatcatgtttatgataatcataaagaagaattgatctggtgaacatggccttattaacaatccgagagattaccggaactgaatacgaagaggtgtaatcatgccactcacaccaaagtgcctcgagttatttgagagcatgccaacggcccaacaaaaaataagactgaaattccttaacacaaacaaaactagccccaccacaataataatagtagagtggtgtcgcaatagtattattaacaaacaaacaaacataaaaaataaaacaaaaagaaaacaacccataaataaaattagcacatgccaagagaaagcctaaagacccctaagagctctgttccctaacataatttttttggacaaactcccaacaccatcaacctccacctaaaccaaatcaaaaccttgactgtcgatcaccacaaacccaaacctaaagctgttaggttgtttttagtattatttttaggttaatttttagtgtgtttttggtttagttatactcttgtttggagcaattttacgcttttcatcttttatttttacaaatttaaaatagaagaagattagaaaatatcaaatgaattagatggaaagaagataaaaaaaaaatcttacaaaaagatgatatataaaatagagaaaattgtgcatgaaaataaagctgaaacttcaagcctaaattagactatattctgatcagattttggagcaagtcgaaacataaaagttctagatctttcatttatcttttcggaacatcttgaatcgtccaactctgagtaatatcgagagagttatggccaannnnnnnncagtcaacgcaacaaaaaactcactgcccaaataaaggggggaccgcacctaggcatggaaatcccatgtcgcggcttgccccttctattaatcccaagcagaataggtttttttttttttttgttttttagcattttgcatcttttttttttttt

SEQ ID NO: 115859 - DNA, 1780 bp, Cannabis sativa
tccgatcttatttagggtgttaatcaacatacttgtcagtagatctaagatcctggtaaaataattttcaacacatgtaccttgaaccgattcttattgtctgtaatcaattcagttactgtctctggatttgtcatttttagcatatgaaagtatattggtagttgctggtatgagtcttcatggcttccccttgccaaatttagagcattttctctttttctccaagccttttgatatcccatcgaaacaccaaactcgtgtagcaagtacttcattatgtcattcgatgcatgtttcctattgattgagttgtattttatctttactatttgagcaacaatattgtaacttgctttcctatgatcttccattatgacatccagtgagcaggtgtagttgttgacatattttctaaccttgaaaatttgtgtttgtttcaattttgaagcatgcagaaaccagttacatttttcatccacacaagtaaccatgtactccttgggttcagatctcttagttctgatttggaagttctttatcattgcataaaaattgattgttgtttttagtatgttcttctcactatatatttgtccttctttaatctcaaggaccatgtaatttgtgatgatctccttttcttcatcctttcttttttagttgcttcatttgttttctctctaataaaatctgcaacttctccagctagttaaaatatgtttggaaagcttgctatctggttatactcagttgaatccttccttcattattagatttctagttgtatggttcactgtgtatttatagaaccagttcttccactgccttgctttgcacttgcattggttattccaaagaaggatttttcactatttgtatagctgtctcttttatagttgtgatgcatagtggagactcaattactccagcctgtatctttctgagcttaatgtagaacatgagggaattgtcattcagtagcttcattggtgttgttcccagtgatatctgatatgatatgtctatgtttttcatgttgtattttatctcgatttttatcagctcaaccaaatttactagtgaagaattagttggaattagtattcctatcattgtgtagtcatcaaaacttgttctgtctgtctattggcctccatatttgatcacacacatgatatgttccattcctgcatttcaaaatgaaaagtaatattacaatatcagtatcagttgataattggaaccgtttctttaaaattctgtattgttgtttaatttcagtgtttgaacgagttttgtagtgtaatctgttttctatacatatggtttttttttcttttagaactggttatacttagtattttgattatatttatatatttgtttattatatttatcacattatatcaaattttatttatatcattaataactggtttgacaattatgtatatatgaaagcatatcagtttgtattcaagtatgtgctttagtttctgtctttatttgcttagttcatctaatcagtttcattttgtttttattttacagagaatttataaatgttcatttgtatttattgaaattgaaatttttaattttgattgaactttcggatgatatacatatatttttatatatcctaggttcataatataatattttatgaaaataaattttctatttatgtaaataaattttttatttaaagaaatgattttctatttaaggaaataaaataaataattaattttatgataaatgaatattttatatt

SEQ ID NO: 115860 - DNA, 2327 bp, Cannabis sativa
tgtaataaattattttattacctaccgatttaaaatatttagctactaaatttgactcacacaattacatagctaatactttctattaataaataaaaaattgaatttgctaccaaattatggtagctaaacaaaattaatagacaaaaacattaaatcattttgctactaataaatattttttgctgcaaaaaatttaatagcaaataatgtacatttgctaccgaaatttttggtagttgaacacttttagcgaccaggattcagctacgaacaagctaccaaaaattttggcagcgtaaagttttttcgctaccaaaaagatattattggctaccaaaaattttgtaggtaaaagacatttttcttgtagcactgggtcttggattggtagtcgtcagttgattggtggtctttggttggaggtgcggtggttgacaactgccggttgccagtgtctttgtgtgcgtggaaagtagagagcgagagagacatatagaatagaggaatagaaagaggagagctgagttatgagagaagtatttttgggtttaataaaaaagtgacctatctaactaattttaatatatttatatttaatgtactaattttatcctaatgtatgtgtaaagtcttttttttttttggcaatttaagtgtcaaaatattttttatttattgtgtgatttctttatgcaattaaactgatttgatctccttgatattgtgtctttattgctcttttctttcaaaggaaagaatcattttttagctacatttttcttattttggaaacttcttgtaagagaagaaattctcttatggaaaattaattttatttggaaactttgaccatttattttcctccttattatgatcgattttgtcttgataagatcagatcaagcacactgtttttggcaggaatgaagtccatgttcatgatcgggcacctatttggcaagtttcttttctggtctggtttgctgctgcagaaacctgattctgatgctgcaaaataggattttttttatgacagtttgtacagttgtggaatcgattttgtggttatctctagggttgctatgttctataaatagaacctagagagcagtcaatcagttcaactttcttgctttcattttttgcatatttttcttttgtgaagagagtgttctttatgtgagaacctagttgttcatctaggttttagtgtttatatatttgttcttatactggtcttagagtcggttagaacaacttgtttgaacaaaataaatgtctttgggagaagacttgtcaagtcttactttgggaggaagtaagcactcacacattaaaaacgaaaggagttcgatgtttgatggtggttctgaaatcagattcgtgaagtgtattataaaggattacgacaaagatttagagggagtctaaacttgtataagtcaattgtctttgtaattttttgagactttactagttaatttctttctctgggcgtggtcccgtggactaagagtctacgaaagaacactgataccgcgtacaattttcttgtgtcaaataattttattttctgttagtattttaatttatgatattttatttctgattctagtttgtttctgcaaaactgtgttctgcagtgataaaattacattttgctgctacagtatttttacagttattgtgtaaaaaattattagtttttgcaaaaatacaatttttcagtacgaatattaattcaaattttaaaactaagtgggttgaagcatataacatcaatattttcacacgtgcaatttcagaaaatggagataattggagtatgggacaaaggcagctggtgagtgtgtgtgcctttgccaagtgctactcaaaagaagtaaaattttggagttagatgaagctagagataatctgattcagacaactcttagaaaacatttctataattattaaagtgaaaattcttcatttctataatagattgctcagcttgtagcagagtactctgttagatcaatttccaatgctgataattaaattctagttctataatcacttttttttttttttttgtctttttcttacctggtaaagggtgtgtaagcatctatttatcctcttgtgttaacaaaatgtcagtatgattcaatatatcaatagtgtgttcattttgtgcattttcctagaaaagctctgtacttttgttttttcacttagtcgagaataaagtggtgtttggtttgttagacttttatttgggcttacattaaattttattggttttattaaaacttgggttgattggatagttctttgct

SEQ ID NO: 115861 - DNA, 2342 bp, Cannabis sativa
tttgtaccattttaaaaaatacaatatctattttgtcatttaacaaaacagaggattcaattgctaacttttacaaaacataggatccaatatggtatttacctaataaaatttaagggctacttcatttttacatttgaaaatagttttttttttttttgtatttttacgaaatttttcattgaaactcctattgtaactagcaatgcaatataaattacaacaaaaaatcgtatagtaacccatatagaaaccaccagagaaacgattttaaaaactcaaatcataaatttaaaaaaaaaattaaaaaaatattatatgaaataatttctttaaaatttaaaattaagtgtatttttatattttgtttttaattaattttacttttataataataaaaaaaaaagggggggaagaagagggtgggaagaaaagaatagagaaggaaataaaagttggtcacgtgaaagaccacgcgtgtgtgaaggttaccaggtagcgagcgaatcactgtatgagatccgttgaattgaatcagagatagttgagtgggtcccactctctactcatcccaatccttccgtacacctttatccatcttcattttcacccccctcatccactactttacccttctattatattcaaaattttatttcttaaatttatagttagacacgtgtatcattcatattatagttttattgtctaaatttcggtagcagatttatcacatgtgattcacgtttaaaaatttagcagtctatagtttgaggaaaagtcttgcgctgattacgaatatctctatcataaattcatatgtaattataatcacaatgtcaaaataaatcttatattgttaaaatatatagaaaaattttataatgctcttttttaaaagaaatgtaccgatgtatttatgtttgttttgatatctgaaataaaaattttagtcaaattttttctcgtaattatgtatattatagttatttaagacatttagtaaaaaatttaaaaagtttaagactctaaaaataacaatcttcaaatagcatattataagtgtgactattttattttatttataattttttaaaattttataaaatatcttgatttaaaaatatcttaatttaaactaaaaataaattaaaatattgcatcactacatccattataaaagctccattatatatgaactatataaatttggccacatagtagtcatcctagtcttttcattttctctcactcaattaaactaaccctaatgttcactagttgtaatcaagcaggttttttggattttttattttttttaaactttggttttgaagttgtttaaacttaaatctttagttttgaacaagttttcttctcctgtggttcatccatgtttcttcaaggataaattttttaaggtaagtacttctcatgaaatctcaactctacagtcttcagtattcgattgggtaagaaataaaattagaaatggacaaatcttggattggtttaatgtcattattagcttaaaaaaacaaaaatggttgtaggcggcatagggataatcgtgcttttgagattttaaatttagttttttactttttacatttattttaaattaattattaggtaaaaaaaagtgaaataatttggatggtacacgtgtccattaaactaatagaagttagtgtgtacctataaaagttttaaaaatactaaatagagttttgagtattaatgctgcgatttttaaaaatttaatatttattagaaacaaatcaaacaagttgaatatttatgtggcacattttgttttatttttcagaaatttaattataatttaagtaaatgatatagtgcacctccaaatggagaatcttttaattaaatttttttatagttgtatatcttagaaaaatttaacactttaaaaatagaatttaaacagtctaatacatgcacgattcttttattttatttgtatgtgtaataaattatttgaatattaatttttataaattattttaaatttcacaaaattttatcttaaataactaacatacatcattttgaaaacaaaaatagaataaatatttttcttgcataccaaaatagtagggaatatatcggcctatttttttggagtgtattgtacaagcgccttataatttagtttaaaaaaatagttgagaagctccaaaaattaaagaatttatactaattctaatcatgagtttcgacaaattagttatatttttaaattttttattttgatgcattaattaaaaagattcaaagctatttagaaatatacagtgggttttacaataaatatgcaa

SEQ ID NO: 115862 - DNA, 2455 bp, Cannabis sativa
tattttaagtattaaaaagtaaaatagacatttgctttattattttaaaaaagagacattaactatctatagagttagaaatagaaccatttatttacatttctctttttttttcttccagaagttatgaatctggcccatcaaaaagatcttaaattttagctaaatcaacactttcttatattgagtattttcactagtcactgtagataactaaataaatatattagtagttctagtcttttccataggtaataataaaataataattaacttaacatatgtagaagatttcaaataaacaaatatagcaccttaacatatatatatagaatagatatatataaacttttcagaggtaacaactaaattgacattaccgtggcaattatttgtaaattggactacagcaaattgtcactattaaacaaaaatagtgacctaaacttgagcagtctaatgacatttattattaaaaaaaaattaataataaaacaaatatgacatcatattagaaaactacactaatacaagttggaattttcaaagtgaggtttgtgtgtatatatatactaaagaaactgaaaatcaagttgatgatggcaaagaccttggttcaatattaaggagacaattaataaagtaagtcaatgtcatgcttgaatataaagtatgtgacaaagttgaatatttaaaagcatttctagtcattctcttccatctatcaaaaacttccaaataagtaggttagacttcgagtccaaattccctttcaaaacttaaaaaatattaaaataataataataataataataaagttaaaaataaaaataaaatgaaaatgtgaaaagcaactcctcctatttgaataatatgatgatctttatacaaattttcaaaaaacccaccatcttatcgcttatcacataataaattattactgatcaaccacttgctacatatataatattatatataatttcatgtataagcagacctgaatatcttaaactgttgtcaaaataataatatattcttatttatttatttattttcattatgttaaatataattttgttactgttgtttgtatatgcaagttgcatggtcttttctttttcaaataatttgatgatggcagatattggttagctgtctacaactcaattatataggataagtattttttgactggagggttctttttatattataggaattaatttctatatatatacatatctaatatatatctgcagccaaaatatttgaaatttatttatttatttataattttaagaactcaattccatgtatcaagtactttgatcaaatgatgatatataacatattttgatggaggctttttgaattttgatgagcaacattgtctagttatataatttaagaaacttacttcatatatccatgttatttttctaaattttttaactaattaataattgggataatttaaaaaaaaaacgcacgcaaaagtaacaaaaaaaaattataaaaatagagtttgtacggagtttttaatatttttacggtttttaaattttatttacctaaaatttgattttttttgtgtatttttatgttgtacacttgttattttgttgttgagtttttgttatttgtatattattttttatgttgttttgttattgttttatgttattttcttgttacttttatataatttttttgttatttttttatatttctataaaataccgtaaaaatatagaaattaattaaatgtaaaaatgtaaaaattttacaaaaattaatattttatgtaattatccattaataattcacagatatgcatggactctttttaggatttttgatggtgttgctctcttgaatttgacacaatggacaaaatattttgttgaaaaataactaattaatttggttcctaaatttgaaaatgatgaccattaatactaatccatatcattaaatttagaaaaatttacatctagtactatttttttttttatggtttcttgataaaaatatttatttctgattttttattacttactcaggtatatatgtgtagttcatataacttggttataagatgttgatataatttttttttcttcataaagatcgtatttttttagtcaaaaattatattttcttaagttaaaaaaaataagaaaatcagacgctatctgaattttaacgttgccatcttaaattatatgtagaatttttcagaaaatatgttaaacgtattttgtaactatattatctgccctgataatttattcattgccgatcaataaagcaatttttgtgtttgtctcagttatttttagtggcaattttttagtcacaaatataaattttttgtgattaaatgtgatttttagtcacaagaaaatactatttgtaacaccctaactattctaggcgtattacgtgattttta

SEQ ID NO: 115863 - DNA, 2501 bp, Cannabis sativa
gggcctaaggcggccgcctccttcatcttagctcagggccgaccctgtaaatgagttatacgagtcttgtcgtgtgttaacctgtttataaatgagtcatgttcggattttattttttgacacgactaataaacaagttatgtttgggtcaagcatatatctgccgtacatgaatcttaacaagacacgaatacgactcagaaacataaattaccaccctatcaaacacccaactactccatcatatatatatatatatatatataaatttacattatttaaaaatataatattttattttatctctcttttacattatttttaatgttttatagaaatacaaacaagtgatacaaatgtaaaaaatatagttcattttattaaaaatctactccaataatgtgtcaaattgtgatacaaatatgccacataacaaaaagtaattcagatttaaatcataatattacatgatgcaaaatttaaattatcacaataaatattatatttttatatttactattatgtcattttaatattttattattaaattttaattaatatattattttatattaaatgatttgcattattactattaaattttatgtttacttttgtgttattattattttatactttttaataaattattaagtgagcattaaatgacatattaaattttcatcaagatttacaattatgtaatagagcataatataaaaattgatataaaaatatcacaagactacttgtactaactcaatttgtatatttctcgttgaaaaggttttacttttaaaaaaatactacaataagcattattcaagaatattatcattatcttacatattattatttaatatattattgttttattttattataaatattgttaaactatttttttttaaagaaaattgcactaaatttaaaaaataacttctcaagtaacataattataattaaacaatctagcttaattaaaaaaaaactcataaaataacataattagtctatataagcatattatgacagaatttcgattgtacatgggggttagtagataaaaaattaaaaaaaaattgggttgaattgctaatacaataaattagggttttgagagttagtatatgaaattttttgagaattttgagaatttttgtaaatctattatttggtaaaagaaattgtaatattgaattgtacaagaagaattggtatgaaaaataaataattctcaataataatatataaagaaaatagaaaaaaatattaaatttaaaaataaacttggtaaaaagaaattattggtgtaattaattttatatgaaataataatataataataataataaccaaattttgagtcattatcatcattaattatcagtaaatatagcatttattctcttgggttcgagggagagggggagatgtgtccacacatctaccatgcatgtatgtatttattagatatttattattattagaaaatgaaattaagtttgtggatgaaacacaacactatactattaatctagcttcttccacgtctcaaacacccaaccaatccatcatatattaatggttccattaataatcttagcatttttttttttaaatgaaataatttcattaagaggcaaaaagctaaaaaagagtcaagtacaaaaaaccctcaataattaaacaactaaactggaaggtccgactacaagacacgtaatttttatttagatcaagaactctattattagctaaagaatgaacaataagatttaaaccttagataaaaaaaaatactagtaaaagacttatagacgtgagtaatatcattaagtataatagcaaatttattgaaatgtgtgacatgactatattagcctcgcgcaagcaaaccaagaaagtagtgacaaacgtataatgaattgtagacgaagggagagactgtaaaacaaagccttggcctccgccatgcgaggctcaagagaacccacacttggaaatgcatcgaagaagaaacacatgcccattaagactagacgccaaccctcatcattgtttaacgctcaaatgtgacttccactagttttagttgtagtataattaaattggacggtcgattctacaaggaggcgattttagaaaaaaatgttaatagaaaaataaaaaacaaaatgttaatattaataataagtgataatagtaatcaataattttgtaatttttgttttggtaataaatattaaaagaaaccaaataaaggtgtaattaatagtaaaagagaaaaaggcttcaagaatcatccatatatttatttagctatttgtatatttaattcacaaaattgacacaaataatataacattaaagttcatcatattttgagtatacaagctcttgaaaataaaagaaataattaatcttatgtagaacctcaaaatgacattatacatcaagcaataatgtaataaaagattaaggttaattagcaatttttt

SEQ ID NO: 115864 - DNA, 1499 bp, Cannabis sativa
ttcttttttgaaatcaattatcaaatcaaagaatcaatgtttgtgttggaatttataacaatcaattatgaaatcaaagaaacttattgattttgattaatctaaaaaatcatttatgttagaagtaatttaacataaattctttaaatgtacgatagaattaataatctcttaaaatgggatatgtcttgtcctgtgacatgagtgtgctgtgagttgtgagtgggtgttgtttcagattcattctgttgtgtgtggggctttgttgtgcaagtgtcttcgtggggtcttggttccttatggcgtccactagcagtacggtcaacgatcttgaagactgctatgcgaatattcatctggaagaggaagaggatgaggtgatttcactgcagatgttgggcagccaattgatgatcgctggtgcttggttggaaaatttctaacgagccgggttatagactttttggcaatgcaacatactatggcatctctctggcagccagggaaaggaatgttcgtcaaggagcttcaaaagaatttgtatctgtttcaattctatcacgaggcggatatacaaagagtcatagaagggagtccatggacattcaataagtttcagttgattttcaaacgtgtgaaaaagggggtcgatcctatgtcaattaaactatgtcgtctggatatttgggttcaattgcataatctcaggcctggtttcatgtcggatacagtggtgagaaatgttgccaattacattggcatatatgtcaaatctgatcccaagaactttaatggcatctggaggaattatctgagagttcgaacgagcaaagatatagagaaacctttaaaaaggcgaatgaagttgaaaaggcctgatggggattggttatggacgaattttaagtatgagtttctcccaactttctgcttcatatgtggtatcattggccactctgagaggttttgtcatcgtatatatgatacccctcttgaatcaattagcaaaccatatggtttatgggtgaaagcagatcctccgaggaagaacaaactgattggtgcacggtggcttagaacagggacggatgcagatgcccagttttttgatgtaggtggcaacggtggagataattcatttaatgatgcagttaataccagcacactaaatcagggagtgatcgataataatggcaaggatacagcagttgattctatgcaaacatatcacgtgaatatgggaaatagatataacttgaatgtggagaacaatcagggggagattggtgtggatttggctagaggtaatgattttggtagaaaggatttgaatgatcgtaatgatatggaaaaagtcaatcctcaacaagaatctattgagataattgattctaattaagcgatgagtttgaacaaaagtcagcaccaacaacataagactttggatgatgagcttggggagaagccttttgtagcttgcagaggatataatatggtgt

SEQ ID NO: 115865 - DNA, 1152 bp, Cannabis sativa
aattgggaatattctgttaaagttaacggaggaaacaaaataatatcgttaaaccaagaattgacgttaaacaagaattgccgttagataaacactttgatatataaacaaatctgtatttaaataagaagtgaagaaaaagtaataccatcataatattttttttttttatttttttcgatttacactatccataattaagaccaaacacggctctaatataaatcttttacagttattttcctaagcttaatgtgttcatcttcacctaattatcaatgtttgatacaactcatgttgtgtttcaacaacaacctctcaggaagcatataacacaataatccaaaaaacagaaatcaataactataattgaagaaatgaaaaatgacagaattaaagaacacaaacaaaattatagaagtttgaacttattctttcacaaaagtgaagagcttagttccctttgaacttccttattagaattagtctttattatgacaaaatggcaagattacaatttagagcacaaatatgatgaaatacttcccttgttttagccttaacctgagaaccttgaaccccttggaataacatccagaagcccgatccttgcttccctttgtttctcacttttagttcttcataactccacgaatttttctctctaaataagtattctctcctcaccatacatagctctctctctctctctctctatctatgtttttctaagttacaagtgaaatgaaattgagagtttaaataggccactacagtcggttaagcctttacaaaaattacagaaaaaaccaatacaactaacttaactaactcctagttagatcttcataatatatgtcatgtttcaacttgccatgcatgtcattagttttagatattggttttatttaggattgaataatcaataaatttcaccttagtaattaataaaacctagctaagaaacttaccattattatcattatatattaatgcaaacttgtttgaaagaaaagtgtgttttaaaagaaataataaagttaatgcaaattatatatatataatgtcttgttggataggttgaagacaaaggatagagtatgtcggtatgatccacaggttgatccaacctgtttgctttgtgggaaggca

SEQ ID NO: 115866 - DNA, 1267 bp, Cannabis sativa
ttcaaaaaaaaaaaaaaaaaggtatttgaatgaattgaatcaagacggaacttgcaacttggtacaatcacctactcagcatcctcagatgataatttgccaatcactttcacaaaatatgacgccaagcatgtacattttcctcataataacccgttggtgatagaagctcaaatcgtgaataaaagagtccttagaattcttgtagataacagaagctttgttaacatcatttttaaagatgccttcaaagccatcggtcttgtggaagcaaatttattaccttgtctaattcaactgcaaggcaacacctgattccaatgggaaaaatacaacttctaatgacaataaatggggtagtctcttgaagcaatgacatatcctcttccaagtacaacacctttatggtagttgattgcccaaagacttacaacgctattttgggacgaccatttcaagtttattttggggcagtaacatccatctgccatctatgcctaaaattcctaggtgataccagaagcattggaatgatcacatgcaactagaaaagtacaagaagatgctataatgtttcaattatacaccctggtctatttggacataaagaaaccgaatcattcatggaaatatggctaaaccatctattcttcttgcatcctttgctgtcaactatttaaaaattttagagcagccaagatcaagtatcatccaacatttagcccgaccccaaacatctccccgtcggtagcagttcaacctccatggaagtcgactgctgaaggtgctctgaagttgaatgtggatgtcgctctcaacgccaatcaaaatattataggagttgaggctgatgtttgagactcacattgccaggtgattgctgcacttgccaagcctttaattggaaatttggcttttcatgaaatgaaagcaaatgcaatgttttacagtctaaattgagccctacaaatgcagttgcctattgcaatagtgaaaactaatgctttactagtttcaaatgctttgagaactcctactcaacaattacttcgttcaaagatttaatcgtaaatatttctagtcttttatcctttttccctaaagtgaatatagtccatattaagcgttcagccaataaagttcctcatagtttggctaaatttactttagggatggatgaaacttgcttttagttggaggatttactaaagggaaatttgacaatatatgcttaaaaataaagagtacactaaaactatgctagcat

SEQ ID NO: 115867 - DNA, 1118 bp, Cannabis sativa
aaaataaataatatttaaatttttcaattttttattttattttaaaaaatattttatatttatatttattattaacaaacaatatcaattaaatttcttataaactacactttttttcttttacaagtgataaaaatataatttaaaaatattaaaaaattattttatcaaatatattataaaaaaataattaaaaatatataaaaaataaatattttattataacatattttttatatatatgtttgtgattataataaattggattaaaaaattattattattattattataatagaaagttaataactcgcaaatttaccacttcaactttaaaattattagatttttttcatcaaagaaaaacgaccgtggactttgattgttgttagcattgtctgtcatagtagtattccccgtctattccaactttgcaaactgagaatggtataagtgctcctacaacggccagcgttaatggcaatctagttcttaatggcgttatcgacgttaatggcaatctagttcttaatggcattaccaacgttattagctaagaatgaatgaaagagaaagcttggctcataaagaaagaaaaaagaataaaaaaagagaaagactagctaatttaaggaagagttaaaaaatacaaaaaaaaaaagaaaaaaaaagaagaagaagaaaactaatcaatagttaagagactagctaacaatgagaatataagatataggtgttaagtatgagttgtaaattttaaggtgtcaaaatttgattagtgagactgagaataagacatattaatgggacaatctcttttccatcattataacaagggcattgaattaatggaaaaaaatgattcaataattggaaataaacattggtgggactgggagaaaacaaaacattgcagagcacgatattattatgaatatagtatgggtctcgtgtgatacatttaagagaaatagtaccctcattattctttctattctatcatttacgggtgtgtttggaattaactatataattattaggtaaggtaattactatggtggtaattatacagtttagtaattacaccatattttgaaatgcaaggtgtgtttggatat

SEQ ID NO: 115868 - DNA, 1070 bp, Cannabis sativa
  modified_base (1002)..(1027): a, c, t, g, unknown or other
aaccacccaatatattcatttggcagtttagatttttattgtattatttcgagttgtattttttgtcggtttattcggtttatttgggttaggcggtttgtaaattttgttgaaccatattgatacattttgttaaatctccatttaagaaagcattattgacatctaattatcttaatgttcatcatttagttacatcaacagtgagcacaattcaaatagtaactgacttaataataaggcaaaaagtcattgaaataaaaatcagctagtggatgaaagccccttgcaacaagaacaaatttttattaagagaaatagttatttggacattttttaacacaaaaaacccttttgttaggaccatgtatggttttgtgttaaagccaagaatttaacttgcataattattgcccacttgtcacttttctttaactattagagactcaatggaagtaatgagaactttttgtttgcagatattagacttagcccttgtttgtcgaaacctaaaaattgatcacttatctaatttgagtacctgtacaggatagacttcaacgaaaaactaagagtaattacaacaagtgtaattgagtacattagttcctgatatacaattattgactctaaaaatatagtaatatatagaagacaaaattgtttcaagcaccgataggactaaccataagtggctcttgtttcaaaaaaaaaaaagagggcgggttattcatattttatttcatggttagaggtgaattttggttgttaatgagatcctagtccaaaatcttagatccatttacaagagatggttggttttatttataggttactaaggtggttggttagattaatcaggccaaatgagtggttaatccttattatcctcactaatggagggattaaaattagactatttcccttaactgacgacccaataggtcaaccttactaggtgtgtaatttgttgtcgacctatctgttggaaatattttaccnnnnnnnnnnnnnnnnnnnnnnnnnntttcattaacattctaatatgaattttaaaacaatgaaataaa

SEQ ID NO: 115869 - DNA, 2669 bp, Cannabis sativa
  modified_base (125)..(129): a, c, t, g, unknown or other
gagttatactagaaaaaaaaaattaaaaaaccaaatattttagagtaaatataatttcatacatgtattataatttaaaataaaattgttaatacgggacgtagaaaatgtataactaattacannnnngaggttattcttatttataactagctcaaatcgggacttgatttttttataaaaaattagaggttattcttgaatagagtattcttaaatagaggttctagtgtatatacatacatattattaagtcaaagttaaatagaatgctagttttacaaacctagataacaatattattattgttacaagaaaaaaaaatataataaaatttttcaattaccttcaactttttgaatacttttgctttctcttgatgatatctaaaagaggtggttcttttggatcaagtaaaataaccttgtatcatcttctcatgttttctcttctatgttgaagacaacctttcatattctcttggcttgtagaaaacgataccacttcctttatatttagtcttatattttcatagatttaaattattaattttatttttttcttttgataaatgatttttaataaaaagaaaaagaaaacaatgattcataaaagggcaatctagtcataatataaaaattattcatcaaattttaacaaaaggtaccattttttactcttttttataatagaggataccaactgagtattattaataataaaaggtaccaaactgacattttaataaaacaaggtacctaaagagtctggacccaatctcgaatatcaaatataatttccctgctaaaataagattctaaactaatcccgtgtgactttaatgattaaaccgtcacatttctattgttaccgagaaagataacaaagacgataaattacacacacaacataaataatacacttagagtttaataaaatctttcgaatagagaaattataactctaatgtctatttcttaaaaatagggcccatataacaaaatatttacatttaatcataaaatataattaattagtattaattgtcttactaatctatatcctaagtatgcggtcattacacgttgggtctagtttctagccaccaaatgattctgtttgatttttcgaaccaggtgtatcttaatctttgatgaaaacgaagaatatagccaaaagagttcttagagaaactccttggaaatgagccaggttgacaaagtgtcaacctatgctctaggtccccgctttggcatccaggttgatccatttctcttccaaaagcacttgttccttcgttttgaataaacacgaagaaattgctcgagatagttctatagtattgtggttggaactgccctaggttgataatatgtcaacttgagcactcgatgcctgatgtttcgagtgctcaaaactaaaagtacttattcgattctgattttgttacctcaaatatatttgtgacagatctaattcatgtaccagtaaaaagtttggctcattttcactaagacggaccaaaaaccaaaaccctagtaggtttgtcaacttgggtgctggacacctgcattacttataggttgttgtttcgtgtatttttcagtttccaatccttggatttaaattcctcatgtcttcaaggtacataatactgaaagatagtgaattagaaataacttagtgggatccaaacatccattttggagttcccagagttaacttaagtgtgcagggctagggactcctccaggttgactgccatgactcagaactactcaactgttgggttttttctttcttcccacatgtcaaacattgatgtccatgtcactagaataagttttcgggttaacataattaacgtcaaggtacctccaactatcaataaattgtaacggtaggtattttagccgaaaaataaacttaagtatttaagtgctataagatataaaacttaaatattttcaccacaaattacttttaaaaatactgtattatgtggtggttattttttctcatttttattgttttgttggacttaaaataatataatatgaattttatatttatattttctattattagtgcattatttatttatttattttgaatgaaagatgttataggagtactaataaattaaggagaagtatctgcctaaattgagactccacccgaagacgtaatacatttagctagtgtagtgcaatgactacactattcgtagaatgcaaaatagctcaccaagtccgctaactgcagctaataaattaaaaacagcaaaaataatataatgaaacataatattcttaacttctaaattaatttaaaatactactactgatgagtcacaattagcctgatgcacctaaaattctagttgagatgcccataacagcctctcgtttattgccaaaagcttcgcctaccagcaacaccagcaacacctgcttagaccataccaccatcattatttttaggtgctcttttttcttaacaataagtgttctctctttttttttatgaaatatttagtgttcttaagtgtaatatattgtacaacatttttttaaattgtaatcataccaaaaaaaaaataaaatacagtagaacctccatccaagaatatacttgggaccaaataaattatattctaattgagaggt

SEQ ID NO: 115870 - DNA, 1791 bp, Cannabis sativa
tatatatatatatatactgataagtaaacctactacatgttatcaattgaattaatcttaaaataataaacaaaaagtattaaatgagatattgactgcaaaactacttaagttttatcattacaaacatttaaccatataaattgatttttaggtggtaaaattctctaaatcttacttttgttagctatttacccactctgttcaaaatgctcagttaagtgtcacgatgtacatgtcatagtgtacaaaagtgtacacaggaaaaatttttagttagagatattagtggcaaaactatctaaactcaattaattattagtgacacttaaccagataaactgatttttggttgtaaaaccctccaaatctcacttttgttagctatatttatcccttatgtctaaaaaattctgttaagtgtcatagtagacatgcatttgtgtacacaagtgtacacgtggaatatttttggtccacataattttaattgattaaatattttaaaaataacaaaaatatattttttttttcttttttcttcttctcttttaagtttttctcctgataaccctaatttccacctgcactccctctctctttcgttctccttcatgcacaacttcagcaagtcacctccgccaccttcaacccaaacgaaccccaaaactagcttctagaccttacaaacccaacccttcaacctccctctaagccccgagaccccacccttctttaaagtttctctttcttacctcggcctcgctactgtcccgtaactcttcgccgacaccaccacatttggagtggtttgcaggttcatccctgggctttccatggtctagtaagttgctttaaaatttaagcaatgacttctgttttaaagacaaaagggtgaaacatcactaggcgagtgacagacttcaaacagtccttttttttctgagtaagagggttaaagtcgtatcaaacccctagtgatctttctcgcacggaaaaatgacgtgcatgccagattcatgttgaattttatgtggaaaacttcggcttccgtgaggaaaggctaaatgtgaactaaaattcaagcgatgacttcactttaaaataagaaagggtgaaatataattgggtgtgtgataaacatccagcagtacttttcttctgagaatgagggttgaaaacgtatcgaacccccagtggtctttctcgcactaaaatttacgtgcgtgtgagagtcattttgaactttatgggggagacatcgaattccgcgaggaaatgctaaagttgaatttaaattcaagcgataacttcgctttaaatgaccaaagagtgaaacttcacacggcatgtgacagactttaagcagtccttcttttccaagaaggagggttgaagacgtatcgaacccccaatgatctttcatgcacgatgaaactttgtgcacgcaagagtcatgttcaattttaggtggcaaacttcaacttccacgcggaaaggctaatgttgcacaaaaattcaagagatgacttcactttaaaagaccaaatggtgaaacttcactaggcgtctgatagactacaagcagtccttttctttaagaatgatggtcgaagaggtatcgaaccccaagtgatctttctcgcacggaaaaattacgtgcatgcaagaatcatgtttaattttagggaaattctagtaaatggccccaaatcataggactatgttagtttatgtcctcatttcaaaaaaatatagcaaatgaccataaatcataagattatgttagta

SEQ ID NO: 115871 - DNA, 830 bp, Cannabis sativa
  modified_base (754)..(770): a, c, t, g, unknown or other
ctctctctctctctctctcttacgcccaacatctttcccttcttcttgtatagcgtccaacatgcaacatgcatgaaccagctcgcacgactatgtttctagattccaccttttcaacccatgtttgtggatcgtcttggttctgtctttgtggtgcttgaatacatcccaaaaagtataagtgtcaatttttggggttaagacttgaccccagtctacaagaattcttttaagtgttctttttgactgaatgaattggtgtttttccttgttaaaatgtgaaccttatcctcttcacattttttgaggatgtttctagtatacatagagagcctcccttgcttgattttcacttcaccaaaccattttggcattgttgcaaattcctttcactttgtctaggaggtcttaagtttcattcttcacaaggtcatttttcaacttccatttccttaatattttgtatcattttttttgaatgaccttcgcgcttgtccatggtgtacaacgaggttttctctcgtacacgaggtcgcattttgaagcctccattttgccttgtgtggcaagtgtcttgcttgctttggtgtagcttagtactttacagtgacctcttctgcttcacgaggtattgtgttcattccttttctctttgttttctttgttcacacactatgattttagatttcttgttgttgtgatccgtgtgttatcttcattatattcatcgttaatgttgggaatattttaccannnnnnnnnnnnnnnnncaagtatgttgaattaacatcctaaatatgaattcactaaaacaatgaaataaagacata

SEQ ID NO: 115872 - DNA, 2985 bp, Cannabis sativa
  modified_base (1337)..(1341): a, c, t, g, unknown or other
  modified_base (1378)..(1384): a, c, t, g, unknown or other
  modified_base (2903)..(2942): a, c, t, g, unknown or other
aaattaaaagtcacccataaatttctcaaaaactaagaatttcagttatataggcacactttatataaaatagatatgcctcaagtgatcttggaggttagttgtttgtgctctcctttattgatgtggtttgatgcaccttctttttaaattgatgcccaaagctatttaatttttggtgggttattatcgggtttaagatattaatgcaacttattagtatattaaaaaaaaagaataattaatattttcacccatgagtttttaatataattatttctcttaaaatatatggttgttattgaaaatttctcttaaaatataagaggtacataatcatgctacttttataatgttctattttttttttttgctgttaaaaaagttagtatttttacttcgtaaatttcatgaactttgattattactaaattatgccattttttaaaaaaattaattttaaaaattataattttctactaatttcttttttttaaaaaaaattatttaaaaaacctaataaaattattaaaaattagtaaataaaatttaaaggaaaaaaattaagtttatttagaaaacctaaattatatttctaaaaatatatttttaaattttattttattttataaacatgtatcttaaaaatactcaaactaaaattatggaaggactaaatttcaataaatataaaaaatcggaaaaaaatattaataaattgtatattttaaaagacgcaataatatcataagtttagaaaaaaaaaataattagataaaaaacattatcaacatatcttctaaaagtatgtatcattgtatcaataagcttttcttattgcctctttcgtaattagctaccattaaatttttatagatatgttatgttttagtgaagcaggtaatttttttcccttccccttaattttactttattgagttttaaacaatatagcttcattttataaggagcctacgtggcatggtacgttttcccgctttgctataaaggatttcaaaaaacattattattgtagttataactaacctcatagaagtatatgagaaaatttaaattattttattctaaacaaatcaaataaaaattaagctaattaggatttttgcccctgaacttttaaggtcgttaaaaataccccatgaactattgagattgttggatttaaagactttttatctaatttcattcaattttactatttttcagcgattctttatgtcttaaaccatgctccccgaactttgatatctaccaaatcatgctcctcgaactttgacatgtattaaatcatgcccctgaactttcatccatgttannnnnttttactaaaattgaaaaaaaatccttaaatccaacnnnnnnnatagttcagggggcatttttaatgactttaaaaattcaggggcatgatgtggtacatgtcaaagtttaggggcaaaaattctaattaaccttgtggataatattatagctaatgccataataataataataataataataataataataatttgaacactttttttgggctcataaagaagattgtattctgcaatcattatttaaatattaatttttaaatttatttaagcaatttattttatttatagttattgtatttttatttatcaatattttagaatataatcccgcatatggaccttggacgcaaacaccaaaccttgctctcggctcgaacctcaatctcgctggacgttcccttaaaatttatacacaaaataagttttacttttttttttttgaaaaatttaacaaaatactatttttggtcatttttacacttttaagttcaaaaatatatataatacatttttaccgtgttctataaaaataataaaaaaaattcatgaaagtaacagaaaaataatatccgaacaacataaaaataatatacaaaataacaaaaaaccaacaacaataaaacaagaataaataacatgaaaactttaaaaagagcatatttttttgtaaataattaaaaaccgtaaaaatatttaaaattctgtacaaccgtatttttataattttttgttgttttatgtatttctaaaataatcttttttttttctttctaattgttgtcatgtaataccatattattattatttttaatatttgaggcgtaaatacttaagtttaattctggttatagataaatacctaagtttaatttttgacgataataatacttaagttaaatatttggaacttctgtaagtacctaatcattaagtgttaagtgaatagccacatgacagtccttgattagtctgctaggtcattaaatttttattttttatttaaataaactaataaaaaaatgacatgtgacttgacacttaacggtcaggtatctacgaaaattttaaaaatataacttaagttttattaccctaaaaaattaaatttaaatattcatccataactgaaagttaaacttaaatttttacacccaaattattcttttattatattattatataaactaattcgctcccctaatttcttttgtttgggtcggtaaatgttatatagtttgaggaaattatactatttacctcttttaatttgatacttttaatttttactctttctttcaaaatttattatgtttagctctttttttcaattattctaccacttttacccctatcacttcacgatagttttcattcttctctaataaaaaatttactccaacttttcccacaaacctactcatccatctacaaaaaaacacaaatctattacatttgaaattatgtcttagttacgcgagtctgtgaggataatttgggtacaatactcataaaaagatgtatatttaaaggtaaatttacttaggtgccgtttggtannnnnnnnnnnnnnnnnnnnnnnnnnnnnnnnnnnnnnnnaaaatttttgtttttaaaaaatttgtttttgaaaaacaaaaat

SEQ ID NO: 115873 - DNA, 1843 bp, Cannabis sativa
  modified_base (1789)..(1800): a, c, t, g, unknown or other
aataaaataataatatattattagtaactacaatacataaaataaaaaaaaacttaataaattaataaattaatatatatgtataacggtgggttttgatttttattttagttttcggttctgtcagttttgattctaacgatactcggtaagttgatttgaacgattttttcattttttaaatttttatgttcaacccttataatgataataaagttgtcaataaacatgacgagaatgtctccccatatttgaccaaaatatagggaaaccaaatgtagttgcaagaagatgcacttaaaactttattttcattgttctcccccttttaccaaatatgaccatgtttggtttggtgtaattgaaatcctaatctttacaatataatcactattataccatccttgattatagttttacacctatctaattaccattacccttattttatacctttacattagtaaaagattttaaaggacacttttgtcaatgcactaaaacaaacaccactatagtgttaaagatacaactagaagagatcaacaactaagaacatcttttttagtttattgttgactaaatttgaggtaagaataccattttttttttaaccaatttacacaacaaataatcatcattacaatataagtcaactttgagtcaaagctttataaaggtaactcatcttcttcttttaagggacattaaaaacaaataaataagaaagtgattgcattgtgtattatgatattggtggtcaatctcatacctcctatacatatacatatatatatatataaatataaatatatattagggttatacctacctataagacctaaaagaaaaagaagaaaagcattaacaacaaaaactaaagaatagatgttccattagcatttagaaatataatccaaaaacaaccaaacactacttttagtaaaaataaaaatggaaatgtttaaataattcaataataacaacaataatttatatagtataaatagatataaaatttaatatagatgtgttgtctacactagaggatgccgactaacacagtcctcacaattatgataatcactcacagctaagcttttctccaacaactatattacaccaaatgaaatccagctaagcttcatatacatatacatatataaatataatatttatttatttttggagtgcttatataatcattatgatctaaatatattatcatatatgcactaataattaagaaaagagaagttgtctcttggtagatatataattttattttacataacaaccaataaaagtttattttattattatgtctccactatgtctcccttaataattaattagagtaataaataaatcccaacaaaatcagtggaaattataattaggacaagttaaaggcattacaccattatttatggatcatatcatttatttatgaaattgaaaataaatttgaagataacatagcttgtactctcacatgtgtaaggctctcacgtgtggagtggagtaaactactaaagaatcaatcactctttttatataattctattccatcctaatccaacttaaaaatgaataatatctaataaaaaccatttataaatacatattttaatcatgttttttcattcttttaattaattacattactaattttttataatgattttttcttttttattttttgttaagagtgttttacaaaatattttttaaaaaatcgaaatatatctatatttgaaatataaataaggttaattaggatttttgnnnnnnnnnnnntgacatgtaccaaatcatgcccatgaacttttaaggtcgttaa

SEQ ID NO: 115874 - DNA, 2992 bp, Cannabis sativa
  modified_base (56)..(60): a, c, t, g, unknown or other
  modified_base (2453)..(2458): a, c, t, g, unknown or other
taggttaaagaaaaatgtaactatgattacaataaaaatgtaactattgaatagtnnnnnatatatatatatataaaagaaactaattctttaattcacttcattgacgaatggtttgtcttatacactttacaagagaatttttagtctataattctgtcatctaaaatctctactttccatatatatataatacactatataataaactaattgatgttttcccaattatttttattttagttggacttcttttttttcttttccacatgctctttaaagagccagcaacattatcaagtataatagcatgtttattaataagtaatgagaattgataagataattattatcttatatttatttacttacattattaaaattaataaatggacaacttaattaaataaaagagaaaagaaagaaagaacttctcccactaattttataagaaatgtcattaaggataatagattttaattatttttttattttttaataataaatatataatgacaattttgtcctttgaaatatatcttacaaaataactaccatataatatagtttaactcaaaaggacaatttagtcaatttaagtattccgattacgtttcctaataaagtaaacaagataaatcacaactattcagttttaaaaaaaaaaattagtaaacaatatattacaaatattgattctgattatttttcatttattccgttacatttctcgattaatttattccgattctgaatactgtataataaacgtgacataagtgggttgaatagggaaacaaaggaccatgtttttttcaattgtcacttgagtgaaaatgttttaacagggattcaatcttggcttaaatggtattcggctagcaacactactcagggactattgaagtggatttcaaaatccaaaatcaacaagtttcataaacaggttttttcggcaactttggctgctgcaatataccatgtttggaggtgtagaaatgaaactttttggaatagcaaagtatatacagttgactccattgtaaagagagttaagagtgatgtaaagaatagaattaaagggataatgcctaagaagataactaaaaaagatagagatttgtttcaaatgttgaattagagttacagacctattataaatggttttgctagtttgtaaatgaagttttgtagaatacattttctgattcaccaaaaaaaatgtgacataagtggcgtacctatagacatccttcttaaagcgccctagtgtttagtgtagaggagtctatatggtaggtattgctatagaagtttgaggtgattttccattagagacatgaatggttgatcttttcttctttaatagggtagcttttgaacttctctccatgccaagcttccttttgttagaggccataatattttctgttgggaaatttgatattagagtaaatgatatttgagtgggtgtttttaaatttgagtttgtattttggccaataaaaactggtattttggaccgaaaagctatcttcttaagagatctatttctcttagtggaacatatctcagacatgggtgtttcatcatcttcaaaaaagtaattcattatcattttttgttgcatcttcacttatagtaatacatgctgaatatcatttaaataaaaataaaaaatatatttctctcaaaaaaaataaaaaataaaaaatatatattgttaaaataaatggttggaagtatttgcatgaaaaaagaaaaagaataaacaaacggttattattatttgcgagccacgaatacctgtcattctcttgatactagttttgactagcgtttgagagccatttttggaaaattgtgttgagaaacatatatgttgtgaaagtgcttaactcatcaataaaatactcaggtttattaattatattattactccattataaatataaaattgtactctttgagaatatagaattgcactctttaataatatggaattatatttatagaattctttttagtagtctattgatttagtcaatataagtagtttgtcttcaaatcattaattcattattagagctggtcaaaattatcgttttactcttctaattatctccagaattccttatgtacccttaattcaatgtgaacaactaatctataactccaattatagatttggatctaattgttagcacttccagaattaacactataagagaactaatatttgatcttttcagaaagtttggattctaccattgtataacattctcagcctctcatgttattaagttcctaaacaaaatttgtaagaatcatcttctctaagaaactttaacaagtgaatcaaagaacttaataaacacaaatatgagttcatgaatactcaggattcagactgatctacttatgatcattgttgtgatatgaataactctttnnnnnnaaacgacacgttgataaaagatgttagttcatatcggtccaatcatgcatatcaaattgtacacaatatatttattaaatatctattcacatttgcaatccgaatcaaaattacacacacactaaagtatagtacttagtaagtcgtacttggtaattccatattaaagatttcatattttaataaactatcaacttattttaataatatcatataatcttagttctcttgtattttcttactagatcatacattcttaatatgaatgcataatttttaaaatatttattaattaaatttttataattaacatatttatttttcatatattttttaatatatttttttattaaatatttgcttttaaagcataaattctaacatttttatacttagtttactaacaattttgataactagttttgcctatagtgttcgtaatttcaacccatgtactttaagggctcgtttggaacgccgtattaggttgtattgtattgtattgtattatattgaattggattatatatcata

SEQ ID NO: 115875 - DNA, 2825 bp, Cannabis sativa
  modified_base (2797)..(2800): a, c, t, g, unknown or other
taaaaaaatacagtaaaaaagtttgtaaaaaaaatgacaaaagttagtataccatgtaagtttcccttttattttctatgaagattgggttgggaattggcatcagtagttcaggaagcagcaacaaacaaaacgaggaaattacactctatgaccattttttgtttcatattttaatttttacttttattttactactctttaatttatacctacttttataagttatattctcattatgtgcattaggaagtccaattttaataagttttgtgaggttatatttgatactttgattataaaagagagtatttatcaattaaaattaatttagagttatatttaattaatgtgtaataaaaaaaaaattacttttcaacttatcccaaacaaaactgggccaatattttgcataaaagcccattaaaatcatgttactgaggaaaaggttgaaagtgaccgactatgtcagaaaaccatgattctgataccacattccccaataccacttcgaatctctctcctcagccaccggcccaacttatttttttactcgttgcccattccccaataaacaatgaaatattgtgccaaacccaaatccagccttataaatacaccccctacccctagaccagatagaacaatattaataattcaagtcgagaagtagttccccacatatatattgttcatttttttgctccttctagttctagttttatatttagttgttataattatatggcttctacagtgttgataagcaaaaaaggtaagaaattatgtgaagaatctgaaaaaaaatatgatgaagtagggatcacgagccacctatacttgaaaccagctcactcctcccaaagcttagataaagaagaggttttgcagcgaatacggcaacgcaaacgagtgaacaaggtgcgagccactcttcaagccctcctcagggtagtctctctctcctctaaacccaataataaaatctctcttccccacaaccacaacagatcatgggtggacgatgcttttgctgctccctagtcatttatttatcactattcacttctctctttctttatataaataatattaatttaatagaagaagtgtattatgtttgtaatttttttatgaaatgtaatatgtaacacgtgagtctttcaaaaagatattatattctctttgcttcaatgaaaaagtaacctttagttttctcaagtatctttttacttaattattccctagtgttccttcttagtgaagtgtcaagagtggtttgctgaagctcttatcttcttacgactcgaaagattgagtattgttatacatcgtggtgcacaatcacaataaaatgtcttataataaataataattaataatttttcataattattattaaaataaattaaataaaacttaatattaattgtaccagtaataatataatatttatgttgctagttattatctaaaatccccttaataaagaaatacatatatatatattatccaaaaacttggaatataaaaaagttgcaaccaaattgagcttcttcagtagaatacttagagcttacaagtacatattgtacctactttttattctatttaactcaattataataatatataattatatttaaatgtctaattatattaaactaaaacaattatttttaattatattaaactaaaacaattattttaatagaatacatcgtaagattattttttggaataactttataaattactactattctactattaatatttggaaaaatctacgaattccgtatgggaataactgctccccctatgccttttggtttgtctcgtgatggtgcgagagtagtggctgacctctttgagcctactccctgtttgaagttggaactattagaaatattttaaaaagtgggaaactgtctgggatagggagagatagttgggtttggatcaaagaacctagtggctctttctctaccaggtcggcttatttgattgatctaagcctatcgtcggacacctcttatttcggtagctccttccttatggaacaaactttgaaattctcatatctatgaacgtcataaaattctttagtagtgtattctttcgaaagctctatccaccaaagctattgtgggtgttagagttcaatcagatgatcttgtttgtctccttagatgaaatgagacctttgaacaccttttcctgttttgcgacttggcgtgccacctttggagggcttccccttggggccttactcctattagagatgatactccacaatgttgggattgggtcaaattgctttgggaacttgacattatgggcattgattctaaggaagttttcttgtttgcctccattgtggtggacctgatttggaaagccagaaacgacaaagttcatcacaatgttttgcacccctttactcatcatattaatgccatttttgtttgcttttcagagtttgctccctccctcttgacgacctcactagcacgtgttcctgctggttggtcaactcctctagagaattggatcaaaatcaactgagatgtggcggttggcaaggactcgatggcggtggttccagttactagaaatcattttgggtttgtcatttggatcaactcttaggtgctaaacttttgtaatcctctattgggaagcggaaccatgtcgtcttgctctgatttcgacaagggtgttcgaacacaattttgttcttgttgagagttactcagagtgttatattatttataataatataatatatagattnnnnatgtgtaataaactaataatatgta

SEQ ID NO: 115876 - DNA, 2165 bp, Cannabis sativa
ctggtaaaataattccaacaagtaaagcaccaggccctgatagtttaaggagttttttttttcaagatgcttgggatgttttagggagtgatgtaagcaatgctatcttgtccttccttcattcaggtaaaatgttgaaagatatcaattcaactatcattactttaattctgaagaataagtgcccgactaatattagtgaatatcggcctatatcttgttgcactgttctttacaaggttgcgactaagcttatttactaccagcttagactggtgttgaatgatttgatttctcaaaatcaaagcggctttatccaaggtagatatattgcttttaatgtaatggtgtgccaagaccttgtcaaattttaaggaaagaagaattcgaggctaaattgtatgattaagttggatttgaagaaagcatatgacaccatagaatggggatttattgaagacatgttgaaagctttcaattttcctcaaagttttatagagttgatcatgatttttatccaaactcctcagttcagtttgatgattaatgggcagatgcaagaattttttggagctaagaggggtcttcgtcaaggtgacctgatgtctcttttgctttctactggtgatagagtatttatcccgtggatgatttaaagtatcatgagagatgtcgtggccttcaattaaatcatttatgctttgcagatgatgtgtttcttttctgaaacggtgatttcaagtctatctatttcattctccaatgtttaaagctattctcttctacttcgagtttacaacctagtgagtctaagtcaacaacttattgttgtggaatggatgatgtcaaaatcaaaagaatactagatgcttcgggttttacaaggagtcaaatgccttttaattacctgggtattgttatttgtgtgaagagactgtcagcaactgattgctcgtgtatattggaaaaaatggtggctcgctttagagtttagagctcaaggaacatttcctttgctagaagagtcactttgatcaacttagtcttagtatccattcattcttattgggcgcaaatcatgttatgaccaaagaagatcatggagcaaagcaatgctatttgtagagcatttccttggaaaggaaaagaagagcataatggtccaggttatattttgtgggaaaatttgtgcaaatctcggaaagaaggcgatctgggttttagaatgctactagtttggaatcaagcggctcttggaaaatatgtgtgggccatttcttcagagcaagataatctttgggtaaaatgggttcatagtgtttacttgaaggatcaaaacttgtggaattattcttccaccatgtagagtaactggtattggaggcaaatagtgcatgtgaaaaataaaattaagcagtttttttgttgtgataaacagtttttagttcatcgatactccatcaaccatggttataaggcgttggttcatactaatgagaaggtgaattgggataatcccgtttgggagggactatccatttcaaagcatcgctttatactttggataggtgctctacaaagattgcaagcaagagatagactaataaaatttaatatctgtcaaacaagtacatgtttattgtgtgatgttcaggctgaatctgtggagcacctttactttaactatcatttcagcaggatttgtttacaggagatcaaaaaatggctcagatggagatgtttgagcacaggtttgaacatttttctaagatggattgatagagcaaaaatctctaaattttggaggcaagtttaattatagtgtatctatagctgctttggtgtaccacacatggatgattcgaaataaagctctttggttttaatgtgtgcaaaacatcatggttagctgtaatagaattcagcaagatgtcaaagatagaatagctatggctacctcgaaaaagttgaaagaaatagatgttcatcagcttaagcaattgtactatttctttttttttttttttgagctgtttgtatagaatgattttttaggcatttttttaaaaggtgctgctagatgggcttttttcagttttaacccaaaaaagtaacaatattacaaaaatatttctagctggccaaataaataaatatacaaccta

SEQ ID NO: 115877 - DNA, 2922 bp, Cannabis sativa
gtcttttatttattataaaaaaaactaaatttgtaaatttttaaaattattaaaattaatatataaatcaacatttaatttgatacacgtgcggagcacgtatgtctcccactagtttaaagaaaaaaagaaaacatctgtccaataccattatgtagcaatatttatattatttgagttttgagaatataatatatataattaatatttgataataattagttcaacatttatttttatattgtaaaaacatttctaatttataagaagtattcaataaattacaaatactttttgactggggaagagatgtttaaacttaaaagagctttttgtttgtgtttgtgtataagacgagtgttgtgtagtgctatgcatatttagtatttcgtaatgatgttgaacatgctggtatgtacctaatagtcatgttcacttatttatacttctatcttaaacagttttcttctaattaatttggaataattaggtagtcgtgttgatatatatgtgatgagacccaatcttaaattattttattaaaaataccatcatttattattggaattagtctcatatggttaaaatgtaaaaataaaatatcatcataaacttactttgatattccgaattctaacacggtattagaataaaaaaataacattttcgttgtctccacctttgacatcaatttaagacatttcagccaatgtatgtcagtttatggtgttagaatctttgaccttattgtccataattaatacgtggcaaaggagttggctacgtggcgatgagacctatgctctaggaataattatgtcaaatcttccaaaaactataaggaaaatttttagccgcaaccgggaagtccctccggaagagcaagctgcactgccccagctctgagagtcaagtctatcagagatgtggtaggaaaagggaatgggtccggacgtcgcgagtccgaacctaagtcaatatagatgcattaaatgcagtatggaggaaacgtctacaaattaccttaaaaagacatgtcagagatttaagcccatcattgtctgatttcatactatccaatatctcttatgacagctgcataatgaacagtcaaatcatcagtagaagctaaaagtgtatctcaccaaacacctaattaaggcaagtctacgtgttaaacaaaataggcagacacaccctattgtctaaatttagaaaattgtgcaagtaatactcatacaattatgacaatggtgagtttttcaccatctttacgaggctataaatatctctaactacattcgattaaggggtcgaaaaaaatagggagaaaccttttgtaaagaactactgcatttataacagtgactcgtagactaagacttattattacccgaaccacgtaaaaatcctttgtattaaacttcttataatcatttgaaacaactctaattaatagatgccaaaaatctcgacaatattttggtgcttttattgagagttgtaggaagctttccatagaaggaaaatcataaatagattcctgatacgatggtgttgaccagaaacaactcgcatagaccacatccgcatgaatatcctgtgggtcctgatggagaagaagtggcttcaagggtagatgttgaagaacaagacaaaatggaagaccccgagtatgaggaaaaccaagaagagtatgaggagtacgatgatggtagctataccaaactaatcgcgttgagacaaaaagctactgaccacgaggctgagttggcagagcaaaaagagcaaaacaagcgaatgcaagagatagtaattgccataaaaaaagtgatggaggtcgtaggcattcacatgcacccaaatgttggccttcttagacaagacaagatggtagaagggccttctcagccatcaagaaataaaaaacaaaatagttgagagtcgagccctatccaatacccttctgaatgtccccccaagggaaatcctaatgctaatccagaaaggaacaataaggctcgagaccagcaaaaagttcgttccaatctccctaaagggaaaagtctgcagggagtagatttcctaagggaaagattggtcctcaagattggggtgatggaggagcgtgttcgtgcatcaagaacctggggagagaaagggaaaaagccaaaagaaccctcgagttgatttaaggcagagactcaatgcaaagcatgggtacctcaggacccgtttagtgcaaacaaaagaaaaccataccaatttcgaacaacaccttaaatcaacgaattctggacggactcgccattctgtgaaaggacatagccaaagtctctcaaaggaaaaatggagatgattcagaatctgactgcgaggaccgagagccttcttccagaaatgtacttgaagcagagctccaaaagaacttcaaaatgcctgaaatgactctgtatacaagagatacaaatcctagtgatcacttgtgaaggttcaacaaggtaatgatagtcatgagagtcaacaatgacgtgaaatgcctgtgtttcccattgacattaaggggatttgttgaagaatggttcaaaaagctcgagcccggatctgtggactgttggaacaagttacaaattaatttcagaaggcagttcgtagcaaccagaaaagattaatcttgaagttagtgtcctgactaacattaagcaactaccggtggaaatgttaaaaaaatccattaaaagattcaaggaagaggcttccaaaaccaaaaaaatggatgatggacaacacataatattaatggatgtgtaagaaaataaagctgaaactttaagcctgaattcgattatcttctgtttagattttggaaaataccaaagcataaaagttctatatctctcttttatctttccagaacatctt

SEQ ID NO: 115878 - DNA, 3024 bp, Cannabis sativa
  modified_base (85)..(90): a, c, t, g, unknown or other
aaccaaatgacacacaaagtgatgaaaaatacttctgtttctttattgatacttaaaagttaaagattacattgaaatagagttnnnnnnagggcataaaacccaacatacatctcgtcgaatacgagttatcctccttgtccatcttaataagaagaaatgctaagtatagaaacgcttcatcttgctgtaattttctatcatattgattatgcaagatttcgttgcataaaaatgcgagacaattgagtgtagttattttcaccatgctcgtgtacgtaagtcaacaactcacaatacctttggatatcttgtctagtatactttttgtactatatgtttatcccgaggcggacatttgtctcgtcaattctagtttaatagttattattcttgtctcgcataagactaagtagtcagtgagcttgaatatttctatcaaacctgtatttaattagaacgagttatttaaattgtatttaatgatataatgtcattattatattcattgagttgattcatattccttctgtaggacacgtgtcagcttctggtgcatagctgaatttcaagtacaacaattgccctctgaaaagtactttttaaatgatcttaggggagtaatcgtattaaacccttttgaaaaatttcatgttttgagttttggcggtttagaacttcgaggcacatcattgagcatttaatgccctgattgttcccattttacaaagttcccatccattagatcagactttctttgatcaaacgatgataatttatgagtataaattctagattgagcatcttattttgccatttttgcttttcaaaccttcaagcttttttgcaaaaattctgatttttccttttcaacttgcatgttctcattgtcctttaccttcttcttgtgtattacatcagatcacgtttctagttctagaaaacctcaggacccagcttctcaattttttgagatttcaatcgcgaagttctattttctccagtaattttagccaagacattaagtgatacactttctcttcttactgatttttcttttctgtactcgtaattcttttccttgattaatgtttccctatctgcactgttttgttatttttaggtaattttgattttgtttgtctgaataactctaaggctaggaaaatttttaggttattcgattcatagactttttgggttaaacttgtgttctgtttttctgaaaattgggatattattgtttataagtatgtccaaatttattccagaaatcacaatcctagaatccctagaattagattgtcctcaaatttctaccattcaactcagacccaaaaaacacatacccagaaccgctcttgaaataaatgatgcaaaaattaggaatcatctcattaaaaccagccaagatgaaatctccggtcgctataggaaattcttgcaagaaataattgagggtaaacactattttttgcgagaagctgcttggcctgaacctcagagtttattgatattcccttagcgagacctctgttattacctccagtcactgttatttttttcatcgggtgacttagattttgagattatggcctagaaatcacgtaaattaaagacccctcaaaaccctacagttacctttgaggcataattgatcgagtttagagttagatcgataggatcttatgttggagaagtattaaaatcgtgcactactacaaaaatagattttcccgacatttttaaatagtcgtttaaagtattcgcgtcagtttctataaccgtcgcctatacgactgtcgtaaaatgggcagaataggcgatagttcaaaaccgtcactaatatgggtttcccgacggtttaaaatcgtcgcctataacagggtataggcaacggtttataactaggtataggtgacgatttaaaatcgtgtcctatactataggcggcagttttaaatcgttccttataggctggttacgttttttaatttttttagcgacggctttttttagtcgttacattggaaaaatagggaaaatatagtttttttgcaattttttcctgcattaatttgtaaatttttttacaaatctacaaatctgtatagtcacaataattaaactaatgttattatcgtctaaatatatttgaaattgtgtataataacaataattaaaatgacgctaatatcatctaaatatatttaaaaatatctataattaagttaacgctaattataataatctaaatatatttacaaatctatatagtaacgataaatcgagatatatacacactgactaacacggcaactgttgtcgctccgctttcactttcacgtaatgaatccaccgatcacgcataatatttatctcatcattagtgtaaggagtagagaacctatcatgtcgggcaacagttgtattggatcttctacgatcatgaaacttttaatgaatttcataaggtagtatccacactatttgttctcgggttgttcagaacagataggattcatccactgaataggtcgatcaggtcgtcctatcatttgattatacatggtgaacgatctacataaaaaagtaaaattaattagcatatataaatttataaaaaaagaacacacttacatattaggatgtttggtatagaacttacgtggatatgatgaagttcagatcatccggtatgtcgccattgcctgaatctaagtacgccaccgtctacgtacttggccggatgagtacaagcatctagttaaacatgtccctgcatggacaaatatgtgtaaaactgttaatatatacataataataaattttatgaagagttataatactaaaattatttattttaaatctacatataccgattattatatgggacaataagccatttgtctgaattagtcatcctagtcatttgagtgaacttcctcttcattaccaaccaaggcggcaagttatacatcacaagcaaaactggccagcaactatacttactgctaaggctgg

SEQ ID NO: 115879 - DNA, 3158 bp, Cannabis sativa
  modified_base (2653)..(2675): a, c, t, g, unknown or other
  modified_base (3123)..(3133): a, c, t, g, unknown or other
ctttaatttagcaaagactttatgatttagggttttctatattaaagcacttttaggaatatgattagatctgtgatatatatatatttcttaagttttttataaatcctaacaagtgttactgaaatccccataatatttggtaataaagtcattttttattacaaagacaagtcatttgaagagccaaatatttgactagacatagctcccctgttaaaaggtttttacaatcaaggttagagttaaaaagtccttatccatacagacattcgcacggggacttggaggataaatgttatcttaatttttgtccacttcacgtagcatgtacatataggcaaaactaaggccatgtgaaatacagcctgggaatgggtgaacaaagtcaccttgcacgacatgccaattgtcaaggatcctaagcaatcaagcaagatcaagcaaggagaaaatagctagctaggaaattctggccgaaccacaccctggctagttaatgaagtttcatgtgccgtccaagccctaagaatatggttggccagctagctagtgcaaagagcatcaaaaggagtttaaatgaatggtggggtccacaacaagctttctgaacgatccacgagcttaattccagttacgggacagatctaacaacccacaaaggtaagaattcttcctcaaactatttgcatattctttaaggatattacttatcttatttgtaatttaaatgaaagataaaaaagagagattttccctattttagagggatatttatctatttaaatgatgattttttataagccctacattatagaaagggcattaggcaagatgaaaagagacctgaactctaagtctcacacgcccaaggctcctctctctcaatctctcacgcctcctcactcactcattagatacttagtctatttccttcacaaaatttcataagttctaaatatgtagcactcaattctcactattgtaatattgaagaaagtctagctaaaaattacaaggttcaagcctgtattccgcgtggtattatctccaaaattaatacaactaaaagggagaagtaggtcattacccgctaatcaagagggtcgaacctctataaatttttgtatcatttattattattatttacacatagtgattatcaacaataaataaggctccactatcagttgaccaaattttaaatcaacactatatacaaaagagaattattgatagttaatgtgccatacacatgagctttctatcataatttatattttctttatttttctaattttttaattatttaatattatatggaatataataacttgatttattaataagtttattttttcaaaaaaatctcacatggcttagaaacattgtgagtgttgtgttatagcctatatatagtttactatttgcatcactttaacttctctcaaaatgagtgttacattattttctatctatatctatatctatatataaaataaaattataaagagttgatttgccatcacacttgagctttttcatagtttatatttactctaattttttaaattatctaattctatatattatataataatttgattcattgtaagtttattttaattctatgcatccataaaaaaatgcatttgagttaaaattttgattaatataattaatgaattattttttaatatataattttaaaaatttattaaaatcgcttcaagaaacgacgagcacgactgaagtggctataaatacaaatatatttacagatctatatgtttcgattggaactcaaaattcaagaacaggtggctggtaccaccataataaaactgccttttatttttttttttattcggatgggatttatgttggctgcgtcgggaggctcacgtagtttgttacgtcagctctagggtttattccctagtatatatatacaggttatactagattattgttacgtgcattgcacgtatacttagttatatttttagcttttatttttattatgtgtattattttataaattaaaggaaaccacttattaattttttaattttttttaaaaaataatatttaatgttttatttttttttaaaaaaaataaatataaagtttaaaaatattaaaattaaacatactcttaatattaaaaatagcaataaaaaataaatataaagtttactcttctccgcctgcaacctaagaagttggctttggcaacacaacaatagggttgttccctttattctatgctgacccagcccggggttgtttggaattgttgtaaaagattgcaaagtttgattgtcctctttaattaatgttactatttgtcatgttaagtgatctgctaacaaggccgcccactgtttggctctggctcgtggctcttgttattggtctgattgtagtttctcggagagtactcttcttagtgctctcaaatcttttgtataactgcggatttgaattaataatattatcaattaccattcaaaaaaaaaaaaatcctaatattaaaaaatataaataaaaaaataaatataaagtttaaatatattaaaattaaatatactcataatattaaaaataacaataacaaataataatgttataaataatatattaatatttnnnnnnnnnnnnnnnnnnnnnnnataaataatatttatatttatatttataaaagtaatttgattaagactgttaaatttaaaagaatatttttatagttttaaaatattatattaaatcaaaataaaaattccacctcactagagaactcattgcactctgtcccatgatttgcttcgatctttttatctttgaaactcaagtagtgaattaggtttttttttttcgaaatggataagtaatatagtacaaataaaggagagataaactccatctatggaaaactcattttttaaccaaacaacatgcaaaaatgatgggaaaaaaatacacgacatgatagacagactcgaaattgaaaagccaaaataaacacctgtatcacaaaccaaaatctaaaataaattataggtaactttttgacatatattatatatactagcaaaaattacgtgcgagacacgtatactnnnnnnnnnnntagtttttttctatgttatttgaaa

SEQ ID NO: 115880 - DNA, 2185 bp, Cannabis sativa
cggccctgtggatgagacaacgtcgatccacatgcaaagctacattctttttgcgagtagtgagtaagatcttactatgtaatgtgtctccttgattagtaatagggaatgcattttttagaagatcccatgttgtagtagtccatatatcatcaagaaccaccaaacatttccacttcatttggaagtcatgaagctccttagctaattcatcatcacttaagcttttgatgtgatttctttgttcatttgtgggagatgtgaaaccaaataaaataccttcccatacatcgcgtctattacattgctgagatatcgaaacccaagcataacaatcaaaatgtctcttgattttacgatgttgatagacctttcttgcaagagtagttttgcccaaaccacccataccatagaccgaaatcaccttatgcttatgagatttctcttttttcagtcaaaagggctaccaactctttgatgtcattgttgaagccaacaacatgattgtccacaacatgagaaggaactttcctcaactcattttccaacgaagaatggcttgaagaagcttgatgatcatgattgtttaacactgaagtctctagtactccaatatcttttaattcagttgtccaagtagcaatgttggatgagatcttgtttatctttgatccaactttatggacattaactaagtgagcaggccaatgaattaaccaattagaattattattagccacttggaagaggtaagtttcaataacatcttccaagtcaagagatttttctctcatcagctcaaccaaaaggcctactctctcatttcgtccatctctggcccaagcatcggcttctttcaagaaagcgctcatacatcgaagcttgatttcggcattgttgacttgttcttcaactccatgcaagaatttagcttctgaaactactaaccctcccacacttttaattatagatgaaacaatagcttcagccatatcttatctttcactcaaatcataagcaatggctttaaataggtaaaattgtatacatagctaaattcaacaatggctgcttcctagcttatacctcaattttattccttttcttgctttttgcaaaagcacctctgattaattatcttattataatgataatgcatcatatgtgctgtaaatacatagctttatataaagctcatcaaagcacagaagttaattaataattaacccatgctatagtggactactaattataattagagtattgctattgaacattaatgatgtctagcgctttctagaggtgtcgccttgcaattggctaacggtactctctaaaatttattacattaaattataaggaccccagacgttaaagggtattaaacaccactggtatcttttaacatttcggctatcttcaaatgttccaccaactacatatgttatcatataatattctttccattataattgcaacacaaaaaagtaaaattattctttattgttacactactttctgtacttagaaattaatatatagtgattctcaggaatgcttttggtttgttttctttcaatgaagtttccattaaaattaattctttattgttactgttatttattcgatcctaaataaaacttgttcacattaatgatatggtaagcaagtcaagttggatcatgccataccatcaagacctttccaagggaagaaggggatctgtcttcagggtgcttccaagggggttcatgttacactatgaaaagggtttattagtaatttgtaattggtgtgaaaacctataaatatgtaattgtgtaactattattgaatatggattgaaaaaatagaattttggttcaattgggggattggcactgtctcaaagagtgtatttcggagatatgtaatgttactatgttaggtaacgggtcctcttcgagacaggacaaatctctgaaatatactttttgagacagtgttagtctccaatttgaaccgaaattctattttctcaattcatattcaataatagctacacaattatatattgggataagttaaaaaatactttgtttttgtatccattaatcaaaaatactctcatattatttttttattaaaatataccaacttttttgagtagattgtctaatatactatcactctctacttaagtcta

SEQ ID NO: 115881 - DNA, 1468 bp, Cannabis sativa
aaataatttttaaattgtaataagctatatattttttaagtcccgtatcaataaattatactttatgtaagaataattatattttaataaaatatatacatatattttgtaaatttatttacgtaaaattaataatttttattccaaattgtaatacatgtataaatattatatttactctaatataattgtattatgatatagtattaatgactgtttattaatattgttatattaatattttttggtattttaattttttttctagtgtaattctatttaattataactcctcaatgagaatataatttgcttaatcctaagtatattcttagataaatattctactctattacacttagttgttatcaaatcttaaccccataataaattttaataattgggtaaatatattaagttttttatgattaaatttatctaatacaagaattctaattttcatttttgaaatagtttcaattttgacaataattaagtaaattattaattatttaagttgagaaaaagtgattagataaaaagttttaagggtaaggaaaatttttataaagtagactagtcattaaattaatttaaattcctttaaggactttggattctcttttttttccctctatattagacacaacacatcacaacaccttctttttcttcttttggtaaaagtattttatcttcttttctagttttaacttcaaagttagtattctatcaaaaaaaaaaaaaaaaaacttcaaagttagtatatttagtttttttttttttttttttttggatgtgaaatcaaatgaatcttgccctaccaccgtacatagttaatgctccttggtataaagaaagtacctaaaacccataaagaaaagtcaaagtttcttttagtaaatcacagccaatgttattggattttggctcagcttttatttcaagcaaagtgacatttttgcattttatttttccttcaaatattgtggtgtgtatttgacctttttttttttttttttttttaagaaaagcgtaataatatattaaatgaaaattagacctcatggtcgttacacaataagttctccggaacggagttgattggaatcgatccatacacctggtgggtaaaagcccacttagcaacattatgagttgcaaagttgcagttcctactaacattcgaaaaatgacaacaaataaaataaggagaagacttagtacagaaggagacatagttctctatggcccaatgggacaccttcccattgagagcattgattgctagtctcgattcagtctccacaataacatacttatactttagatccaaagcaacagacaccgccaagcaacaggccgccgcttctccacatagagcctctgagaaatccaaccgggacgtgtgaatagaggtcaccctccccaggtgattcctaggtacaacagctatgcacatactctc

SEQ ID NO: 115882 - DNA, 5139 bp, Cannabis sativa
  modified_base (50)..(70): a, c, t, g, unknown or other
  modified_base (3185)..(3187): a, c, t, g, unknown or other
  modified_base (5069)..(5085): a, c, t, g, unknown or other
accatgcaacataaaatgtgatttatgatctttattagtaaatctgattnnnnnnnnnnnnnnnnnnnnnagggcacaaaacccaacactatattccttcacttgaagaagtagaaagaaattaggtattttagtagaggttcagtaagtatcaaattgtttacgctttgtacatcaaaaatgagggtatatataggcacacatgttgataagggcataccctttatcctactaggattttgtactcaacacgccacaagggctgatgctacaacatgacgctctatcatgtggtgtatggctgttgtatggcattttgtgggaacgaggacacgtgtggctcaaaggtttcaccttaaaaagtcgttgctagaaaagtcgttggacaaaaaaggagcttcagagccatgtacgtgcactaccatggtctgacgtaggggacaacttctgatttggtatcagaagataggtaaccgtcgccttgagctcccgatggaatacaaccaaataggttctagaccatgaggtcacatccttcctggattacactaatctgctaccctcctagaatgctcctagcttcaaaggactgtggtccttcttagtagcggatgaatagtgggagtcctggaatccttcctgtccttgctgacatggagaaccttcgactaactccgggaacataacttctttcgtgatgctaataagtagaagatacatgctaattgtaaactatccgaggtgacacctttctgtgagtgccaagtagcagacatctgggagtaggattaacatttaatatgaatttatcaatcactcatgtaatttttgacaaactaaggagcaagtaaaaatactttatttatagtataaaagtataccatgcatgcatatagcttttaatcaatgtgagatttttacatagacaaaaaaaaaactaactaaaatattatatttctcataaaaatttataaaatgaaccaaattcaccaaaattctaataaaataaataaaagggatgaaaataattgtagaatgccacctcatattcttttatacttttctttatagtatgtaattaataaatcactaaatcatatagatatattattaaacaataatattaatccacttttaaaaattataaatgtaaatatattagacattgatgtactttgatttgatgataaatttttaattgggcgaaattaagttaacaaccaatagtggcgcactcaggatttaagttgaggggggcgacacttttttttataagtgaggggacgtctttttttttcctacaatatttaacatgttaaaaattgatttaaatttatattttagtattaaatatagtataattttttttttttaaaaaaagtaactataaaaatactgtgttcaataattaagacattaaatataagtattattggtagaggttcaaaaagtaaaatataaatatgcttttattgagattagaataaaatgattttaccattacaccaaagcttatttttatgttcatatatatatatatatatcactatatatatcacttttatttataaatatatgttgtaactaactaaaatgcatatttatttttcttccgattttttttagggccgactgccccacctcgcctctatgtgggtctgcccctcaaccgttatatttttatataaattataatatatatataataatagttgaatgatatacaattttacggaacatattttctgaaaatacaaaacacacccttacagaaattataaatataaatataatattaaacatttatataattgatttgaggataaattcaaaaaaaaaaatataactaattaggtaacattgatttatcaattacccatacaatttttaagaaattatggagcaactaaaaataatttatttataatatagaagtgtactatgcatatagcttttaatctatgtggcatttttacaatgacaaaaaagaactatgtaaaatgtcaatacttctcatataaatctataaaataatcaactttagtaaaattctaataaaataaataaaatcgatgaaaataattataagataccatctcataatgttttgtgttttcttccatataaatatataattacgaaggataaacaaaaattaaaccatgaatttattgggctttattaaaatcctaattaattcatattatattgcatattaattatgtactgatgttaacatcttagtcacacagtaaaaaactgatcagtcaacgtcgtaatattcagtaaacataaaataagtattaatataagtattgaagatagcaactagaaataataagaataatttaataattggaagatgataaattaataattatggagaaaacaaaaggaaacaataaagtaaaatgatgaagaaagagagccggaagagccggcaattgaggagttgaagagtacttgaaggtgacatatacgcgggtgaaatgtaagtgaggatgagaccagtcaaaggttcctacgtacctatccaattaattaattttgaactctttttattgtaactgaatcgtaactgccattaactaaggtgagttgctgttcctgttaacaataacagccttgcgttgttgttccaaattgacaattcttattcttactattaacattaattcattattattatcatacttctccgccacgtaccactacacatcaatactcatcatcgaatgtcgcaaatttttgctcttatagttattctctcctattttttccattctcagttttaacattcaatcaaatacaattgaattaaagtgattttataatgaaaaattagacccaattataattgaattagattggatgcgaaaagttagatttcaataagattggatcagttattggatgtcaatctcaaaattcaattaaaaaccgatccaatccaatcacatttatacacattaaaaaattattagggtttttacaccacatactgatatttttattttttttttcatttttactgtgggaccgaatttttttaaaaaaatactgtaaaagttttatactatgtactatgtttttaccgttgttctacgattgtttttagttgttctactaatgtttttttttttttttttgaaactactaatgtttttaattgttctgttttgttnnnttacggttgttttataaaaaaaaacagtatttttgtaaaaaaattacgcatgacaataaaattataaatttttacccaaaatctaattttgtaaaaacaccaaaattatttgtattgatttatatataaaaagtaataaaataaaaaaatatataataataatatttttagtagctttttttcattaaatttgtaatacttggttatattttcatgaagtttttgttatattttattagttgacaatgttgttgttttcgttatttcaaacttttagttacattacatgtaatgaccacattagtaatttggattagaaaaaacaattagcactaatttctgatatttgtataattatttatgaatttaattatttgtgggtcccattaatagaaatgggcattagagttataatttctcaattccgaagattttattaaactctcggtgtattatttgaattatatgtaaattatgtaatttttacaatttttgctcggcaacaaccgaaaatgcgatggatggctagcttgatcacatgggtaggtctagaactttatttcttagtgggatgcatattggaggaaatagaataccgagattgagcggggttgtagtttttgaccattttacccctaggtttgaaatagcttaaaattaagcacccaagggcattttagtcttttgccaagggagtcaatggtggctgccttaggcgttgacacatggccttttatttttcagcaaggattagttagaaaatcctttttcattttgaataaattaaaagaaaaataagaaaaaaaaagaccaaaaattatacaacgtctcttcctcttctctctctctcttcgaaccaaccataaaccagggaattgattgctgatttctggtgttttcagcaaggaattcaaggggaaatcaagttgagataattcctaggtcaattgttcttagtttttcaagctttggtgttggtttaatattgtgattttgagttataggggctgttagggtttgatttgtgtttgattcaatttgtgagctttgtttaggttgattttaagctctggatactagttttggtgtatggtaatagaattgtgcaaggttgagctttgaaactcaagtttaggtctttaatggcatgtttagtttctgtgtgtttttctgggattttttggttggaatatattatgtataccctatttaggtactctggaaagtttggaggcaattggacaagttttgagcaaattggaggttttttggggaggacagatagaaatcggttaatcagtttaccagtacctgtaaatttggttaaccggttttggcaagttccccgaaaaactggttttctcaattctcgtccatttcagtgccttagttgggtgtttatctgtttcctaggttaatataatccctagagagtataacagagccttgagttgtagactcgggtatcttggattagggtttcggacatgtgatttacccggttttattatgtgattagggcatccatccagcacgacactttccgttcaggtcggccaactcgcttgaatctggaaaggaggtaagaactatatataatgtgtgatatgaaaatgtgaatgtgtgtatgtgttattgtatatgcatgcttgttgtgattcatacactaccaacacttgtatggtagcggtacagagtgcattgataacgtgtatgatgtctgaagagtacatcacggtgttaccagcactagtacggaaaggtacaaggtatgtggtacaacacttaatagtactcaaggtgcgattcataccctacctacactagtacgatggtagtactgaatgtatgtggtacattggtacatggtcgtatcttagtnnnnnnnnnnnnnnnnntctgttaagccttgtaaataggtgtatgtgcgcctagatacaagtcgatattat

SEQ ID NO: 115883 - DNA, 2523 bp, Cannabis sativa
  modified_base (2469)..(2481): a, c, t, g, unknown or other
aaaaccaattggcaatgggaggagtagctcattcatcttatatacgacaatttatttccacacattaacaatgtgggactaactctaataataatagtcccaaggtcccgtttcttgtaagtctgttagtctctctttctaactgaactgttaaaaactaataacatgccattgtcaatttattagtcgaaatcataattttcattaaaaacaactaaaaaaattattttaacaacaaaaatatattttttttttattttttcttcaataactgaattttttaaacaaggatctataaccagaggataaaattttgcagggtgttcgaaattaatgaattcccatttaaacctatcaaaggagttgtaagggttcttcaaagtatgcatctttaaaactttttttggtctaattgtatcaattatggaagggatataagaataactttttgttctttgagcgttaagtgttgttgttgttgttttcaggttttgagcaaatgaatctccattaaagctctattgcttcaaacatcatgtcatctaatttctcgccctcatttagctgaatggtcaagttcttttctttggagttttactgattttgagtctctctagggctgattttggtgcagatgtagacacttgcagcgttgtagacttgattatggaagattatgttggacggtttgattacgagagtgagagtaagcttgtgagctttgatcccctatcacactccgatccccacccccaaccacgtcccgaccgttcagcattctcaaccaaccctaacctgatcccagccaccccaaccccgatgttatcaatcggccaccaaaaacccactaattttaaataattttttaaaaaataaaataaaaaagtaaaatggaaaaaccctaatttttaccagctttggcactctctctatgccttctcctgtgcagcaccgacttaacatttctagcgtttggtggtcaaagatgaccaaaaatttggacaaacaaggaaaaaaaaaagaaaatataaaataattttatgattttaaaataattctagttttttattttatttcaattttcttaattaaaattataatttggactagtaaaaaaatttacatgtagcattttattagtatttatcaattcaattagaaaaaaagactaatccacttatgaaaaataaaatttgaaaactattactactaatttttaagattgagaacatataactacttgaaactagttcaaatgaccataggagagtacgtgtgtgttggaggtcctagttcgagtcccaaattatttacattaaatatttgtaatttttcttaaaataaaactcgcaaatggtatactaaaccaatgaagagaagcttctcatattttataagtcaccactcaaagtaagtagcattcattcacaattagaaattcatacacaatactaagttatttatttttttcctttgaagttattaataaaaacacaccaaaaacggggaaattaggcgtagataatcgtctgaagaaatatggttgtatgtatataagttccaaagtaggcttcttattaagatgtttgacctcacccagacctcatttattgtcatctgctcccatgaccacccatacacacaacacacacccacgcgcccattcttgggatgtgactatcacgcaatcatgtaggccccacctcctcatccccttcatattatttatttattattaatctgctactagtacatacataataatcatgataatatatcttaacaaaaatgatctaataatgtatatatattttaaacttaaatagaggaggatgtttcttgaatatcatgaatcatgattatagttgaataagaatcctctgctttttaaaaaaaatatatatgctcatgttattataaataataaaaacatagtataataatgtgatactatacacataataataatagacagaaaagaaaaagaaaaagtacgtattaattactccttcagtcataactggttctggtgataatcaaattattactccttctgctgacacatcgtacaccaaaattgtcacatgttaacctaagcctaattaataatttcattaacaataatattataaacctatttatttatttatttttaaaattatattctaattgatattggtgagaatcttaggacaattataagaccaattagatggtgtgttacagtaaatgtgggagaaagatgagagtggagggtccaaaggccatagggccatggggcctcctcagccgaagtgaatagtgtatacacataatggggccaccggccatgtgaatttttgaatcctcactcatctttaaaatgtaggttaattagtaattttttctcccgaattttgacatgtactaaatcgtgcccctaaactattttgaccgttaaaaattcctcccgaactattgagattgttnnnnnnnnnnnnntttgtctaatttcattcaattctgtttcagtgattgtttatg

SEQ ID NO: 115884 - DNA, 859 bp, Cannabis sativa
taaaaacacagtatttttgaaaatttttccgtatgacaatatttttgtaaaagttaactcaaattacagtatttttgtaagtttcccaaataaaatatcacttagctgttgtagtactaaacgaacgtttggcaatttggaacctttttttttttctttttacccaaagaaagagttttctcacattcacatccatttagacagtgttaaaattcttaagccaattcatttagtgacactggcgggtggtctcacagtacataacaacagtattacttttctaacaaatcttagaaacattcataaattattcataataatataattatgaagactcagaagtataaatgctatcaaatattgatgcctacaggcagaaacacacctagtatcgggtcattttctttagtattatgtaaatatttaataataattattacttgataatgacgaatctgcatctcataagtggacagtttacacaatgaacatcatatgaattaaataaaaagttattgtgatatcatttaaagtgtattattctcttttttttttcttttcgaaaggtgaatatttcattgaaagaaaacaacaattacatgtcatattatttgttatttaacatataatattaaattaaaatgtgatatattttatattttttgagagtgtgatatagtttatactaatatagattaatatatattatatattagaggttatattatatgtatatagtataataaaacacataaaatataacattagaagaattacatttgggaaatttgattttctatacttagaaaatcaaaaaatttgatttctaaaccaataatttaaaccctaaaaaaactat

SEQ ID NO: 115885 - DNA, 1794 bp, Cannabis sativa
  modified_base (95)..(108): a, c, t, g, unknown or other
atacattaaatatataatcatgaaataaatcacgtgaaccatgcaacataaaatgatttttgatcttttattaatttgtaaatctgattatattnnnnnnnnnnnnnnttagggcacaaaacccaacattctggtggttgacaaatggaaacttcctcctttaggctatctcaaattgaacacggatgcagcaattgattcgattgggaaatgcagtggcctgaggatggttatccaaaatgaatgggtggttgttcgagctttggcgagttggagattggaaggttgttttgaacctgaagttgcagaagctttggctattcgcaatgcggttatccatgtgtatttttgggtatgacaaaattgttcttgaattagattgcttgagtgtcgttataaaaattcaaagtaagttgtctattattacttcgttgggccttgtcttagatgaaattcttggtttttggaataggttcaaagttgttagttttatccattgttatagatcttgtaatatcgttgctcattccttggccaaactcgctttatttgctagtagtagtatgatttggtggcaaaggtaatcctagttgtatcaataatcttttggtagctgatgctatccttaaatgaattctcgcccccacctttttagagtacttgttgctcttggtgcttggtggttaagatttttgctcaaaaaaaaaaaaataatatattagaaccttactatctaagaatacatgtacagaatatatattgtagaacttttatttaaaaataaacttaaaaaaatcaaaatactaaaaagtatgaatataataataattataataaacaatcaataatattatattataataaaattattttagagtaaatataatatttatacatctattataattttgtaataaatttatacatctattattattttaaagtaaataaatttgtaatatatatatataaatattttattaagatataaataaaaagtttatttataactagtttatattgaaacttaaaaaattaagaccaattagacattattcttaaataagatattttttttttttgaaagattaaataagatattcttaagtcttaatatattacagtatgtaaatgatcatgcatatgcatgagagagatatgacatcaaagttgactcataacaatacaaaagggaaaaaaaaacgtgcatttccacgcaatttaggcgtggttacttccgaatatgtttacccattgaccttattaattagtttcctaatcgttcttgccaaaaaaaaaaaattagtaaatattaagggtgaataatgcaatataatttaaccgaacaaatctaatacagtttaattacaaaaaattaaatattcaattataattaatgttaaaaattagattctaattgtattgaatcaattattgcaaaattaaattaaaaatcaattcaatctaattacatttatatattttaaaaatttatttatattaattcatataataaaaattaattgaaaaataaaaatacagattaattatatttttagtgatttttttgttaaatttgtaacactttattattgtatttatttattttcatgatgttttattatattttattataaggagtgctaccgtcaacctcctgttataacctcttagtcaacctctacgcttgaaaatatacgtcggaatattttttttttcacaggagtgttcattatgcttacaacatcatccttgtaaatttttaaaatttttcgaatagtttacaatattaaa

SEQ ID NO: 115886 - DNA, 1186 bp, Cannabis sativa
acgtacatgactatgagaaaaaatttgtctaaaaaattatttcgggtgctaaaataaataaaagtacatcaatatattcattttaagagggtgcattggaaaattttcatatattataaagtattgcataattatatataataaagtaagagagagagagagagggggatgagccctcgagagttatgccggttactttaggcactgaaccactgagagagcttgacaaacacaacacacaaacagtactcacactcacacacactgtatttatatatatatatatatgtatggactctctctctctctggctctgctctgttatatatatatatacatatagatatagttattatttatatggatataatatatattctatattctttatttgtgtggagactggagagtgagtggattattcagagtatttagttcaacaaaaatgtgcagcgcctgtttccctacctacatttattatttattttcttttcaccctcaatattcaataattatttaacaccatttcttaattgttatatatttttttatttaagcgtttatatattacatcagcataatctggaactcgaacccaggatctctaatacacacgcaccccttatagccacttgagctagcctcaagtggttttgttaattgttatatttttttagataacttatcctattacaaattaatatatgtatgaaaaaaaaatatacttataataaaaaatttaaatcttatttttttatattataaattatttataatttttaaaaatttacatgtagtctaaaagcacttttaataacttatttactctatcttttaaaatatatcttaaaaattctaatttttctattttaaaatacacttttattacattataacatatgttaaattttttgaagtacattactaaaaaattacatattttaaattttaatatattttatttattttaaacatataatattaatgtatatacatattctcgtgcacaaataattattaaaactaaaataattaataaaatatatttagaatattatataaatatagagtgtgaataacaaattctatctccctatctctttatctgggcggccgaaattctatctaggattctggaaaacgcccaaaatttggggatcattaaggggatcaggctgagtagggg

SEQ ID NO: 115887 - DNA, 4102 bp, Cannabis sativa
ttaaaccaaagttaaaaatgtccttattcatcccattatttctttctcatgcacagctttgttggaatcaagcaagttgtatttggcggatctgaattcgagaattggaaggaaaatatgacatcagaggatgcagggttctctgttcacaaaatttagccaaacttgccgaggattgtggtctcttagtctctaacagggcaattctattttgcctgtgttcgatgtggattaagccttgtgaaacaattgaagcttaaaaagtccatttttggtgcagagaatagtttgtggatgatgcttgaataatctgagaaagctacttctctaattatttattcataaaattttaatagggactagatgcactcgtttagatgatgggagaagagtaaaggttgtaactataatgtttgatcgggtaaatagcaaggtaaaggacttttagtgttacaaatgagaacctattctgcagttctgtgatcaaatgcgtacttagcatacactacattgaataattttttcactcatttttagtcaatcattatgtacgtacattttcacaatttttaacactcatcagccaatcattatgtacttacattttcaatcagagttgtcatagtatttgcttaaccaaagaacaatgtgtgaatgaggttcagttcaatttgagtcatgtccaatggatgagctaaaagatactaaatctgtgtgtagtcttagcaaaataaataaactgactctcttctgtatgttgtccattgcaagatacaaaggattaataaaaaaaattctttttctgaaggcaaatctgatgtagtatgaaattcaatacatcgaaaaatagttgcatgatgcaaattgattgaatgcaacaagactaatgaagcaaggaaaggctagattaaaacaacaaaacaaaacaaattttcttaaaattattattatatatatttcactactgaaagatctaaaaaccatcaattgcgttctgaatcccaaattaattatactgctaaacaaattaatgaattgaaaacatatataagtgagaaagattgagcacatgaaatgaaatggcatatcaagagctacagatactcaaattgatcaagaccttttagtccttacatataaatattaccaacctaagaaaaaataaactcaatgatttacaaagtcgcctatggaataccaattcccaaagatgcatttcaaacacagggcctaccattgcggctttgacacattgtcagtaagtagtactcatacccaatgggaagacactttctccgctactaacttgatctctttcattctctcatcaactaatttctggagctgctcttcctgatttgcttgactttcatctgtaagttgaactgtgcaagctgcctcaccaggttgtgacctaatcatggtaaatgacatctcttgatcataatcactctccaccgaaatcacttgtttcccagttgtgccagaatcttttccaagtatatcctcccttacacgattcgaaattatcgccacaaaatcatccatgtacttgtcaacaggactaaggccaagatagatcaaaacctcccaacattgcaaaaactgtttcttattaatttttaaacttttctgaacatcctcaatggcagatcggggtggcatgaggcgcgggatctgggttttctttgatagttttccttgctttagatgggaagcagcttcattaactgcttgctgaattggttcaaaagtaagcaggcgttgtacatcaatacatgtccgcacatgttgcaagtaatccaaaggttcttcaatcgtcagatcaaagacgtcttcagagactgccacaccatacagcacctcaagtaggtatcggccatagcctttgtgctgataaggcggcaataccataatctgccatttatgcaagcctcattaaaaaaaaaaataccgaaagatatagaaacatctatacttgcgcattttaaaatgctttagttaaggcatcatagcttaaatagtgtaatgacatgaaatacacaaacctgactaatccgcaaacgagaactaccaggataatggtaaaaacgatatgcagccgcaaaaccaagcaacaaactatgttcttcaccctgatgatcaactttattttcaatcaggaggtacaactcccaacatggatcagtaacgtcaattggactgctacctagtcaaatatagtattggttaaaaacattgcgttaattatttttgcaaagatcaagaacattgttgagactaaagtataccatccactagtaggaaaacaagaggaatcaattgaccatagagaggtccagcttctgtatcaccaatgaccattcggacaacctgaatgggaggagagtgcatgagatgcaatacacacttaattacagctatgaacagaaaatcagttaacgattaacttacaaaacattcttagaagttctattacatatatgtaccatgtacgtacataactatgaatactataaaatcataaataagtgttcaaagcacctcaacattagaggcggcaactgaattactgtcagaactggcaacatgcccgttagaagtcttttgctgcaatacctgcccaccagacacaatggatctgcaagaagatcacaaaaacaaataccaaggttcagtgagaaaagagttagaggtcatgaggttcagagaaagctttcggtttaaatttgatgtgtaactacaatgatgagatacccaataaaatttctttgagtagaaaaggtttgaaggaactcctctttactctcaacaagagtggcagcaaaaatattctgttgaacatagataacaaataataagatccatggacataagaaactgatgttatggtttaaaacaaagatcaaatacatattacatacctgaagatctgttttcaagtcagtgatacctttacctccctaagaaaaattaacaacagcaatcaattagagaatattgtaactgaaaaaaaaatgggaggggggcactgaactggtgcacatacagaagagacaggagaggggtaggcagtagtatatacaagattgatgtctgaacttacatcagatttgctttcaaatgtaatatcggcatatgcatgaaaagatatactgctaacccaaatgttgatctgaaaaccaaacaataaacaagaaaattaagaataagaaagtcagcatcgaactaaaattcaaaagactatctattacctttaaaccttcgtaaccatatatcttcccatcttctccaaaaaagctatctaagtcgactggatcaatacaaaagctacttgaagcatccacttcctctttgctagagactatcaagtattgccaccaaaaataagacacgagaccaaataaatctcacaaattacaaccaaagtaaattaaaaataaactaggtgataaatgcatataataactgtgaatgttgagcagcttcttcaaaattgcagaacacacaaattgtaagaacagctaataaataactaaaaaagtggaaagaaaaaaatatcctgcaagagagttactaaatagataaattaagcacactcatccaaaaatacgaatgagaagaccaacaaaagcttcgtacccaagtatattttgatgcagtcttttgcttcaattccagcatctacaacaaagcccacaaaaaaaaatgaacttggaaattggaactgaaaccagtgaccacaaagatgggagaagaaataataatgactcctcaaatttccacaagaaagtaatttgaatattgaagaaaatgaaataaataagccggagctggccctgggtcttacttaccaatagcgaagaagccaacacgacgtcgtttcttaggatcaccgagtgcagcggcggccggttgcttcttctggcccatgtttctgctcagtgtttagggttttcgtagcgggaaatggaagtgagataggcgggaaattgttgactgtacgaagttgaaggaaattagggctatatataacgctctactgataaagcacctgcgtttcatgtgcttctattaaggttttactttttttttttttttt

SEQ ID NO: 115888 - DNA, 2386 bp, Cannabis sativa
gaacctctagaaattttggtactctctgattatactattttttgctttttgttatttattttatctaatcgctttattttgactcactgtcgttggctagaagcgagatcaacaagtatatatttagatctatggtgatctaaattaaattttgagaaagatttattcccagccactgaaaataatttatcttattattctaataaataaatgacctaaacctatacctattgtttgcctatataaaaaaagagaagaagctagaaaaatgcatatgtctcatcttctctcttctctttctcttaacatttcaaaatatgctatgcattatggaattcaaaatttttcatgcctcttcctcaacgatattagccatatacatgtccttagtgagttgagaaacaacctattctagtcatgagtgataccgagaaaactatggaagactgtgatgaacataatcgaaggaggagaagatccaagttcagttcttggtaatactctacgatagaaaggaacaagggttagtgaactgaacaaaaagagacatttaatttttttgcaatcactgtaaggttttcttaaacttttatatgtttaatttaaactgttttaaggttccatgtttagaatgttagattggtaacacacttgtttagtaaaagtaagatcctggttaaatatgctttccaacaactgacttccgagccagggtaatcttttaatattcatgataaattggataaaaataattttgcttgtgtgtttttacatgcttatgaaattaggatgttacatgttaagtgggttatgtattatatgaaagattaattaattacaaattttctatacaaaataatttgtttttacgtatggaattattttattctgaaaatttaggaaaaattatgtaaatttgttcattacggatcttaattttgataaaaattgagaaaattatgaatttttgaaaattagaaaccttggcttccacacactcgggtgacagccaagtgcatgcgcacggatgcaagtatgaatgctcaattttcttggccattttgatggtgtgggcatgcgaaaccaggtgcatgctgagttgctcggtccttgcacattggtttcctttttttttctgtttcctattttgtatttgccatatcttttgattagaaagtccaaaataagtgattcaaaagcctaaatttattaattttttgatcactttctatttttaaagtcaaaattactaaaattagaataaatttacttttatttattaaaagataaatttaggatatttttgacttaagaattaaatgagatattttaaatatgattagatttgattttatttttaatattaaatgataagatcaaatattttaaatatgtgatattttaaagtttaaaattttcttttaaactttaaaattatcttattagatatttatattaaaagagataaaatctataattcaaacctagatattttaaaataagtcactataaactttgatatcttatttaaaattttaagatttagaaaatgataaatatatatttttttccaaaaaatatgatatttcatcattaaatcttaatagataatttaagaaacaagatattgctaattaaaatttgtatctcaaaaagctagggatattttatttaaaatatttaagattagaaaaatataagatatcaatgtgtaaatagatattttaatattttatgtaaaaagatattttgggaaataaaatatcacaatatatatgcatttttgaaattattggttatttatagcctaaattttgaaattcatatattattaaattagatatttttaaaataaaaatattttttttatttataatcaaatttttaaaaattatattttaataaaaaaatcaaattgcatattatcctattttttttttacctatttactattagtggttttatttgaaattttattttaagttttttttttataaaacttattatttaatttaatctaaatggatatgtgcttaaaatttttgttggattcaatgatccaaattaatcacagaaaattgatgatagacaaattaaataataatttgtagcaaatagataaatttgtaatttttctttcatatgcggcataacttaaaatatattaggtccatccaaatcttattgttatttgtgagcctatgtttgttattgggcttagagacatatagatcccattcaatttttgataattaaaaggaactaggtggctaattaaattggatcacattgatggattatttaggcccaattagaattgaacttattcaatgaataacaattatttaaataaaggttaaattcctctcttttgggccttgtctga

SEQ ID NO: 115889 - DNA, 1157 bp, Cannabis sativa
agagtacgtttttactttttacccaatcaatctcagccgtcagatcaaataactccttcctttgatggctgtcgtacatcacggattacaattcgtaaaaatacaataacaatacaaaatcatatccctatatttaatattcaccacgtaaagcttaatttgcttgggcataaatgacatcattgatctcttacatattcatgtttgaagtcataacaaagaattatttaaaggaactttctgattcggtatttggacgtgcccttcagaaaatgtctttacttttaacaacatctttttaagactcactcatcaattccaatggagcaaagttttaatatgattatgtttttattttcataaaaccttgaaacgcacactccttggacacgtttatcgattaaataatgagcattatctttcttgttactctaaaatcatattctttgtatatatttccaagactatacttataaattaagagtacctctggtagtgctagtcaattatgggtgaactgtgattaatgtaaaaattcgattccctataacaaatgaagttaaactattattattgtcgtgaattcattatcaacatatccttcgaaaccaagtaccaccagtcaaacaacatatactaataatccacctgtggaatctaaattattagagagtacttgttttctacaataagtttaagggcagtttacataattaccctttcaaataaattagaaaaattattatcttgtctattccattacactctctagcctctttattattaatcctcccatttttagagagattgattgaaaataaaagatttagagggagaccaaatccatttatctatcctttccttcctatttttctttttcatgcatgtcaaacaagtcaaattggctctctttctcagtacttctatccctccaaccctctcttttcatccaaattttcataccaccgaattagtattaataatttgataaaagaaaatagtattaataaataataagagaaaccgttagccaattatatagtatcatcatgttatcaaatagtaatgttttatatttaaaaatccaaacttttaattaaattggtctccactctctcgtttaaaaggcatcattaaggctgtacatcggtcggttt

SEQ ID NO: 115890 - DNA, 2800 bp, Cannabis sativa
  modified_base (2684)..(2693): a, c, t, g, unknown or other
agatcctggtaaaataatttccgaggaggaagcctctactgctaggatccgtcagagctcgctatctactgatgagattgataggatggttcaagaacttgctgaaccagtgatggttgaaatatgcgatagtgagtccaccggtattagctcaggactatctcgtccattcgagacatgcccctgatatcgaggttgaagaaatgggggaggacttcgaggtatatgatcgcgattctgaggaagagggggatgtcgaaggaagcgagagggattcagtcaagaatacccaactaaacgaaccattctcttgcaaagatttggtctcgcaagttacaaaattagatcgacatacgtttgcacggttgaatttagttcgcatagggactttaagccctttcacatcccaacgacctcatcttccctctacgaaccctacgattatcccaatgcaagatgtagtgatctcgattcccatcttgtgatgtggggtaacgctacctattcacccttttatgaaggccatcctcaaacattacgatgtctctcccttccaactaactccaaatagttatcgcataatactaggattttatgcgatgtacatggagtatgtttaaggggaaccaacgatgaaggacttcagctatttttatgacataaagagcgtcggccatgacaatggtttttatttctttagtaaattggctaactcttaaattaacagggtagaaggtatgatttccaatatgggagatcggaaatccaaatggttctacgcgtttaaagtaccaagagttagaactgactttattcgatgacctagtacgtcgcatatcctgatacttagcatatatttttattaccttgtatagttgctaatgtctgttttattaaccgtagatacatcggctcgactgatgttggaccctactcatagggagatcggtgaagttttaggtagcctgcccattcaagaacgcgactggtgaccactatgcacaactgcaaaattttgagaacacaagctcatccttgagaacgccagtcttcagcgagaaccagtatacaaggagccttctgagaaacaaaaggaaagaatagacaacagtctatcaaaacagacatcgagaccaacatcaggtaatgtgtttggcatatacaatttctttttgtgttgagaatgaattcttagcttatgatgttctcacagaaatgactttcctgaagaaagcttcaactttcaaccaaaaacctaaggttggtactgtgacgacttctccggtcattccgcagaagaggaaaagcgacgctgttcctacgcaggtggatgactcgtcgaagaagcagtaaaaaactgcccaagacaaggggaagaaagttgtgatcgatcctgctgtcagggcccgcgacttcgtagctcttcacaacaaatttgtgagcgatgagtttgtctctaaggtcgagggggttcctactgaggacttgatgccacactctgcagaattggcattgcaatttatgaccatgttctcacgggtttttgtcgcaagttccaaagagctctatcttctgaggaagcagaactcgcttctccaagacagcataaagaaattgaagctagaagtgaccacgaaggacaaagatattgaagatcttggaaaagctaaatagcaagcggaggaaaaattcaaagtcttggaagtgcgagttaacgaactcggtcgtgaccttgagaatggaaaggagatcgggaagaagcaatattatcacgatctctcagacgacgtttatactaccttgtccaagctgccatacattgactttgcaattctcggagcgaaggcagctaaaacagccgatgcatttcgcgctatgttgcctactgagaccccagaacttgggggaaatcttttccctgaggatgctaaaaatgcgaatgcggaggaagttgcaaatggtgctgctagcaaggtcgcggatgatcccagtactccagccccttagtttttccttaatttcttttgtatttttgaacttcctttctttttgggtggtacatgggtactcgcattctgtactttgaacaacttatttaatttatgttatcgaacatcatatccttttgaggatactttctttgcatacttatttagcggtacacgggtactcgcattgttaagctgcatttttaattaatatatgttatttttgcaaaagttttcatgaatctattcacagcttggtgtgataatgtaaagtatataaacttttgaataaaagtttctaaaaaagtttttgaaacttaaacatttcattaaataaccaatagtacaatattgatggttattatcccctacacttggtacatttaatgaaagaaattcactaagtataaatacatgtgagtactattgatagtaatactttaaattttctccattccaggctcttttgatggttgtaccgtcgagatcggacaatcgataagtcacattaccaattttttcaatgatcaggtatggtccttcccagttattgtccaatacaccgtgtgctaaattacgcatattaggcataactttgcgcaacactaaatctcatactcgtaggttcctttccttaaccttcgagttgaaatagagagttgttcgctgttgataggtgttgggctttatgccctnnnnnnnnnnctatttcaatgtaatctctatcacttaaatatcaataaagagacaaaagtattttcatcacttctttaatgtgtcatttggttcatgttatcatttatatgtttatt

SEQ ID NO: 115891 - DNA, 2030 bp, Cannabis sativa
  modified_base (515)..(519): a, c, t, g, unknown or other
cttaatctactttgcatgatgatgcatttacatctatttatccgtctgcttcacttagcatttatgatttatgtgcattcttcatcatcatgttcataataattattgttagacttagatttcattttttatgccttttctttgttaaagtagtgatgcatattatctacagaagggatttgtctctaccagtttcttctgtataaaattagccacttttagtaccactgccttttttctcgtgtactatagtgaattgtgctgaaaccatgagtgaaagctaattttttgactcacgtgtctttttgttgaaattatactgtgtataattgtcattcttgttagttttgaagagcatttgggttgcctctttgatgcatttctaaatatagaacaatttaaaatatagctgctccaatggtggtataagctgtgttctaaatttagcatggtgggcatgatgcaaatcaacattaaatacttattcttttgccattattattattattattatnnnnnttattattattatttttttcagtttctaattattatcaacattaaatgacaatatgacattttgtttttgacatttttcagtaaatactaaatgtcattaattgacccttgatttttacaccaattttatatttgggtattttggaacacagctataaaattttacagttgtgccaaatatattattttatcgacttgtgtgtgtgctaaatgtagcacaatatttgcttctctcattaaagattgtcttatgtttaggatattgcttcttgaattccggagagcatgaaatagaggaagatgattctaatcttgtgatttccattgttttatcgtgtaaaagatgtatattgttttgcttaaagtataattgtttttaactattacagtagtggtcatgtcatgtcaactgcctctagtttatactattttagatatttcaagttccgttaaccctggtgatgtatattatcgccgaaagctgctttattatcaacttacatctccctttaacaggtacgtcgcgtccagaaatatgtggacgcactggacaacctgaagggaagaaatgctaatccaattaacaaccctagcaatgctgtatcagtaacaacccaatgggagacatttgagaatggtgtgggaagcttgagtgccccacccccgacgcagtctccaacaaaagtaaaccaagattgggaacggtttgattagtgctaagttatattcatgtgatctataaaaattattgtaggatgtatacacaccaattattatttgaataactttgattcttcaatcatagtgtgagtttggttgtggtacgaacttgtctagaaactataacgataattgctgtgctcgggaacaaatgaaattagcaggcattttattagtttttttgtgttccttttctgtgattaagctgcatatatatacataccatatgttttgctctcaatacgatatttgtaaatgttattatatgtatagattgtttcctctgaccttatcagcaagagcataggctttcttatagacaaagcctccaagcatcgagtaccctgaaatcttatagacaagatgagcttggaggattactagccccaacaagacttgcatagttgggcgctgtttcggagaccattttctatgtattgttagcttgttcatccaaccaggggccgcgtaaacgagagaggttctgagcattatacttggttattggaagagttccatggtttttctttttttggctatattccctttttagtgatttgctgtatatttctctacttgggaaattcttcatgggattgagattgtggttataggttgtgaaggtttgaagtgaagtgaagaggtgagatgaacattatatgagattctcaactatctatggattactttaccttctcttgcttgggttcttgaggctatgcgagttctatttcttggattggtcactgagattttacgaggggcaaaagtcagtcattcaaacaccattc

SEQ ID NO: 115892 - DNA, 1404 bp, Cannabis sativa
aagagattgagccaccgttttgattagaatttctttaccaaagaatattaaattttaaaataaaataaataaatataatgcatttggaccttccacgtgtccatatttatgagttaacgaaaaatgctcaataattgatagtgtttttattctaatattatccatttacatcttacgattattcattctaccatatgcatatagataataatatcattcatcaaaacacattcaaaaggatgataattaatattgtatctaataattatactaaatacaaaagattataatagctaaagatcctacaattgattgttctccatgttctctggttctacaattgaactcacgtacggagaggcccatctctaccacataaatacacacacatatataaatatatatattcaagtcatcattacaatcacaataattccatcatctgcatccaaacctttgcttttagttaaacaaagtctctcaagctaacttagaataatattcttacacataaaattcaattgttcatagagtagtaacctttattttatatagtaatgttgatacctttctttcacaagttcccttaatttccacttgttcatatatatcacctacattaataaagaatatatattatgatatatttatttaattattatgtaataaattatgtataacattattagttaattaattttacccaagatggagcattttcttctcctggtgatgagagaaggaagttccagcagcctcaataagattaggattaaagaaattgcgtgaagaagctaatgcctgaatagcattgaactctgacccagataccatattgttggcttgatgaatcctttcaatctctgatatctgcagtacaagattaactattattacaattaattaattaagaaaacaaattaagaaagctctatatatataagtgttcatccaattcaatctgtactcttttgcttatagtgcattcaattcgcactaagtgcggatttcatattttgaatctaattaaatatatgtcataacttaaattcaatccaatccaatccgcaaaattacaaatttaattaattattttaaatttgttactttttaatatttattaaaaatatttattaaaaatattattttttacataattaacaacaaaataaaacaaattattatcattttatgtctctaacacttactaaaataaataaaataacataaattcaaaaaaaaaaaaattatatgtagaaaagatatttaattttgttttaaatcatatttttcttatacataataataaaatatatattttatctattaagttttaaaatatatttgtatcatatgtattagatttttaactttttttttttttttttgcattaaaatattaat

SEQ ID NO: 115893 - DNA, 1199 bp, Cannabis sativa
tttggatagatgatttttcatcttttctctatgtataaacttttgagtattttcaatgaaagttcattgtcaaaaaaaaaaaaaaaattaaatattggccgaaaaggtcaacattttcctttttcccaaaatgcccctatacacgtctctatttctctcagttgctctctttctctcattctctcttctctcgaaactttattttctctcatattcactaaccaattcactctaaaattttattgttagtatacaattaacctctttaagctactacaaactagtacaagttaggaagtttggtgtaagactccatattttggtaccgaacgaacttaggaaacaatcatgggtaagttattttttttattattattggttcttatatttaatttgaaatgttattttcatgaatgatttgtgggttgttgttattttgttgttttgtgtgttgaaatagttattgtgtgcgaatactgtattttttctagtttcaatgatttttttcatatagaccgatagggcccgaatgatagtccgatagagttttttgcggcaaaatcttctcaactattactctacttgtacttaacactctaaactcaaatcttgatggtacaaccctccaactactaaattgctaacaaatttaaggtctcattcactttccacaactgccaatataaattatttatgtgtatttttgtatatgtgctacatttatattagtatacctgatattattatttaaaaaaatacaattatttcaaaatttataatatttttttactttttaatattttatttttttatttttataattttaaaaatatttcttaaataataattttaagtgtaccaatataaacatgtcatgtgtacaatagtatacacataagcagtccatagtgacagttaaccggataacactttaaatttggcaccagttcagtagtttaaagagttttaacaccaaaaattaagcttgaagggttaaatgcaagtgaaacaacaattgggagggtttagccgctaaaaactctagtctgatataatgattggttccaaggatagggatgaaggcccgatagggcccaatggtagttatgagcttctaatcttttttcaagattattaagataatgatgaagcaaaatgtaattagatagtgtttatttttgtatgttgatttcctattt

SEQ ID NO: 115894 - DNA, 2512 bp, Cannabis sativa
aaaaaaaacatttctttcaattaccacctttagaaaattgctatttgtgttgttcattctcaatccggctgggacctatcagaactgatataataggagtcacgatctactaaacacaaccaattgccacacattcccaagtaattaaattggagagcaaatctactattttccgtcccacaaagttaccaaattaaatgacatgctctttaaattgaaatatgcatcacaatttcttttggaaaaagaagcaatatcattatagattaattattaagaaaaagttacaagtgtaattgtattgattttggtgtaagttgtttcatatacataagattaaccctacatttctgcggcaaaggatttaccacaaccacaagtttgtgtagcatttggattcttgaaagagaatcctccaccaataagagcatcactatagtccaattgcatcccaaatataaagagaaggctcttagggtcacaaactgaaaaacaagtataccagagaatgaatggaacttgtcagatcagataacagtatagtatcatacccaaaaagaagaaattattgacaaaaactgttttgaatctgatatagagacctggtatggtattagatttttaaattgaattcatatgagagaattttcattagtgatgttgattaagaaaccaccatatcaatagtactttacagtttacattatgtaaagagtctattcaacctggaacccggtgaaatttgtcaatgatgtatcttcaaaaggagctaataactctattttacactttctctcattgtttgaagagttgactcactaacaagtaaaactttttattagtgtattataagtcatgattggagtccatatgtgaaatgaagaattgaaattaagttaatctggaatttcaataattatatgtcaaatataatatttcactaggaattagtttcccatttcaattaaggcattttaaagttaattaaatcaaagttgtccaagttattgtgatattaatgaaaaaaatcttcaccaagaacttgaatgtttctctacaagaatattgttatcaaattttaggatgctccgttatatccctcgagacaaattattaataccctaaaatgatgatttaagacaggaaaagcatgaatatcatatttaattgcatcatgaaagaacataagaacacataccaatgacaaaaccattgtattcgatgatcgagtcgtctggtcttgcgtttgatctattctcaaactccattgtgtaagacatgccagagcaaccaccctgcttaactccaattcttaagcacaaatcttcattgcgttcggatctcatcttattcaagtgcttcaatgcattgtctgaaagctgaatcgcgggtgcgatgccctcagctgttggagcaactgaaacattggtaaaggttggtacaaatgttacgaaagagatacaaatggtaaagagaaataaaagaaacattggctaaaataggtgaggcctaaagttttctttgaattaaaatttaaaacttttccattccttcttctatagtaacacaattaaatatgtatttgcccttttggacactaaattaaaaagttctggagacgaaaaaactctaggtaaattaaaaattgggttgaatccaaaacccaacaaaatgctactgagacatacataacaagttacaatagcatactatctctcacaaaacaacaattggggcaattctctcaacgaccaaaaggcaaaatccaatatcaacgccaactaaggacaaaaaaattaaatatgttaattcaatcctaattgaacactaatacaattccctaaaattcaatttcaatatttctatacctataaatcgtagcagttaagaaacaaatttcagttgcaaatttctagaaacaagcttcaaaatcttccaattcacattattccattagtttcacaatattagcccgtaaaaatattggaaaacaaaaaggaaagaaaaaaacctagaaatatgagaagaagtagtaccagaaggagaagaaactgatcgaattgaaaggcgtttactggagctgagtttcaaatctgagaagccaaaagagagtgagttccgaggaatagaagatgaagggagatttttggggaagaggagaaaagaagggcaccgcggagtaattgcagagaacgccattgcagaagcttcaaaattaattttctgtttttcgtattctctctcttcgttaaaaatgagttcaagaaagtactaaattaaattttatcgaaaagatctcagccgttgtaaaactcgtatttgtgaggattctggagaaagatcggacggacaaggttactttctgtaagttggagaactaaagattgttcttataattaatgtggttcataataaatacattctattattaaaaaaaaaatatataaattttaaataatttttaaaaatcactcttaatatttttctataaatttttttcctcacattattt

SEQ ID NO: 115895 - DNA, 1779 bp, Cannabis sativa
ctctctctctctctctctcatgtcctctctttatcccaatcaagagttggaggctgatcgcgaagtccaatgaaaactcagttggtgtgtgagaacaagaaagatttatttcaagatctatacatttgtatttttgaagacctatttaagatctagggaaagagaatgagaaaaaaacattttaaaaatttgtgttctccatttttagaaagcctcatttgacacatgcattgcctaaatcactcaaaaaatttgattaagataatttctgatctcgaaaatcttacaaaaccctctttgttttcttcttcttcttcttaactagtaaatataaatggagagaaaaaacaaatgagtatgaacacagttaaatactcttggagaagattaaacaagcttgtctgatattttaagaggagatatgagataaaaaatgaaaaaattaaccaataattttaggtgattagaggatgatcatgttggaatttataccctagaatatatgaaacacaattataagataaatgaatacattaattatagaagtataattaataaatacctaaaaattccttattcatatatagatggtataatcttgtaaggtcatacgagaaaattatgattatacaatatgaataaaacaagtcggtagtgtattgaagtaagggatctataatatgaaattaccaagtatgacttactatacactatactctattgtgcatgattataattcgaatcacatatgtagatagacatgtagtaaatgtgttgtgtataatttgattatacatgactgaatccatatgaattaatatctttcattaacatgtcatttatcatgaaagagttatccatatcacgacgattatcattagtagatcagtctgaatcttgagtgttgactaaaaatttggttaactgacagcggagccttattaattgatgattatcaccatgtgtaaataagaagagtaaataataaatataacacagagatttatagaggtttgaccctcttatttagtaagataatgacctacattccttttaattgtattcactcttgagataatgccatgcaaatcacaagtgaaaagcttatgatttctagctatggctctctttagtattacaattgtgagaacaatatgttatagatcaagaattgatgagatcttgtgaagggctcaagaagtgacttgacttagtgtctaagagggatatatggagtatgaggattgagagaaaggggtcttgcacgtgtagcttaggcttggccctttaatgtatgtggaatgacttagccttgggagaatgatctaatatcctatatatatagtgtagggcttacaaaagatcctaattcaaataggtacatatatctctttaaaataaggatattaacatctttttatctattatttaagttacaaaaaaagatagttaaatccctagaaaataggactaatatctaaaaaaaaatatccttatttttgtgagttattgggcctgtactgcaagttgatctggtgtccgcagttgtggacataagttggctgaccaaccttattttttagggcctgactgacctatgatctcctacggccagttaggtattgttcatgcagcctcgatatgtgcatgttagcttactatgtgtctaccagccttcctatgtgcctgctagccttcctatatgcctgccaaccttggtatatgcctgtcagccttggtatgtactgtaatgaccgctctagtaatgtggattagtaa

SEQ ID NO: 115896 - DNA, 1014 bp, Cannabis sativa
agagagagagagagagagggcgaaggttttctctaagtctttcagagtggtatttgggtatattttaggaagagcttcaatatttatatttagtaaattttgagagtgaacacttaaatttaatgtaaatttgggtgtccatacttgcacctttgggtaaggaaaggctccattggacaaggagagaccccctttgatgaggggaagctcccttgggaaaggagtgacactcctcataagtggggcgaggagctatgtgaagagggaagtggagcgaggagtactacatgctttgttgtattgtgagcctaatttgctcaatattactacgatttggatgattcaagatactttaaaaagctaagaaagagatctacatcatttatgttttgctctaaacccaatcctgactttaaagatgcctaagagcactaacaagtcacgccttataactggagtcatcaatcatttttcgtttctaccaataagatacttaaaatgacttaaattgcataatgggcctccaaatatcattgtcaagtggtgccttcatgattagagactactttgctcggaataacttcgatatttcaccttatgaaatcattatcaatcttgcttgttaaggcctcgtcttgctcattagatgagacacgaatgtgcgtttgattttcaagacaacataagtagttgaggctgtaaaagtggctaatattttttgtgatgaggacaatgatgatcaatccctataacaaactcaacaccaactcaaaagacagatctagctccaatcactattcaagtgatcatctagactataacagttggtaggttggagagggtggaaggtctacaagcatccctcctaaagaaccaggtgaagaccctatagaatcaatgtgttatgatgggtcagttgaagctataagaatatttttattttaagaaatatatttctattcaaggaaataaatttctatttaaggaaataaaataaataattgattttgtgat

SEQ ID NO: 115897 - DNA, 2646 bp, Cannabis sativa
gaaatttggaatgcagtggcggctttgcaccctctgaaggccccgggaccggatggaatgccgggttttttctatagaaggtattgggagattgtgggaagcgaagtgatcactatggtacaaagcctttttggttcgggtaggatggagggccaactgaattatacctacatctgcctaattccaaaagaagatgatgcttgctcagttgataagtgccgacctattagtctatgtaatttcgcctataagataatatcgaagatcgtagctacaagactcagggcggttattgacaagctagtttgtcctcttcaatcggcttttgttcctgggaggtggatagctgagtcatctatcctaacacaagaattgattcatacgatcaagagaaagaaggggaaaagagaactcatggccattaaattggatatgctcaaggcatatgataggctagagtggaatttcctaagggaagtgcttagaggaagcgactttgatgaccaggtgtgtgctttaataatggaatgtgtaacaacagtttcatattcagtccttctcaatggagtgcctcagaagaagttcttccctaagcgggggctctgccaaggagatccgctctcgacttttctgctcctgatgtgccataatatcctatcaaaattgttgttacgagaacaagttgagggtaagctgaatggaatttctatctctcgcaatgcccctgcgattagtcatctcatgttcgcagacgatactatcttatttacccgtgcgaacatgaatatggtgtcgagcattctgcagtgtatcaacaagtacgagtcgtggtctgggcagaagtgtagtttggcaaaatccagtgttcttttctctggaaatatgggaggcagccaaaagagcaatattttgaagtacctgaatgttaaggaatgtagcggtcaagagaggcaccttgggaacccatttgttttcaaaagaagaaaaagggaagagtataagtacttaaaggaaaaggttctcaagaggattgaaggatggaaaacaaaactcctttcttttgcgggtcgcactacgctggtgaaatcggttgcactatcaattccgttgtatgcgatgtcgacaaataagatccctgtatctacatgtcatgaaattgatagtatcattcatagattttggtggataggaggctcggagaaggagaggtttatggctttaatcagttgggatcgtctatgtcgccctcttcttgttggggggctgggatttcggaaaatagaagacatgaacaaagcacttttggccaagcttgcttggcagttggctgctaatgtttatagaccctgggtcaagtgccttgcagccaaatattgcagaaccaattcaatttggagtgttgaaacaaagaataatgattctgctctttggaagggtattttgagctccagggatattctctacaagggtgggatgtctatagcgagaagaggtgatttaatagacatttggagacaaccgtggattctgtggctcgagtatggggaattcagagaaatcatggaccaagctaggctgcgttatccccaaccgaaatcgattgctgatgtttcaaatgatgatggaagttggaatgcagcactaatccatggcatctttgggggttcattgggggatagaatttgtaaaatagctcgaatgcctttggggaacaacgatatgctagtttggaaggaagtaggggatgggctgttttcagtgaaaaggggcttcgaggccattcatgcgccaggggttaactcggacaacagcctatggaagttgatttggaatcaacgcactcatttcaggcattcggtcacgatttggagattagttttgggttgctttccaagaagagataggctggggttcgttgcggacaaagtgtgcccgttgtgtgaaatagaagatgaaacgactcttcacattttttgggactgccattgcgctcgggcaatctggtttagcagtccttttgcttgtaatggagggggtgatctcgggtttacggttactgtcaaagacagaattgagtggatgctcactcgcctaccgaatgagctcaaattcaattttctgaattttttgggaagcttggtcgaaggagtgtggaaagccagaaatgagtggatgtttagaggcaaagagataaacattgcagcagttaggtgtgcgattttgaggaaatatgctgaatgtttaatggcaggggagcccgattccgagatttgcacgagtattaggcaagtaagagcaagtgggaagatcaacaatgagactgaggtgattggtgtgtgtgatgcatcatggaaggatggtgaagaaggcttagcagtggggctgctggaaaccagcggaaacaaagttttctggtttgcgaagaaagagaaggcggattcggctgctgaagcagagttcaaggagattagatgggtgatggatcttgctactcaataagggtactcctctgtagcttttgcctccaatgctatggttttgattcaagcattacatgaaagaaaatgtccacctctgtggaagctaagaccaatggctttggagttgttaaactttagacatgtttttgtgttgggttttatgccc

SEQ ID NO: 115898 - DNA, 3291 bp, Cannabis sativa
tttttttttttttttggaaggaacagggtttgttgattggggttgaacatagtgtatttgattttttttttaaaacaaaaaaaggtaagggctgtggttaattattttttttttatactttttattcaaaaaaaaaaaaactattttctccttttactaaaacgtaatgcacaattttgtttagtcttttgacatggtatgaagttttgttttgttgagtcttattattgtgttattgatggagccttgtaattagaaattaagtccccaatccactatcccaatcaatccaagcaccattttcatcttggagcttatgaattaaattttgacatttccgagagctagcgaaagcatgaaaatacttactgttttggtcaccctctttaagctagagttgctttgaatgttgcttccaaaacatctctcgttggtaaggatttcaaacaaatctttctgatcctctccatatttttaattgaatagtcatcacgtcttcctttgagctgcttcaaagtcagtttggcctctttaattcttgaattaaaatcactagtgtaatgttgccccaactactcaaagcatcaccacacatcttgattttattttggacatccagccacatctctctctcccaaacatctttgaccacttgaaagcataatgactctcgtaaccaagcattctcaaatttgaattttttttcggaccaatcacattctttacaatagtcggctcaaggtaaatagggcaatgatccgaggaagagaaatttagattataaagcttcgaagaattaaaaatttccagctaatgtttcgaaactagggccctgtcaagcctaacttccacccatctaggtgtaccacgacatttttcccaggtaaaagggtgtctaaccaactccttttcagtcaactcacactcaaaaagcacctggttgaagccttggattaagctagatgggtaaggtcttccaccatgtttgtcttcttagcttgtaacattgtttatgtctctaataattgcccacggccaatgagtgtcttcagcttgatgcttgatgagcctccatgtgttgtgccttagactcctattaggtgcaccatacattcccaccagtctccaaatgggttgcccgtcaacacacactttaacattgatatgtttgttcaaaaagtctataagttgcacttcctctttatttctccacaataatgcaattccctcactatgaccttgggcttttacagtaatagcactatcaaagtccatatataatctggcccgctccaccacatctttaccacaaagagtttcacataaaagaataattttggatctcttttgaattaccaaatccttaaggaattgtaaattccgtaagttctcaagcctccggtaatttcaacttaaagtggtcataattctcagcaggacaccagtacccgccccagaactcaaatcctagccactctccggatgctattggggtggataataaaatttttaatatagcacgatttatattttttattttttatggcataacacttgtccgtattttggtgagcacatataaatattgactgggcagcacgacacgaatttacaacaataattttgattattaaatatacacacttcaatatttaataagactactcttattgtcatataaataacatgtggttggctatcgaaatcgtccgctggattacgtctacacaaatagcgtgaacagtaccaacgcgccaaatttggttcgtacaccacaatctaccacgtgcaaagaacaaaataggattgaaagttgtagacgcgcctaaaagaacgggggatagagaagaatgatagagaccagcggcagacacacactcggggagcaaatccgaggcaaaatcttaaagataaaggaaaaatgaagaagagagaagggtataaacgtaattaggtaatagcaccgaaacaacaatgatgataggacgcggcttccttaaagatggacgcgtaccggtaaacactgaaacacgtgtctagttctcacttgctggacccatttcctcactcgcacttcaccaacagtatataaaaaaaaaaaactgatgagcgattcaaacggattttagagagacagtgacgtggccgagatctctcatagttgttggaattggtcgtcacctcatcctgccacttatacaaattatggcttgcctttggcccactcttcactttggagcgtatgcttaaaattgatttactcttttcttttattctttacatattaaaaaataatgttttttctttttaaacaatttaatgttcttttctttttggtttgattgcttcaaaaaaaaataatgtttgattaatacataagagactgcatgagcatggataatggattctagttttataattggcattttattgaaaactttttaagggaaaattaaataataaaattattatgagttcttttaatgcacaaactccaaataaaagaaaatagaaataccaaacatgtcttgaaaggaagaaaaaatgtatttcacaagattttttgcttgatttgttcatgtcctgaaagaagtatttttaccgttgaatatgtccaaaatttaatacataaattaccgaataatctagtttttctcttcattttaaattacacattctttttgaatataatctgccatcaaaaaataaatgaacatacttaatttataaagttaacatgtttaatttatgatggcagattatattctaaaaaaaaaaaaggtgtaatttaatatagagaaaaagttaaataagaaaaggggatcatatgcttatttcaaaatttacataatggagaaaaaaaaaataaggagagttttatttgctcttaaaaacttaagtcgtctttgctttgatgtaatgtaatataataggaatggtaattgtaatatgaatggtaatataatagaattagaattgtaataggaatggtatcatgatgtttaatttggtttaactctgtaacgaacattgtaatcaaataaaataagttgtatattgacaaaaatacccttagttttattatttttaatagggtaaatagcggcataagtactcaaagtttaaatttgtaagcggcataaactcaatgtttatttttaccggaattagtacccaatatttatgtagaacttgataattaatcgtactaatagtaatatgacacgaactattaatgtcttttaacattttaaatttaatttttactaatttttccaaaaaaaaaaaaaa

SEQ ID NO: 115899 - DNA, 1326 bp, Cannabis sativa
gccacattatgggccgcaaaattataaaatctactactattgttcaaaatacaactcatacaaaaaggaaaaaatcttttacaaaatgagacaaagctctggagcctccaacaagccttttttccgttgagtgtattgaccactactttagaattgcactccacaattatgaactggtggcaattatctttggcaactttcaaagccaaacaacaggtcgcttcttccccacacaaagcgtctgtaaaatcgaaatttttagtttgcacctggagcacctcgccgtgatggttcgtagccacgactgcaatgcacatgctatccagtccaactctaacatcacaattaagtttgagccaatcttggggaggaggaagccaaacatccagcgcagcaggggtaggggcgcggagaagagaagcgcagtaatttgcataagatatagtaatagaatcaataccttggtttacattatctagtttattattgtgtagctaatcattctaaacccgccagatagtattgacaaccgttgaagcatagagaaacacttcatcgatattgagacctttcttatttaagctctagagaaactttacccagtcccacatgcgtataccatttccaacaatcagaaaaatatcccagtgagaagatcgccacaagtggaatgccaagttacatgagagaaacagatgttcaagtgattcctcctcacacccataaataaggcagctagtatcctccagcctgaatcttttgttgagaattgagcgcatcgataaagctttagacaagatacaccaccataagactttttgacggtccaagatccttctattccacagtttattccaaagtgtcggagcaacatcacagtgcagtgcttctttgcaaggcttgggccaagtaagcaaacttacaagaataccttccatgcttctccaaagtctaaatccaattatctttgccctagcccgaaggctgcccaccttttaaaatggccgcaacaatttctttatcaaaaaggccctccaccttcttgatatcccactccccgctatcattcagcagctcagccaccttagagacatggggagcattaggatcattagaggacgacattaagtttctgttgtggcaaatccagggatccacccaaatgttcgtatttttaccatcatccaccaatttgcaagcacctttccggatgatggaattggccttgatcgcattcttccaaaaccacgagtcagaattcttatacccacagttaagaaagtctttcccttttaaatactgaaaaaccgtgtttttgcaaatgtc

SEQ ID NO: 115900 - DNA, 1213 bp, Cannabis sativa
tgttctattgataacaaatcagattatattgaaatggattttacttagggcataaaatcccaaaaaaagcttcgactagaaggcaaaataaccaaatcataagtttgaaagactctgaggggaacttgagacattcggatgatggccttgaggatgtaatggtggagtattatagaaagctctttactgccgagccagcaagatggaacgaggtgctggagtgtgttgatcctactgtccgtgatgatcataatgaggagttattgcggcctattatggatcaagaagttaaagatgttgtctttcaaatgcatccagattaatcccctggtcctgacggtatgaatgcaaagttttttaaaaaataatggtccattgttggcactgatgtgatcaatacaattaaacatttatttgcaactgagaaaatgcctgagggaatgaataacacaaatattgtgttaattccaaaaaagaagaaacctgatcaaatgagtgaattgcatcatatttctctctgtaatgtcattgctaaagtcattaacaaggtgcttgttagcagaatgaaggggttattatctgatattatctccaaacatcagtgctttcatccccgggatattaatcacagataatattatggcctcctttgaaatctaacactatctcaagaggaagcaagtgggtaaggatgggtttatggctttgaaattagacttaagtaaagcatatgatagagtggattggcatttcttgtgtgcgatacttactcgaaccttctggccaatggccgaaccttgggccaaattgtgccaggtagaagtcttagacaaggcgaccatatatctccctatctttttcttgtgtgcgctgaagctttatctgccattattgaaagattttaggagagaaaatggatacatggatgtaaagtggcaaatggagcgcctagtgtatcccatatgctttttgcagaagatagtttcctgaattgtaaggcagcacatggagaggttactcgtgttcttcagttgctgagtttgtttgctatagctacgggacaacaagtgaattttggtaagtcatcggttttcttcagtacgaatacttccacttgttgggttttgtgccctaaataaaacccattttaatataatcagatttacttattcacatgatttattcatgattatatttaatatataaattttat

SEQ ID NO: 115901 - DNA, 1824 bp, Cannabis sativa
gtctaatttattaaatctaaaaattgttttctttttcatttattcttttatataatacatgaaatttctttattaattctactatttttaacatttatcacgaagtgccatctttttacatattttaaaaataataatttgctaattttaatactattacttaaacatatcaaaatactatattttaataattatgctcttttttgctctttctcggagaagagcctttccctgtaggaatgcctcaaacgcctgacctgactatggaagatcttcttgatcggacgggaaacctgagagtcgaagacgaagatgggtgggaagtcaatgaagaaagggaagcagaggtggggaaatcgtaccttttgggaagattttgctcgaacaaaaatatgaatagatcactcattcggacaatcttgggaagagtatggggcttggcagaagtggattggggagtcaagataaagaaagtcactactgaggggtcgttcattttctccttcaagaacgaagacgatttgaaacgaattgtgaataaatctccatggctgttaaacaatggagttctaatccttcaacggttcacaaagattccgactaagtgggaggaggaattgaaccgctttcctttgacggggagagtattaaatctacctacgaaatcaattactcggaataacatgctacggctagcatcaatggcgggagaggtaattgaaatccaaaaagaagatgctacaaagattaccttgaacggatttttctggttcaaagtttggatttcaatcgataaacctatttgtctggggtttctttttccgagttctgggggccgggtttggttgccattccgttatgaacgattaccctttatgtgtttcagctgtgggcatgtaggtcacgacttcaggacatgtgctaagcaccctgagaaagtttctgatggtgagggcagaaacactacagcttatggtgtatggttgaaagttgaagacaaatctcaagagaataagggaaagaagccacttgaagaggcagggggcattggaatgaaccgaactcgatctcagagggatgaaatggtgaatggcgacctggggaaacatattaaggaatcaattggtgactcctcgatcttgaattcttgacgcaccaatggtggaatgaaggggattgaattggttccaagaatcacgaatcagaattccctacgtgtagaggtactggtttctaacccttctttgtcttgtgattttatgaacctaatggacaattttgatgtcaaacgggttgagaaggattttgagaatgatggagggacaggtagtaaaaggagggcagattattgggagtctatgaacaggggtgaagggtccgagattgatactgggaaaagaattcatagagagagttctgaagtgcaggtgaattcagagttgagtttttctaatgaagggagagagtggattgacatccctataactttagaaaatgatctcgggggtgagaactcaaggcagaagggagaaaggaagaagagggttgtggctaaaaggaataaaaagattgatacaaagaccaaatcaccatgtttgactaacaggaaaggaacggctgagcacttagagcaatcggtgaaggagaaggatccaggggacatttctagctttttggatttggtctctggggtaaacttggaagcggcgtacccggtggagctgggtcgccgagaacaatgaatgccatgttttggaatgttcaggggcttgtgaaccccctggacattgaagactctttgttcccatgtgaaagatcatcatc

SEQ ID NO: 115902 - DNA, 1143 bp, Cannabis sativa
attattattattattatcacttgacaatattttgtatttttcaagacatttggttgtgaaaattcttgcttcttccaaaacactttcaccatttttcccataaaatgaagcttcatataaagccaatgctcccataatatcatcacttatacttgccttgaactctgctgtctcatcatccttaaaatcattgaaaatttctgcaataataatatcacaaaaataaaaatgatttattataaataatagtgacggatctaagatttaaaatgaggagaagtaatatttttttagtaagaatttaaacccttaacttctatcatatatgtattctatacaattacaccaaaactaataatatgtctataaaatctataaatattatcttttattacaaatatatattgtagctaattaaaatgaaatacattttttttttaatttttttagagattgattaccccctcgcttctacgtggatccgctctatataaatcacataaaaatttaaattattaattagttaattatactaatctttaccttgaggtactacaaatccatattcgcgtagaagtctgaattccaaagaagtagcatataagtcataattagggtttttattcataatatttatattattagtgtactttttctttaaaatattatatatttcatttttaaaatgataagatattccaagtctttgtaatgtatcaatgaactcaagttgggctaaagaattaatttccatgccaagtagcatcattttcacatcattctcaagcttttttagtcgatttgtataagcttctccctgcatgcatataacaatatctcttaatagataaatcgaataaagttctgatgatgatattgttcaaaagagcataattaacaaatttaggttaactaattaagtcgtttacaatattaaaatattaacttatatatttttataataagaatagaattatgcattagtaaataaaacattaacttatgtttatatgtatgtaaaaatagaattaagcattagtaagtacactacaaaaaattgctacctttagtgataactttttagtcacaacatattttttttgtgactaaatgttacttatgactaaaacatagtctttagat

SEQ ID NO: 115903 - DNA, 1595 bp, Cannabis sativa
cttggcggtgcttgtacatgttcgggccacactagaccaagcaagttggggtctaccaatgatgtacttttgtaactctggttttgccgcttagattggctagtgaaaaggaacaattataatagctatagggaatctaggaccaacacaaaagggcatcaaacaaccaaaaaaaacatataccttgcgtaagtagtgaaaatgtttattatatataattatatatttaaagatcaaggcatgtgtatatattcatatagtttgtcacgtaccatgaattatttggtccacttggacatagtaggccaaaaacaattaaaaaagaagacaaaaaaattagaaaaaaaaagacactaaatttttcgatcagttagtccaatcaagctaggtaccacaaaatttggcttttgcacaaactaacattaccaacaaaaaaaagcaaattataattagctagatgttggagtaatgtgtgaaagaaattatatatatacataaaattctttgatgagagttttatgtggagaaattattaactaattttgtttatgttatagtgtacattataattatactagtcatgatgtttgtttttagggaattctaaatatttataatatctaaaaataagattcaaacattcagttacatgtgttgttttattttacacgtatgcaataaattattttaaattttatttttaacacagtaaaatattcaaaaattttcgaaaacagacataatattttttataactacaatatacaatgtcacataaaaaagttaaaatattaattttttaaagtaagaaaaacaaaaaacacccctataataaaaacagaagtgttatgctcctaccaaagaagctttctatattttaatagcttttgatgaaaaagttttgatttgaattttatgttgttatataaatatgaggaattaaagtaggtaataaataagaagaatgggattagtgatgtgtgggagtaggaggacatgtgaagagaagaaagagatatagttatatgtatagagaagagaagagaaaagagaaagaggggttaatagtaggggtagtggtcaaattaagaaggacaagcaaagcatgcccaacaagagtcacacggtgcacagcgcatgctagacagcccatgggcccactcacacacacacccaagacatcccatcccatgctaccaacttatcactactaccatgcaccacttatttaattaatcacctatcttacatataatctatatttataccacttatcaccctatcatgtaaaatagttatttgacctatatatatatatttttttttctaattaagatttttactctctgaactttgacatatactaaatcatgtcctctaaacttttaaggttgttaaaaatgcttcctgaaacatagagattattggatttaacgacttttgtctaattttagtaaaaaaagtataacataaatgaaagttcagggggcatgatttagtacacgtaaaatttcgaggggcatgatttggtagatatcaaagtctgagaaacatgatttaatacataaataatcactgaaatagtaaaattgaat

SEQ ID NO: 115904 - DNA, 1410 bp, Cannabis sativa
aactaactattctgttcactaacaacgtgcttttactcttcatggaacagtcgagtagataatcattataagaagaagagattcgagttactcaatctgaattggaaacctaactgatgattcagccataagcgtttttttaatttctattttcgttttctgaaagtattatcgttttacgtatatggtattgttttgataacaatgttgtcgtttttagtagataggatagtttttcgcattcaatgtcattttaataatattaaaaattcatttttggtaattaattcacattcacatattttttgaatgaaagtggataattcattaaatagctaaatctactattacaattgactgaagaggaggagggacattactctcgataataagacgatcagaccaataacaagcaccgcgagtcatacaatgtgcgactttgttaccaaatcgtttaacatgacaaatcataacattatttgaaatagattaaagcaactgaaaatcttgaacaaacaaactaaagattgaaggtagcaaaacaaagctataaattgcttgcacaaccacgatgcaattggtctcaattaccacattcgaatggttcttttttctgtatccaacttagcgcctctttgatgctcaccacttctgctactaccggttgacaaatgccactggtcaaagtagaacaagcttcaatcaacttttcatgccaatcccaagcaataaaaccaataccatactcattgttagcttcaaaaagcgcaccacccacttttgttagcctcgatgaaagttgatgtatataataagattaaagagaataaatgtatattttaaatttgatgaaagttgttaacccaaaaaattaatagggctaatccttgaaattaatcaacgattaatctcgagaagggaaaaaaatcagctttaagagtcagccaagtaaaattaatggcctttgaccaaaccctagctagcttgggaaccactcggccaagtaggactgctagtcactcggccatgtatggtgatgagtcactaaatcttacatggtggagagtcactcggccatgcatggttttaacctaggtcacttggccccatggacgaaaccgcattattctaggtggaacaatttcttcacttcatattctcaaaaaataaatgtgtatacatacatatacatgtatgctaatacacatacgtacacaaattgagtttaaaatattaaatttatggaatgttaaattaaaaggtaggtaccatgtaccagttaggggtggcaattcgtgttcgcaggtcgtgttcgtgtcatgtcgagacccatgtataacacgtacatgcttgacccgaacacgacctgtttaataatcgtgtcataaaaatgaaacccgaacacgatcc

SEQ ID NO: 115905 - DNA, 851 bp, Cannabis sativa
tatttttgaaaaaaaaagttttgtctttccttttttgtttattttttcatactaagataaaaatgtaaattttggatctaaaaagcctattaaggaaaatatccctatttttttctcaaatataatcctctcggggctatggaataagtgtagaaatacattaaatctctaagtcctaactctgaacccataagtcttaaatctctctctcgactgggatgttttcttgccagcaacgatgtctcgctgtcaaaaataaaggacaccacgggactctccatcgttctctggagttaaggccaccgtggcccttgtcgggtttcaaaccacgagctctgagtttcttgaagctccctttgtcgttcagtcaccgttaagagctgtcggcgtagaaacttttgggtccgatctaatcgtgttggagatccattgagtataatgacttttaaaaacgtggtctacttgcaaagatctttcaaatctcgtcgatggtttctgcaagcttcatcgttgatggtagacagccaccgtgcgcggtgaaactctggtgatctcgggggcataggtatggaaagggatgggggtgtgggtgcaggtgcgggtcggggtgtggctggaggaaaaagatgaagtacgagtggtatggctggaggaagaagaaggtgtggcaagaagatgaagtgggggtggagtggtgtggctggaggtagatgatgaagtgggtgtcggtgtggtgtggctgaaggtagaagttgataaagaaaaaaaagaaaaaaattatttaaaaatatatattttttaatttaaaattatttttaattaaattattatttggaccaataatattttaa

SEQ ID NO: 115906 - DNA, 1266 bp, Cannabis sativa
tttagaaacccaaactgtaaatttaaaaaaaaaatagtatatgggataattcccctattttatttaattaaacttttagtatttttttattggtttgaattaatatacctataaatcctaaatctatatatacttttatttcagaaaacctaaaaatgtaaggcttttcatcattattcactgagagaaaagaattgttcttgctaatgtgttcagaaaaaactcaataataaaatatacaattttatcataattagcccacactaattcttatatgtggtggtatatctggaagattgcactgtgagtttgtcatcactatcttaaggatacaacttacgaaaaaattcgaggatactttgactcgttccaagagataaatatatccttttattttttattccaaatttaatatatggacataaggatatcctagggtgtggtacaataataatcgttattaatacttctgtcgcgtacctaatttagtactacaaaactaacaattacatgtattgattcttgagttatcaatcattcttgtaataagtagcttatgtttctactaccaatgctcataggaattgttcaaacctcgagattgggatatagtttcactactataaaataggcttttttctacttgtcaacacgacggtcaaagcccagaattgacagaaaagattagcaagaacatttatggtcgattttacaataacgcacgatagcatctattgaaatagacgtaagggtctttaccgtcgattcacaattgacgctacaaactaattttttacctctcagttgttgggccaagcacgtttaactaaattaaaccctatatccctcataactcaaactttaaaaatatatgtcgcccactcatctctctctctcattgtgatttttgcagatgtggtgttcttgggtgaaaacggtgtcattgaagacaatgctttggcatggttgctcgagctctggtggtatttggtggctctggttttttctccagtggagagctatatatatttttttaactcgtgataaatgttcacttttactggttaataggtgcccaaattttttgcacctacatagtcgtcgatttggagaactaactaaaaaacgttatgcagttgattctaaaccgatgagaaaaccaaattttgcagtagtggaatttgtttggtttttaagggtaaatgccattttggaccctgtattttttaaaagttatcaataggaccctctgttttgttaaatgac

SEQ ID NO: 115907 - DNA, 1883 bp, Cannabis sativa
atttataattagacacaactttttacaatttttaaaattaagattttttgtagtgcccaaacatatcttcatcgacactaaattctattgatttcacttttggccaatttcccaactgagttccgaatataaatcaacttcaaagtcattcgaggggaaacgtaacaattcccatcaacatgcttattcaccctcttatagtgttttagagtagtgatggaaatttgacccaaggggacgggtatccacctcgaatgggatgggaattacccgccttaatgggtaataaggcaagagtggggtgcaattttatatacctgaagagattttggggtggggtcgggttgatactatccaatctcaacccagatatatattgtttccaaatattttatatagttttctaattattacgtacgaaagttattggctatacttacaaagttgactattaatctttcctaataaactgtgtaataaagactttataatacgtaaaatgtttgtttattttaaagtcaatatcttgttttatatttttatttcaaattacattgcgttatattattattattaattattgtattaattttaatgggtatccaatgggtccccatattcaatgagaattctcctactctaaatctattagagattaagcggggcgggggcagggatgggggacataaatgagaaatgggaacaggattgagaggtgcattattacccgtttattatccacacaatttctatccctattttagaggctgtgttggtgtacaaagtgaatcttctaatttttgtctcttcggctgctaggttatttttgaggctcatgcgtatatcaaaaaatatttaaagttagaattttcattaattaataaatcaaataagttaagtaaactaatataaacattaaagtttctttatctgatcaaagatagacctttggccatgctacaaagtagcctaccacttcacctagtcctataccttcatgatcgataagatttggaagaagaatattttctacaatgacttgtttgatgaatacttgacaatctttgatgtataagtaatcaatatgtgggctgagaactttctaaatttctaaatcaaacatgaaataatacaagaaatcgactatagttataattttacattaaatcaattttaaaaataatattaatattacttcttccaaaaaaatatatattcaattatgcttgaacatgtatagtaattaattagttaaattaattttcacacatataggaatatttactacaatataatcttacatttttttctttaatatgtatgcctttttagagaaatttattctaattttattgaaatattaactataattggacattcctaaaaattttaaatatacaataaacaacaaacaaagcacacaaaacaaacaaaacaacactaacaataaaaaatattatgcccatccgatcgcagtacatgcatcagtagaacttaattcactacgctattcaaacttatcaaacactacagaaaaattaaatttttccggcgaaactacgaaattacgccgggaaaagttcccatcggcacagttagttagtttcaccagcgaaacaaagaaattttttgcctcctaaatttagttttgccagcaagttattttgccggtagtagttccttttaccaacgaaattaatgaaattatttggtgaaagtgggtgagctaaactgccaaaaggtgattcttttttcatagtttttttagctttaccagcgttatatattgttaggctaattttagtctaagttttgggtcaaattttttgggtagtttttgctctttgtttctagttttagggctattttatgcttgattcttt

SEQ ID NO: 115908 - DNA, 1562 bp, Cannabis sativa
cttgtgagtagatttaagatcctgataaaataatttccaacaacaacatctctcaatctaaagcagctggaacaaagcagccatgttcaagtatgtatgggttatggcaactaaagaagataatctatgggtcaagtggatccacagtgtatatatcaaagaggtagattagtggagctactcagccccctaacaaggcagctggtattagaggaagatagtagcaatgaaaggtatagtctaacacttatgaatccttcatccttcattcaaagcaaatacaaaattgcagatggatacaaattgttttgccctatgccaaggcgagtaaattagagtaataaagtgtggggaagattaaacactctgaaacatagttttgtaatgtggctacaattcaaagcatattgaagaccaagtgaagactgattcggttcaacattatatccaataatacttgtagtttgatgtgtaactttggagatcaaataattgaacatttattctttgagtgtccattttccaatatagtctccaacaggttaaacagtggctggggtggaagacccttgctaatcgactagctgatttggtttgacatataggaaggaagaaaataactgcctttcaaaagtaggtattttcaacagttctgacaacattggtatatcaaatatagaggacaagaaacaaaagattctagcttcactcccatgatgatccaaaaactattgtatagaaagtgaaaattgtatgtaaaagtagaatccatattgtatggcccaaaaaagtttcaataggagatttagaatggtatactacattataaatacaactatacatagagattgtattagattaaaaagtcaattaaggcctttattataaatgtgctgcttaattttgtaaaaggttatcggagtaataaatatacttctgatttcttaagaaaataatatatatcacattttaatctatatttattatattataaaataatataacaatgcggtcacttaatgcaatcgttttggttttcacaacattcagtttgaatttgattgcaaatgcttagttcataagcttaatcattcttccagtttagattcatctttggggttactcctcactgatatcaaagcatcttgtaattcttttaatattgtgagctttactttttgtgctagaactgttaatattgttgttaatactcttgctaagtttgctttatcaacaactgtaaacacagtctaatggccgggatattctcattgtattagacactttattttgactaatgtcatttattaatgatatcaagctctttattgttgttttctgaaattattttcttaaaaaaataaataaattataccaaataagtatattttactctccatcaataaaaaaaaggctaattatgattttttttcccaaactttgacatgtaccaaatcatgccttttgaactttttggccgttaagaattctcctgaacaattgaaattgttagatttaaggacttttgcctaatttcattcaattttactgtttcagtgatt

SEQ ID NO: 115909 - DNA, 886 bp, Cannabis sativa
gtagtcatatcctcatctcgccaagaaccacttcgctttgccttacttggtccttccaacatactcttcactatagatccactttccaaagttgaattaccaatggagattactttctcatttgttgtcggtttcaaaaaatcatcaccagagaccacagtttttcctttgtccaaagaattcagattgaatacagttggttgatgcaagaattttttaccattatttggttgctgtccagtaatcacttcctgtgttggcctactcccaatatcattcccaagttcgggggggtggaatttaaattggggcttcgtatttcagagaaacccggaggaatggaacaactggtctttaaagggtatatcccaggcttagccgcattagattgagcgcttttatcatcaactttcagccaagaaccaaatcccggtttgacattacccatgccatcctcaaagcacttgattggttctgcacaaacccgagtatcatggccaataaaaccacaattaaagcacataaagggcagacggtcatacctgaacgggagccatagcttgcggccttcggtcagaaatagatatcctgggcaaattggtttgtacaaatcgcaccagactttaaatgtgaaaaaacctttggttgcaatcttggttatatccactctttgaacttcaatgagatcccccgcaaaactggctaatcgctccatattggccttcgtaatagatcgagtaggtagctgaaggactcgcccattcagaggaaatttcgttagaaccgcattccaatcatgtgggattccagcaaatctttccacaattagaaggccattgttgaggaaccaagggttcttggatagaattctattcaaatcttgaga

SEQ ID NO: 115910 - DNA, 4538 bp, Cannabis sativa
ataataataataataaaatttattcattatttttttttaaaaaaaattatcaaaagaaaaaaaaataaagcaagttcttaaagttaataataaaaaaatttgtaatgtgaaaaaatttaaaatgtgttaagaataaattttagaaaataaattagtttaacattttctaatgaatggagcgcatttatacattgatgatttatgatttttgtcctcaaattattaccactattaaattatgttccttgaatttttgtatgattctcatgaactataattcacaatgctaaaatatattatttttattaaattttatcttatgtgtctaacaaaatattgatgtgattgatagcattgctacatatgcgtcatgtgtataatttaaataaaattccttaataatttaagaaatatattttcatatcagcgataaataaaataattagtttattatgacaatgacatattagtcatatacattatattttgttagtcacaaaggttaaaacttaacaacaaaatatctatatttcttcattgtgaataattcatgagaaatttttaacaagtgagaaaatttagagaaaaaaaattaataattataatagctcgggagtaagaatacaatagccttatatattatatttatagggtgtaaatagaattactctatttttttataaattctataaaggcaccctataaatgggaaccataataaaattatcttattcattaaaatatatattccataaatattatacatttaattataacatatcatacattaacttttagaaattttaaattattgagtattgtgaatacgaaaatatattattttgaagtctaatttttgcatacttaaaacaagttattttgaaatgatatatacccagaaatttagacaactcgcttatagacgagatgaaagtgagatgtaactatataaaaaaaaagagaacacacaagaatttatagtagttcactccttatgtcgcgacagtaatggatctacattcacttcaagtttttattctcacgagattaattacaagaaaaataaccaagtctgcaaactctaatttctaaagagagaaactagagagagagaggctttgaccttatgggtacttttctgaatgagtaaaatgaactagaggagctctcttattatagggaaggaggtcctattaaaataataataaaatattccaaaaaatatagaaaaatagatttaggctatttttgaccatcgatgatgatctaacggtgaaattgactttggaagtcggtcgtcaattttaggagcttgagtgacgtctgcatgacccacttttggtaagttgtagtttaaattcgtaactctcttgaggaaaaaatttacactagataacttcataattgtgattggattatcacacattacttgatagaacattgaaatagcttcaaaatgcaagttgaatcacgtcaatcgaatcaatattgagtgagctattgttgttttactgaaatctgctctaatactaacgcccacgttgatatttgcgtcaacctggacgctgatctaaggggaaaatgtgttgaagatgtactttttgatgcctaagtgatattttgacatcacttagctagtttttgtgttctagtgaagtcgttcaccaattcttaaagatgtcactattttgtggaatcggaactcaaagttgctcaattcaggagtaagtcacttttccaaaaaagtgaaaatatgaagttgtgaatttgataaaatttgagtttataactctcttttatcatgaaaaactagacgaacgctcaagacgaaaggataagcagaacccaacgcaccatgtcaattgtcaatatgggcgttgaatgctctttctagagctcctagaagctttgttgatacttccaaggttcttgaaatcgaggaggtctcctaccccatttattaccatgctagagagatttcttggatcaaaatttgtatttgaatgatcgaaaatagcgcaccaggtcgattgtcaacttaggcgttaggctcaattttctggccctccaaattctcattttctcacaaagtttacttgtatctttgttatatctgacggcagaataaatgaccagagcatttttcagaaacatgattggaataacctaaaatgtcaacttgggcgctgggctaacaccacgtgtcaaacttgcgatgtgtcaagtttcaggtcactaaacagttctgtcgaattcccagaaacacttgtaccttaatttttgacaaaagtgaagaatatgcttggaagaattcttggaaaaactctttaaaatttgcccaggttgacgaaatgtcaacttgagcgctaggccctcttcaagcctccaagatggtctatttcttccccaaaaatacttgtttccttgtttctgatgaagacaaagaaaatgcatgggacagttctttggtttgatacttggaagtgctcaaaattgacaaaatgttaacttgggcgctgggtgcttagggcaccaggtgctctaggtgctcaaaaataaaagtgctccaaattgttttttgatgcctcaaatatgttcgtgacatgtctaattcatgtcccgagacaaagtttgaccaatttgtactaagtcaattcaagaaattgaaaccctagttgggttgccaacttggggactaggtgaaaccctaggtgcccgtgttgatttctgtggtgctgtttcgtgtattttctgctcccaagctttagacaattggatgcttcatgcctttatgaatactgaaagtagtgagttgaaaaaaacttagtgggatccaaacacccatttggaggtcccgaagttaacctaggcacaaggctagggactcattctaggtctactactatgactcgagactactcaactctgggatattttctttcttactatgtgtcaaacattgatgtccacgtcaccagagtaagtttttgcattaacacattgtaaattattcaaatttctaaaaatttatgtaagattttaaataagtataatatattatataaaaatataaattataaattagagaaatactaactattacaacctcttattacattttttttatgacaatgttcgttatattaatgattactatccaatattttgcaaactaacttggtatgtatttaagtgaggatatgtcatcataaagagaaatgagtgagtcattcatgacatatgcaacccaagcacaatgcctgaacgatatgcatattgctcatgtatgtgtgcgaatcaatttttataagatttttcctccatagaaaaattgaccaaaaccttgggagaaaattgaccatggttattatgtcaaatggctcacgaacatcgagaatacccctaccagagtgtgggtgatataccacccaagcttgaggaagaaataacccacaaatactaacctcgcagagctttctctgcatggggtgttcacttgaaagataaggcaatgtcctataagaacatatagaacgacacaacatcattccaaggagacaaatacacctggtgatatgtcctatgtggcatcctagcaggtaagaagattagttcaagatccttattcaaggttgaagaacccagtcataattattggatttatggttcaaattaggaattcttgatagtatcaagccagaacaacatgttcttcttgtcaaccttgattcaattgcggtattctatattatttattaaagtaaaatatgtgagactcaatattgaattgcatcaataataatacatatcatattttatggtgcttgacactttaaggtgtcccttaacatttctctccttaggaccatgtgtttattttatggttttgaagtcatgcataattatcttattcttaatggtagatggtaaacatatacatatattattgactttttattaaaagggcatataatatctttgcaataaaattagaaccacggaattgtcattaaagttgtttatttagaactaattatgagcagagtatactattattggatataataactaaaaaaattattttaaattcaacaaactaattttaatatatattcgaaaacttaaatgaactcgtgcaatacggccactaaactcttgtcctatcaagaaaaaaagtaaatttggtaagattatgagttatagagttcgcaaaacaattaccaaacaaaaaacttaaaaacatcaaatttatcacaaattaaataaatattttgtaaaattaaattataatttgccagacaaaactctttttttatttacgagtgaaattaatgataattttcttttattaaagaaaaaattataatatatataagacaactaactagctaattaacattatacatgcatcgtgacgtgagaaaatgcatgctactataaccagttattatatatatactagatagatgttacgtgtcaagtcacgtatatgttaattttattttagtttttagttttttttaatatcataattttaa

SEQ ID NO: 115911 - DNA, 1844 bp, Cannabis sativa
ttcctcatctgatccaatccaattcaattagtaattggatataaaaaatcatcatccgatccaatccaattggatctcaaaatccaatctaatccgattcaattactaattgaatttgatcgattttttaattggatatccaattacacacctaatttttaatattaacttaaaaatataaagatatatacgtaaaaactaaatatcaccattaatttttaagtttaatactccataaaaatatcatttttacaagcgtaatgtaactaagcatttaaaataactaaaataataatattttcaagtaataaaatataacaaaatatcatgaaaataatacatagaacaaccaagtgttacaaatttcacaaaaaataaagtcactaaaaatataattaatatatattttttattttttattatataaatatatataaatgtaattggattggatcaatttttagttggattttgagattgacatccaataaccgatccaatccaattagaatcgaacttttagcatccaatccaattataatttgatatctaatttttttgtaattagattagattggatcagatcggttcggttcaattggattggattagatgttgcccacccgtacaattacaaaccaactagaggagtgctaagggaactctctatcccttaaaatatctttattaattttaaagaataattatacatcatcagagcactcactgtaacgactcttggtctaagaagaataaaaggaagtaattctattttattattgaaatgattgagaattataaaatttatatacaatgatacatcaagctaatcgagaatcaaaataaaataagtaacagactcctaactaaccagaccatttaactaatttgacagcttagctatcttagcttcactaatagccctcctcaaacttagggtggttgagcaaaccacaccaagtttctctctagaaaatggaaacttggaactagagattgatttggtaaaagtatttgctaactaatgttctgcaggaatatgatgcaccaagatttcctttttgagtactttaccttggacaaaataaaaatcaatctctatacactttcttcaagcatgaaatattagattggcagcaagcatgataattttgatgttgtcccaccaaatgaaaggagtggtgactagaaatttaagctcaaacagttaaaagtgaatccaactgattttagagacaacaaacactagtataaaatttgacacactaacttgtgcgacaagttatttcacaaaaatgatatctaaattttttaaattaatttttaagatcacataccatttgagagaacaataatggaatttctaaaattggataaacgagtggaaagttatgcccattttaaagccaaaaaaattgcattttcaactgtttactttacaagcttgattatttgctttaaatattttcttgccatactatttgtattcacttgattattttgattaattgcataattttgtgtattaagttttaatttaccaaaattagtttaaatttccaattcactcccctcttggaaacatatcttgggttaacacatagccgctagccactttggatctttcattttaagataggttggagtaatggatgccataagcccgttaggctttctaataccagactttgctcttgtttgcattggatgactattgagtctaggatgaactggagcagcatgattcataggtacaacaataggctcagaattcacctcagttacaacagtaagaggagcatatgaaactgcaataggtgtaacgtccccgcttcaagcctcca

SEQ ID NO: 115912 - DNA, 2208 bp, Cannabis sativa
aaattcatataatttcacatatactgaactatataataatataattcctcaattattcataattattcaattagggttttgctaatctatttcttaatttcgggtattacaaactaggtactggccagatttttggtccaagatcatgtaccggctagggtctcggttagagaccattaactggccagggtttcgttaaagactatgtactggccagggtcacaaacataccctgtgtattggccaaaatctcaaacaaatcaaaatcctgcttttctaaaatttttgaatcatgttcttcgtgttcttcgagactcaaagagtcgagaatcaaaaaggagtttaaaactcgatcctttttataaaaaattcatacattatacatcctaaaactattaagcagagtataatgtaaaaaagactattctaaaacatgagaatcaaaaatttcaaaaagtttgaaaaaagcttaaagtcatcaatggaaaattcaaagaaaaaataaaaaagtgagatttaaagagttacccactgaagaaaactgctgtggacactctggcaacgatcaattcgtcaaaaaaattgaaaatcagagagaatggtggtctttgggcgtcggccgtgaagagaaagaagaaaagacttttttctttcttttcttacaaagagaaaacaagagaaagagatagagagtgaagtgaagtgtaaaaaatgaaatgaagaggcaaatgaaccttatataggttctggaatattttcccctaaaaaaacttaatgggtggttatttttctacaaaatagacgtgcatgggaaaagaagacgaagagttcaaatatgggaaagtgtgtatcccttacacaaatccccatagcgattgataataaagttattttttggcataaagacaagtcatctgaagagtccaatacctagctagacaaagttgtctggtaaaggctcttacagtcaagataatagcttaaaagtctatatctgtacagatgtctaaacagagacttgggggaaaatattatcccaatattttcccacctagcgtggcatatccacatagtcaaaattgaagccacgtggaatacaacctatcgataatcagacaaggttatcttgcacgattcatcaattgtcgagatttcaagactgtcaagtaggatcaaacaagaagaaagtgacaagccagggaaccctagctggaccatacttggtcagccaatgaagcctcacatgctggttaggccctaaaaatagggttggtcggccaactcgtgtagataacttcaaataggatgaatgaattgcagggtccataacaaccttctagaagattcttaagccaaactacaattttgggataggtttaacatgccttgaagattgggatattccctcaaagatattatcctaaattctagggattttatctatcatttcttgtactttaaattaaagataaaaaaagatgttatttttcctattttagagggagatatttttctatttgaattatgatcttttataagctctacactatataaagggcattagattacataaaaaaagactccaaatcctaagctacatgcatcatctctctaaggtccatacgcacctaaggcttcctagactctaagtctactttcttcataagttcttaccaattcttcatctatagcacttatttttcacgattgtaatattgaagagaactattattagaaattacaaagtcttaacctgtaatttgcatggtattatttcaagagtcaaatacaagtaaacatggagtaggtcattatccattcattaaggaagccgaacatctataaattcgtgtgttattttgattatttattagttttatttacacgttgtgattatcaacaattaatatagttccattatcagttggttaaatttcaagtcaacaaacttaaaaagttgtagtaagataattttgagaccttttgagaatatcataatctcatctaagtaataattttagattgttttgcccagaagatatttaattataactttcataagaaaaggagtaacttttgtaacttttttggggctaggaagttaataaataaaaagttggaaattttacgggaaatttacatggtatactaacttttgctattttttttacaaaaatactgtcaggcgttattttttacttttttact

SEQ ID NO: 115913 - DNA, 1331 bp, Cannabis sativa
aaaaaaaaaaaaaaaaacttgcgttgttatcttctaaaaagtcaccgaaaagaagaaaattttatgattaatgattgtgaattatatagaaccgcatatttgagtttttattcgaaaaatacgtattactatatatttgcataatattatatatgagtaattaaccattgtggattgtatagagagctatataattaagtgtatgtctttatatataagcaatgcatattaaatcttcctggaagactagcgagtaataataatagtacactctattatatcgaccaatattattttttaaaagcaaatcgacccatattattgaattaactaaatatatatttagttattattgatatcgtcattattaattatgacatatgtcgacaaaacaaattaactaactaattatatatatgataaaataattaataacttccgtctggaaaatttgaaataagtggtaagtggtgactccttccaataatttaaaaataaataaataatattagttttgtttcctatattacatacagtaatgcatagactcatacaggggaggtcttctacctctcttgtttcttctggtccatggcatgtctttgccatgttttttctggttttcaccctagtccccattattcctccgaacatttcactgcactgtggtacatttggtgtgttttattttagttattgagccgtgcccctatttgtttgccttcagtttttcttttgttggttctgacgttccttcttttctctcctttctatagcactgtatttattttctccccctctttttcctttgtctcatccattatcactgttttattgtcctttgtgtgtgggttgttggttttctcttttctgtggtgtagtaattcctgtggggttctcatttattgtttggtatggagttggtgggtaactctggttcagtggttggtaaaaacttgtcccatgatgaggctactttgtcattaactccctgtgattccactgtcaaaaacttatctaatttgtgtctatttggtaaagtgatttcccattcgcacgtgaaggaaagctttatgattgaccttgtgaaaaacgtgtggaagcgccctgctcgtgtggtcccggttcttgcaacctccatcaataacaactgctttgaactgatttttgaaaaggtggaggataggaactgggctcttctcaggagcccttggaacttccgtggtaagcttcttttactcaaatcctgggaaccaagtgtgctgaacggttcaccgttcacccatacccgcctttgggtccagattcataagctccctgtggaatttttc

SEQ ID NO: 115914 - DNA, 2652 bp, Cannabis sativa
  modified_base (40)..(50): a, c, t, g, unknown or other
ttgtcatttaacaaaacacagggtccaattagtaactttnnnnnnnnnnngggtccaaaatagtatttacccgatataatatgtatgtgattttgtgcttttgtttgtgctgagttgtgaaccagcagaatttatcataccatcgaattaagtttaatttaatatgggattatatagttacatttatttagttaattatatattatggcatataaatatatacccttttatacagcaaaattcaagtataattatattatatagacacactatcaaggatttatgtgtgtgtgtaatgtatcaccattcacctagtattttcatatgattgtgatttgttttggctttaaaaaaaatgtgtattaaagttatgctaaaactaaatgaaaatattgtaaataaaaaacaatgtatttattactctggcaaatttgataaaggctcaactcttattttataccgaatttggtacaatttttagcacactaacgtagacgaatgttttaccaaaaaaaaaaaattagcattacatcacaaatttaacactctattagagatgatttaagtttttttcaaaaacctgtaataatttctttttttctctcttttttgtcttcttaattagtcaagaaatacctaacacaccttttaaaaactaaaaaaagttgaaaaaagcactaacaaaatttaatggtctacattatttattatttcttattgagatggagttggtgtgtgcttatctttgccaaaaagctataattcttctacttatatacataatataagtcaacataaatgcctcaaatctcaatcctctgaatacttggttttcattctggttaaacaagcagaataattaggcaacaacaccatcatcatgtaaggattaactaatatacttttacttgattacatattgcaaattatcattttgggaatccatttatttatttgttaccaatcttttgctgtgtttacagtggacaattcacttttctggtctttttcaagttatggataacaaggattgtgatgataggatatcgaaattacctgatgcaatgatcattcacatcctgtcgtttctcccaactgaagatgttgttcgaacatgtattctttcaaagcgttggaaactcatatggtattcagtccctacactcttttttcctttctccaatgttagttctccaaattgtgatctaagcctagacaagttctctaattatgtggacaattatttggaacatcgcaagaaaggtatgcatttttcgggcattgttagttttaagcttgacttgatgctcatctatcgcaaatataatgatagcttcgcagataaatggttagcttttgcagttaagaataaggttaaggaaatatatctgcacatacacatggatcaaaagtcctatgaaagggatttctactatgattactactatgatggcccaaattatataccacatgcaccctactattacttaccaaagatactagaaaatgtgagttatttgacaatcttggagttgaatggggttatgttgaatacttcttattcatatagctttccatgtttgaaaacattgtcattagaaaatattgaacctacatctagaggaagtgaaagggataatgttgatgtggtatttaggtttttgctgggttgcccttctcttgagacatttcgattgtgttcatattttttactttttgataatccatttggattagaaactttaagccttaagtttatagaacttatagatgttcattatcttggatttcttcctaaaattgaagccataaatcttgaatcttttgttctagttggggctatcttagacatagtgaatctctctaattgtaagaaaattacaaatcttgcattatctattatgaacaatcacatttcatcatcattagaagctcttatttcaaacttaccacttcttgagaatttgactttgacctatgatgataagtttaagttggggaccctaagaatctcgagtcaacacttgaaaagtttaaagataagtactaagattaacgacgttggaatgatgaaggttacaattgaatcagctccaaaattagcatacatctcttatgaaggtaataccaattttagcatatcaatggaatcatccaattcattgaatgggaaaattgtaattcgttggattgaagaacaaggagactataaccgaaattggtttaccaatatgagaaattttcttgtgaatctcaattgctcttggaatattgttaccctacatgtaccaacatataaggtatgttcattaattgtattatatgaagtaatttgcggcataaatacttaattttaactcttagttgtaaataaatacttaagtttaataatatctaagttatatttctgaaacttctgtaggtacctaactgttaagtgttaagtaaattaccacgtggtcatccttgattgttttacgctattaatttttttttttttttaaaaaagtagtttaaatatatcaataaaagaataacacgtaaataatgttcaggtacttatagagtttcagaaatataactatagtattattattatcaaaaattaaacttaagtatttatttacaaccaagagttaaacttaaataatt

SEQ ID NO: 115915 - DNA, 3788 bp, Cannabis sativa
tgaaataagttttatttagggcacaaaacccaacagaacattcatagaaaaggtgttccacagatagacgtcgtggctgttacccaggaataacatgcgtacaacttccctcaagaaagaatgaactattatctgctaccacttgccctactgtataaaaaatatatatatatagaaagaagaggaacttacacgatgaaggcaaggctgaggtagaggacgccgtacgatggtaatactttgcttggcaatggcggaggaaaagtaggaggaaatcagggaagtttggaattttgttaggagggtttgaaagcctaaaagacgaaaagcattgtaagtgaaccaatcgcgagacgtactagcttttataggcctctcggggtatgagacatcatcgaatgagtaccatcaagcgataggggttcacaacgattcaaatgccacaaatctaacggtcaggataaatacgcatgatgaaaagaaaagggcggttgaaatatttgagtatctctctaacatctgcattaatgaagaggtctatcaacaggcgggaaacgaatcattgcctgctagaagacaagaaataatgattgcgagtgttaaaatggcccacgcgcgtgaagtacgtgccatgtcactccttgagaccggaagtaatatacaagtcttatttatcaaggactaaataagacttgggggtaaatattgtcctagttttctcccaatatacgtggcaatctcattatgggacacgtgacaggtcaggctctcagactcagagataattaaagaagagtgattacttaggcctatccctctgagatagttcagtaactattcagcgagctaggtcccagtcctaagaggtcctgcttgacttcatctctgagagctggatggtgtttagctccttcaaatttgtggtactggaggagaactgtcagctaccatttaatgtagcatggaggaagcgtctaggaatgcatatgagaggacgtgtcagacgccataaacctgtctttcaacaattatgcgataataaaggatataagtgacgactcatttatgaacaatcacatcaatcaaggaaagatgagggctaatcccaccgaaaccctacacaacctatcgtgtaggttgtgcatgccctacttcatagatttggaaacttgtgcatggctaaggcgggcacttaggacaattgagacctttcttattcttgacaactgctataaaatatccgtcaacaaaattaacgaggggatccgagaaaagaaggcagaacattctctgtaaataaatactcgtctattaataacaaagactcgtgaattaaggttcattaatgcccaatctcgtaaaatatttgtatttactcttcttaaactatctttactacattaatgatttagttgccgaaaatttcggtcaacagttaatatatattgatggttgtattacataaagtataaaaagtgaacaataaaataacacatgcaataataataatatctgaaaaattgaataataatttttttcaaataaaaaaatacattataaatagatgaaatttttttcactaataaaatatatgaatgatctcgatttctaaatttgatagtctatgacaactttagataattatgaggtgcttcaaacgtactataaatgatcaaattgctacccttgtaaagacatgatttattttattttatttattattaatttaacttttaaattaatttaataatttaaaattcttcttttaaacaataatgtatcaaaaaagtatactatacaaatttctaagttgtaattatcgtggtaggaagtcttatgttttttattgttaatatatattgacagttgtatagcatgatttataacagtgataataaaataacacatgcattaataaataacattcaaatgaaaacttatggctctgtcaaagaaaggcatacataataaatagatgaaaagttttgcactaaaaaaaaattgaaggatctcgattactattgatctcattcaaattggatagtatatgataactttggataactatgagatattttagatgtactgaatgatcgaattgctacccttatattttaagatcaacaattgcacaatataattgttatcccaaattttggtctgtatgacgtgcaatcaaaattgtaacatgtatcaagagaggttatcataagattgtatctcatcggcatattaagattgtacagagaggtattttccttaagggtgagttgtcgtgtggtcgattgggagacaacaacctgatagagaagcttgttggatgcttatattgaaggatcaatatatgtttgactaatatatatattttgaaaaaataaatggttgagcaggatagttttttctttggtatccactattagtttaggatcccacaagatccagtttttataatgttctttttaattttgagattaattttaattcattaaactattttaaatttttatgatagtatattaattgaacttgttataatgagaatacaatttttattttaaaattttgtaatacagttaatcttctcaagatattttattatgaagagggttctcagcgcctaagcatactttaagtaacatttctcgtgtccttccataagagttgggcaaagcaaatgtaagacaccacacagtatgacaattctaagataaatcatgctaggaatgtgacatttagtctcttagcaatactcgcgagtatgtgagtcaatgagctgcaagctttgtaaacaattcattatctacccttttcccatttccaagcattgtcattctgttgcgaatttcgtatttctcgtgatgaacattctaagttgatcgtttatctcacaaatcttatcaatcggtagttattattcgtagctcgcccttatctttaaaagggtgagtttaaatatttctaccacgtgtatttttttaaggcgagattattgaatgtattaattgctttataacacgagttggtttctttacacgtgtcaataccatattgtggctcgaaatatgggtataacagagacataaaataacagtaatttattttattttcttgttagttatgtaaaaaattaaaaaaatttaagtaattcaatattaaaaagtaaccaatctataataatcgattcaatatgcactgttacggattgaattagatttgagttattatggagattgtagtgaatccaaaaatatgaagattaaaattaattattataatgggagctaatacaataggcattgtgatttttacctatcaatagggataataattttgtagcttttgatttaatcaaatgactcaaattaacccttgaaatttatatatttattattaattaattatattttctacttaaaatagtaatagtagctagacaaattcaaaatattcaagttatttaatcctacaataatcaatacaaccaataatataataatgggctttttcataaatgtacaccaaaaacaatataattacaaaaaatgtgcaaaaaaaaaaatattattttaaaaacttgtacattttaaaaatttattacatgaaaccatacattttaatcattaaataataaaatatgtttattaaataaacaatttcgtaaaatgaattaaacatatttataaaaataaacaatatcaaaattataaacattaatgtatataaatataaatcaatacttaaaattactaaaaataaacatgacatatagagtgatataataaacatat

SEQ ID NO: 115916 - DNA, 2745 bp, Cannabis sativa
aaatataatatgattccaaatacaataacggtgtaatacgtcgtaccaaacgaactattcaagaaagtattggaaaccacgagaactagtcaccagatttgttggtttctctaaacactctctcatccttctacgttgatattacacttcatttttgctgcaacctcagattcagatctacaatcgatctttctccctccatcaaccacgagtatcttcaagccttcgtcgctgctcaagaaaccttggattgcgtcgaggttgaggttgatgcactcgccgattgttgtgacaagattgccataaaaacataaatctttaaacttttctgatagtttatgtagtttttacataacgatatagttattaagagcattccatcaacttctttattttattttccaaaatatattactaaaattttacattcttaattaatgacattttttaaaatttaaactaaaatcactaatgaaattaacttttgatcattttttacttttatgttctctactttaattaaagaaaagaacattgtaaatcatctaatattgctttattcgactttatagtttataccaaaatgaacttcattatgagttgcaaccattcccaaactatttttaatcgtatgtagttaccattatagaaagttccaattccaataacatatatatgtctaaattacaagttaaaactaaaattcaagcacacaagaaaaaaaggaacacaagtttttaaatttgatatggactcaactgtctatttacacgtactatcatatatttcaccaagaaagatagcaattacacttaaatttattgtaaactgaaaagcatgttaatcaaactaattacatttatagttttatattaatactatgtacacacataatctacatacataacacatatcgacaagttatttttgataaatgaaactatctttaaaaaaaaataattagttaaaattacttaccacataaatgtgtgtcaagtttgtatgtgttcacttttaatgagagttacttatgaattagcaatattagaaaattttgtgtttttaatttttctatctaaaattctttaaattgggttgttccatcgacttaaaaaaaaattaacaataaaataaaagttaaatttaatttaaatattttaatataatgtaaaaaaaatatttttttaattaaataactaaattaaatataaaaattcaaaaattttaattaaattttttaaaaattaaagttaaatttagttagtaacaactaacattaaaaagtgttacataagtttataataacactctaaaaccaagtaccagcttcactggaaaaccccccaaaattgtctttaagacttgtccccaaaattgggttgtttctagtttcagtttgtcactttgtttgtcttttgctgttttgtttgtttggttacggttggcttctcaaggatggctagctcaagtggtgttaagaatagaggcagtgaggatgtctacagctttcagattgaagaagaggacttggaagaattaacagtggggaatgaaggagaggaagaggggattgatgacagatggtgtcttgtgggaaggtttttgactaatcggttgatagactttgataaaatgcagaatattttagcttcattatggcaaccggaatgggaatgtttgtcaaaaaactagaagataaccggttcttatttcaattctaccatgaagtggacattcaaagagttataaatggcagcccgtggacttatgatcgaatgcagctgattattcaacgcctaccagtgggaggggatcctaatctgttgcagttaaatgatcttgacatgtgggttcagatccacgatgttaaactaggatgtatgacgacgagtacggttcgtggggtaggtaatactctagggaaattcattgagtcagatccaaacaacttcattggtgtttggcgagagtatcttagggtgcgagttactcttgatattagaaaaccgttgaggaggcgtatgaaactaacccgtgataatggaagctggttttgggcacatttcaaatatgaaagggtgccaactttttgcttcatctgtggattgattggccattccgagaggttctgtaggcgtttgttccagcagcctatagagcagatagtgaaaccatatggagagtttatgagggcggtgccgcaaaaatcttacaagaacatcggagcaaggtgtgcgcaatagagggtggcagccggaaggagtttctggggacaatgtacctggacagagttctacacatcaaccaaatatggaaagaaatccttcggttgacttagccgataatcatgctaatcaaaatatgactaataaagaaggaaataatggcatggataatttgatgatggaaggggatcaatgtgaggaagacactggtataatggagggagaggttagtggagatatttatggcaagaataaagcaaaggggaaacttattgaaggaaattctggtgtggttatttttgacaataaaaagaggaaggttagggaggatgggattatgggacacgtggggcaggcccaacagacaagtgggcttgtaaaaaactcttcattggtgggccttggtgctggggctcgccagacattatgaaacttttaagttggaactgtcgtggaattgggccaccacgtaacattcagttcctaaaacaattggttgatcaaaaaaggcctagagtgt

SEQ ID NO: 115917 - DNA, 2798 bp, Cannabis sativa
ttattcaaacacccaaagaaccaaccaagtctaaaattgtaacggctaatgactcgattgatagccatagcccatagtaattcgcaaaatttaagtacctgtgatgaaaatctggtaaatcatcgacatcgaaaggacatgagaagccaatatcatccatgtcatcctgaaaagacaatctgccggagccaggagagaacccaacacgtggtgagccgctggaagataatggtcctgaaaatcgccctgaatcatctctactatcttttatggcctacaaggaaaattaattaaagttatcagcaaagacaacaatacaacaaatgactgaaatgctataaatgtagagaaaagtgctaaattagaaagatcataactaccttcgggccactgaaatggtttgaatttccagtcggggtttctccagctcttgaaggatctaatctccgtaatgaccttatcccagatggagactcttgcgatgaattatcgtttctagtgcttctgggggataatggaggaagagaatttctacttggatcggaaaaatttgaagaaaggtatctagaacctctggttgtcattgttgatggaatagatacaggggcggtttctgaatgtctacgaccttgcattgaattaggattattaccattgtagaagtatgtaggaggcgatggagatggagatggggacgacgaaaatggaggtgaaagctgatactcatcaaaactaattggcttttgatagcttagcaatcggttatgaactctgttgggatacatatcgttaggtgatgatggaaaatcggatgatgtaggagatggacgatatgcaggtggagatccgaaaagtgtttggttttgaacaaagggtccaggcctgtgaaaaccgcttgtccaactgtgtgggcgttcagctggtacgggagatgaagattgaactcctctcaatggaaaggaagttgcacgaacacccttatccgaagcagggaaagatctcatagggtcagtagcaggactgccaacataatctttaattatcttaggtggcattgctgttgaaggctcaagattaaaatctgataggcttgaatggtaagttacagacatacaaagacgaccagggaaagcctccacaggcgtgaaactatattcttccatgaatttctcctctggtctagtgaatggatccccaaaagaagaaactttgtaaataatatcaaaattataagtatgactagaactagttagctgtttaaagatcttgtgggctggcaaaagtctcatcaacgaacatagagcacgaagaagtactatcgatttctgataagtctttttgtaagagacagaaatttcaccactttgaggagctaccaccctaggagattcatactgaacaacccacctctctataaccgtctcaacaggcgttccaactgttgaaccggtgtacagattgtccacagatgaagagttgagcccttcatgaacaagtattatgtcgattatcattggatccatcacatttctatgccaaaagttcaaattttctaatgctggagggcgatctcctagtattaaattgaaccatttgtcactctttttcacccgagataccaacgaaagatcgccactatgatcatttcgacacaaagagggaatcctagagtccaaaataatatgcaaactcttcaaaagaaattgagaaacaatatgttccaatttccccaattcagattgaggattactatgcaaatccatattcttagaaagctaaaactccaatcacatctccttctcctctttcaaaccatcccaaattagaagcaatctattcccagaaaatccataaaagcaaaaagctcaaagtcaaattcacaacctttaaaaactaaaaacccaatttcaccaaattaaaatcaacaaaatcccagatgaacatatatacacacacacacacgtaaatattcaaactcaaaaaagaaacaatcttgcactgaaatcatacagttaccttaataaaaactgaagctttatgatctaaccatgcgaattgaccttcaataaacgaaatcccacaaaaatcagtgacacccaaatcatcaaaacacaaaataatcatgtgggcaacaaagattccgcccccaaaaactagtcgatcatgcgaatggacccaatctaagtaaagattcattgaataaaacaaaaaacgtgtaatgattagtgaaagttaagacttaccaaaaggaaagaaatagagtaaaggtagttaaagttgttgttgattcttcttcttcttcgaattatccaaaaaaattaagacttgcgtatagcacaaaaagtcccattcaaactggttcttcttgtctttttatttttgttttttttttatttaaatttaatttaatgcaataaatatgattaatgtttggattatatttaatttaatttaattaatattaattattatagctaagaagattgaagatcctttgggcttttgtattgggtgtactttaaggttggggatagtttagtgagtgtttgggtgcacgtttgggattctacacccctttttctttacaaaagaaatttgcatttagggtcacttcttttttttagggacacttcttaaaataatataaaataaaatatctttaaaaaaatatttatatgacaaaacgtattttatgaaaatactatagtggaagattttagaaattttatttgggatatttcaaaaggatttgagtaatttgtggcataaatatataagtttaatttctggttgtaaat

SEQ ID NO: 115918 - DNA, 2928 bp, Cannabis sativa
taaatttgggttggctaactgcttagtttgaacttaagatttttgtggttttccggttaagtggtatgctctattctctctatgtttaagcatttttcatatgatgaaatattgaattaatgcttgatgaaaccatagcaatgcaattgttgataaatgaataaaaatgtgggaatgcaggtgaagcattattttgattatcgaagtggaacagtgaatgagatctggcgtcaggtggcacaaaaactacctttgattaaattgatgattaaccgtgataaaaggtttgtcaaaaggaatttgactgaaccagattgctcatgtctctgctcaaaccagactggcattctaacgagctattgaggcaacttttgtcagtgaaacaatggtgctagttgtagcatcatacagtttttctttcttcaaactaccatttcatcagttcaggagcacaaaatttccagtcttgtgtggttggtttcggaagttacattgcaaaatcgttttcggggttaaaagtgctcaagttctgccagagtttctcttttctctttcttttcttttttcatttttttttttcacaagattgtatagcctttgctctaggatgtagattctttttactaattattctatttttttttttcacagatgttaggtaataaaatacttagatatatctgattctcaaaagcagtcactctgctctatagctctttcaaatttgtatccctattacagggctgatgagatgatatgtatacattctatacaaccgactatgaaagcatagttctttagaaaagactatgaaaacatagttgtttttttttttttcaaaagaagtataggttttatttctctcacattcagtttggatagagttaactgttgtagagtaggatagttgctaagagtactcccaacagttattttactttttttttgcactacacttttacatatatcatacattattaaaatattttttaaaaattttattaccttttattcatttcaaatatatatatatatatatatatatatattaatatatactcatgtatctaaaaataattattaaaacttaaaattattaataaaatatatttaaagtgagtagtattttataaagatagagcatgaatagtaaattttaaagcaaggagtttagtactgttttttaaattttttaaaacatcttattttaaagaaactcttataagttctctgagggacaatatcagtcaaaattgattaccaattgacattgtgatcccatcacaagaatatcaatgatagtaaattaaaataaaataaaaagtaatgatccagcttatctatatatgtggataagtcgtttcagtaacagtgtctttctcaaccttcctttcgagaatcagatttgtaaatacaaataattttgaagattaccatttcatgagagaatttgatatatctattaccttatattaaagtcacttttccaggtgaagttatgctgtcatcccatcgattcaaaataaaccccactataatattatatgtaggccaattatgaaggggcaatttgaactatgccaatgaaaccctaccaatactgaccagtgacccctatcctatgtcacggcggaatcgagcaccccacctaaaaaaacaccattccattgttaaggtcgacacaaatattgaagtgctccacctaacacgcaaagattcatccctaatcctaaacccacaacaccaagtttaatgattctagcatgacatccatagttatatagctcgggaatcaatatactgacttgtatttttttttttgttgtcctttgaaaggaatatagtgattggttatatgttacatattcgaaaaagcgttatgtgttgatatttgttgatgggtgcgagttaaatataaataaaagagacacaacatatttatagtaatgtacttcttttgacgtgacaataatagaactacgtctattttgagtttttatttctcatgagaattacaagaaactagagatttaataataaaaaaaaaattcaaaaaatatgaaaaaaattactttggcctgatcttggccattagtggtgatccaatggtgaaaaatgactcttagtgaaaatcatcaatttttgaagtttaaatcttgttgtcggatcattttcgggtaatttgctaaaaaaatagtaactatgttaagaaaaaattttggacttgaaatcttcaaaattgcaataggtgtgagacacgacttgatagatctttgaatagcttcaaaatgcaagttgaattgcattaatcgaatcaatattgaaggagttatggccgttttattgaaagttgttcagcaccctgcaaccaagttgacaccttacgaccaggttgacatcttgacactaacctggatgtcaggagagtgaaaaaatgtcctagactttttttgatacctaattgatgtgttaacaccacttagtcagattttgtgttttggtgaagctgttcaccagttcttggagatgtcgcttttcgtgaaatcgagaagactagaaactccccgattttgtcgatattctaccttgttgaaagagtaaaatatcaaagtatgaatttgacctatcaaaagatttagctctcatttactacgagaaaagagttgaatgctcgaaacaaaatcaaattttgataagtagaacccagcgcaccaggtcaggtgtcaacttggaagttgggtgcttccccaagcttgtttaaatacttctatggcatttgaaattacgaacaagtctcctacctcatttttgaccatttcaagaacaattcccagagcataatttttatttgagtagcgaaaacatgagaaccaggttgcatgtcaacctaggcgcaaggtgtaatatccgctaactccgaaagggtat

SEQ ID NO: 115919 - DNA, 2131 bp, Cannabis sativa
  modified_base (900)..(905): a, c, t, g, unknown or other
tattcccctaccccgaatccgttggttattaaacggggatggggcggggatgggggcgggaattgcattccccgtacattaaccgaccaatttctatctctaataacaacatttaaagagaaaaagatttctcaaccttcacatggagacgctgagaatgtacccaatcaccgttggtgatccaaatgagaacccaaggatggcgtcgtccaccagaaacacatgaaattagttgggctcccttcatgagaaaagacaaaaccacgacaaaggaaggagaccgtcaaaggacttccaaatgcggctaagagactcataccgaaaaacagcttggaggaaaatctagaagaatcaaaatcatcacctctcatacggagaagaaaataatatttcaatcacttgaggtgtcacactctacttaatgtatataatttagcaacacacgccttgtgattggttatagagatattttataaaaattattatattaaattatatgatactcaatatttaattgcatcagtggtagaaaatactaaacactactgatgtattttatttcaatatccatttcacacattccccaaatcacaaaatggttccatcatccttcatcaatcgattgagagtgttatatgttagctgaaattcttattttttgtattatgagttggtaagatcaaatgcttattgttatgtatttgaaaaattgaagggtggtctctaattaaatcgaaccatcccatatgtttttaattaattaataaaaagtgatattatatatctaataatcacacatgtaaatcttcaatcataccctaacaatctttgattgacacatgtgttttattttttatatacatatatatattaattaaagaaataataataataataatnnnnnnaataataataataataaatttattgtgtgctggaaattgagattgagaagagaaggaaggagtgttggggaccaggttattccctttgagaacatgttgtgtttgggacagacatctctattgtgtgccccattccgttttttgagctgacatgatcatgttatatattgcatctctgaatacatatatcataatcatatataagacatacaacacaacaccacatctattcaattctaattaaaccaagacaacacattttttttatcaaaatttcttctcttctttccatgtggatcgaaaagggatctcatctcacactatgctgagattattatgataaagtgaagtcattttcaattgtactacaactttaataatccttgcttggttcatgaggactttcactatgttatctccaatcatatacttgataatattgttggtttgagctagctagcttaatgtcccgaatatcttttcctttcaccattttgtgagatttgggtcggtccaccttttaagtaaattgcaaaagatatgtatatatgatgagatgagtgctgaaaaattaatataaatatactgtaggcctaataatagatattgaaaattttcactgctctatctcaatcctcaggtttggaaatttgtaaatacatttacaaaataactcatgctatgataataatcgatgtccaaaccattttcttttcattggtcccaataaccagctgttttcaccacaaagcccaaccaagtcggctgttagcccaccatagtacatgttactattaagcttattatgtttgtcagtcaaatagtttacttaaactagaaagaaagcctgatttctgtctttttctttattttttcttttcctctaaagaattttgttagagcattcacataatcattggatgctttaaaatatatttttttaaaaaaatatttaaagaattaaacacaaaattcattataattactttatatttataaaaatttattaagcactctaattatattttacactaactaaaatttttgtcctctaatctttgacatgtaccaaattataccctttaaatttttaaggtcgttaaaaatacctcttgagcttgaactgttaagactgttggatttaaagacttttgtccaattttagtaaaaaattaaatctaacataaatgaaagttcagggacatgctttagtacatgttaaagtt

SEQ ID NO: 115920 - DNA, 1595 bp, Cannabis sativa
ctaactaacaactaatgcttataaatagaactccccacacctaaactagagataagactaagatagatgaatccaagcctaaccaagatacaaatctttctttgtgtaattctgtccaagctagattttttttgtgtatttttgagagttgtaaataggatacttgtgtgtttgatcaaggttttcttagggtgagatttatttgtaattggtgtttatcaccatagtcttttggtgtgttgtaatctcggattgcattggtgttgattatactaaagttcattcattcacgaactaagtttttcttcgattgattaaattctattttctcattgattttgattggttttagttttgaattgtatttttgattaccaccactagtgtgacaatacatgtgagagtggtctttcaccacaaacagtataattagagctcagtatttagagttcaaaaaccgcattcaaccaatcaagattcctctttaatattttcagaactgaattcaaactttcaagaattagaatcagatggatacaacaaggttcgaggtggacgaattcactagattaaataatttcagtttgcgaagaagaggggtctacccagggtataaatatcctacacctatctccaactgagtccactcaaaaattcgtgtagaagttggaaattcaactttctaatagagtcgttgaaatgaaagcaattttggctcaccaagtgatttaaggggctcttgatgcagaaattatgagattgacagaaagaacaaattagagattgaagccaagcacattgtgccattctcctcagtcttggagttgaggttttgagagaggtttcaaatgaagacaaggcattggaactttgaaataagttgacttcaatctacatgaagaaatcacttgctaacaaattgtatctagaagatcaattatacacacttcgaatagatgaatctaaggaattgagaaagcagctggataacttcaatagaataatattagacttgaacaatcttggagtgaaaattgatgataaagataaggctattatctgatttcactcctcgtatcaacacttgatgatacaatcatgtatggcaaagagactttcaccatgacagaagttaaggctgcacttaattctaaagaaactcggataaaagagatgacaaaaaagagaccaatcgagaaagattgctcattttcatggaaaaattctattatatgtagttctgcttacacattaattttaattattgaaagcgttattaatcaaattaccaataataaatactcgatagcgttacttcaacattaaaatctaacaaaatggtaatatattgtacgtaattattaataattttattattttaaattaacgtgtaactatgcaattattaaaacataattaaaatcgaatatttttaataaccaataatttaaaaattactacgtaataaatatgtaatttagtattatattttttaaaaatttacacaaatttactttttcaaaaggcgttaacttttgaaaaacacgtgcaacatggcatgagtgacgaaactacatgcaacgtaaggtaagccg

SEQ ID NO: 115921 - DNA, 700 bp, Cannabis sativa
cacgtggaacttagtatttcattctttattttgtgattaacttatgatgcattgtttcagattcaaacgccaattgactgtgtctctgcaatttacacggtcttatctcgaaggcgtgggcatgttacatctgatgttcctcaaccaggaaccccatcttatattgtcaaggttggttaccaaattttgtcatagagttacaacaagtaatttcatgctcctgcttcgggtattagcatgagcattgaagctggttattgatgtttgctcagtaatagtcaacaaattgtaaagttagggacctgttgtagctccaagttttgtgtataatatgtcaacctttttcatgccaaaatacttctttgtggtcctgtgggagttgatattaatgagttctgttgattttagctgattagtttctcttgatttattttttcttatattcttctggatttcaggcatttttacctgtgatagaatcatttggttttgagacggacttaagatatcatacccaaggacaagcattctgcgtatcggtttttgatcactgggctatagttcctggggatccccttgacaagagtattgtcctgaggccacttgaacctgctcctatccagcaccttgctcgtgaatttatggtgaagacaaggcgtcgaaaggtatactcatacgtctctcttcttttcatggagtc

SEQ ID NO: 115922 - DNA, 1461 bp, Cannabis sativa
  modified_base (1391)..(1392): a, c, t, g, unknown or other
  modified_base (1423)..(1427): a, c, t, g, unknown or other
gattacattgaaaaggagttttatttagggcataaaacccaacattagagcccccgttgggattcgtatttcctcaagttcttgtacttcctgaatgagtcaacatgcttgtctatttcctacgaactgtcagttaggaccagttgaggagccctttgtgtttttgtcatctcctcctctgagtcaacctccttccgatgtgaacactttgtcatggtttctgtatatgaagaaggaggtccaagcagttagctgtcgtaactacctagtatagaaagggagctccccataaactgcttggagaggtccccattagaaacactacttagaagcaatagttcttaggaattatttgttccagagtctaaacccaaaacaatgtacaaagggagactacacaaacttgtattcgactcaaaacctcaagtattttgggcgaaatattggctagcacatctaataaaattcctaattacaaaatttggaaagtaaagtaatttgtaacttcaagaccctcctagggtggtgttcatacaaacgagaaaacactaattttatccccaaacagagcatgcctaaatgaattaaaagcaacaaattcgtgaaagttcaaatacatgagtaaaaagaacatacctgatgaagataaggggaggttcaaagtgattgttgctaggtttggctcaggaagatgatcacacctcttctgaagacgagaaacaaaggcaatcaatgggtcaatttcctttccaaagtccaaacatgtgatttcctttgtagtagccatcctgatcattggcgatggaagatggggatattctcaagccctaattctcagcaataaacgaaggcagtaatctattgctcttccaggatgatctttcttgaatgtgattcgaatttcttggatggcaagaagtctagtgtgacttgagagtatgaaaatttgaaagagaaagaaaaagtggtaattgaaggttaccaagggtatttataccccaagacgatgatccacgtgaggaaggagttgatagccacgatcttttcgaaataaagtgcaatcctcatctgacagttagggagaccaaagtttatgagtatctccgcatttaatgcctttcaaaataaaggtgtgaggtaatgatgtaaattctcttttttgatttttaggccagtcagtgaacaaccgaaatataattattcctggaatacgactcctcgataaatgtgcctagatccacgctaggttgccaaatggactcaccattatcacaggcggaggtcaggttccatggtcgaagtaacttgggaagagttattattttcttcctctattaagagatcagaacaagcttccatcatgagtagcatctgttgggttttgtgccctnnataaaacccattttaatataatcaaatttannnnntaataaagatcagaaatcacattttatgttgcat

SEQ ID NO: 115923 - DNA, 1851 bp, Cannabis sativa
tgaaggcaatcctcaataccattctccgcaagccattttttatcaaaatggaatcgttgcttagggggtcgtaagtgacccacatcctggtgaagggaaaggattaaagtttggtgatcagatccaaaataaatctccatggaggaggtgcacgttgggaaaagaggaagtccacatgaggttcgagatgccccaatccaatctttcttggatatgggtgtgatgagagtgtttgttggtctaggtgtaggggctgtcgtgaccatgaatggggtgaagagtgaacgtatataagaatttcttgaaaaagagaaaaggttgtttattaatagcacccccaattttgtcagcatgtgagagaaagtcgttaaaatcaccattaaaagccaaggcgtagtataaatagtattgccaaggcgatgaagtaattaacatgtgttagtacggttattgtggtgcagagccccatagaagccagtgaaagtgaatggacaataattaggataccgaatgtaacagtgaaagtggcttatattataagaaagtagggttacatcaacatcctgagtccataataaaaggaggccgctactacggtcgacccgggggactttaagaccattaacaaagccaagattagatctaaacttattaatagcaccaacagggagtttattctccataatgtacaaaatggttggtttaaattactgaactaaaagggagagtcgacagaatgctcgtttactccctaatccacgagcatttcaactaatgagagtcatggctcctggcggatgcactgagcaacacctgcctcatcggggttgctttcatccaaggattttgcgagactacaattgcgcttaagaagcttcctaaactcggcttcattgatgtttggtgcaaaagatgctccaagagaaaattacagcgattcagaagtcattaaatcagcaagtatagtggagaaggctcaggaaactgagacagtgtgccagtttgatccttttgtgacagaggtgatcgacctagtaaatggtgtagaaaagtttggcaaagggacattaagttgctcaatagttgtgacgtcggatagggtggtggaggagatttagggatctacagggtagtagtctctactggtgcaccagcttctattctgggtgaattgatgggcgtcagagtgggtctcattaagtgaaagattggtgggaagcatgagggagcaaggtgttgtgtgtggggatgctaaaagtgggattccatcctatcgcaaaagatggaatatgagaagccgtaggaacagataaggagcctgaagtgtttgaaggtcccgccacgaaaaggccagctgaagcagtacgggcttgactgaactgttgaatgtcataatccgatgttagggcattggaaggatgagttggcatggcctgtccttggggcaagcggacaaggtcatgagcagacattaggtgaggctggcctatgtagggtcaaagtcttgtgcgcgtattggcaatataaaaagggttggaggttatgtgaactttagcccagagggtgtgatcgtaacggagcatgagggtacagatgacgagtcacttaattaggcaagaaactcggcacaatgattcacaatatggcttagtcgaccgtaataatggcaaaagtcaaggaggttttcatattgaaattcaagccaaacaggggcagccatattggtgaagtgaaaaccggttccacaggggaggggtttgttgggttttgtgttgttaggctatttttagcctttgttttgggtcactttttatagttgttttccttctttgttattctttttggaatata

SEQ ID NO: 115924 - DNA, 933 bp, Cannabis sativa
atgcatagaaaagtacctcactcaaacactgatcttcatctttatcactccccaaatagcagctatattctgaagacccatttgacttcagcttctgcccaacgagggtttcatctttattttcaaatccttcaaacccattcaaattttcttcctgttcttggctaaatttcttgtactcaatttcactttttccagaaatagaatccccaaattcacaattggtgtctagtaagggtgattcatacttatagcttgggaaccagtgttctagctcaggaggctctgtaaaaccccaaatcaaaataaatcactgcagttagctaactttatgaacaaaagacaattcaaaatttatgctttgtttgacaagtgagaaaattgtagcttacgaaccagagagaagggaaagcgaaaatgaagaagagcccaaaatctggaagaataaagcgaaacttaagaaacgttgaaatctaaaacaaaacccattaactctacctaaagatcttcaagggtcgaaggtagcagatttccattactttctcaggaaccaaacagaactccaaaaagaaaaatacccacaacaaagaaaatcagtacctgacaatccgaagaattggagatagacaaatcagagcttcggaggtgtgatttggaaagctccatcaaatttctcagagcaaaggagcttgcttgagtttttgctttagtatttgttgccgggtgaatgaaattggcgccaattttatgaaatatttaaacattggatttggggaacatatttggctccctttttttaaaaaaattaaattaaattaaattaaaaattgcttaattaataatttgttttatttttggctaattaggatttttacccctgaactttgacatgtactaaatcatatcccctgaacttataaggtcgttaaaaat

SEQ ID NO: 115925 - DNA, 2878 bp, Cannabis sativa
aacactaaattcacatcaagatcaagacagagcttgcagttcttgagataaaaaaataaaaccagaaaaaaactgctattgtaatgtgttgttatgatgatgaattatgattataactctcttccctccatatcccaaaaccaagtctttctttattactttcttctacagattttaccattacagaggtaaaggttcatcatcaccagattccactcctaccctcttcaacaatcttctaaaccacactacacaaactaataacatcaaacatgtctcccaaattcacactcacctcatcacaaacgacttcatctccatctctttcctcttcaacaacctcctcaactcctacgccaaatgtggcttcatcaaccgaagtctgcttctattgttctctaccgccgcacaccgtgtctccaaaaacgtcgtcgcttggactactatcgtcacccgaatgttccataatggagaaccctttaaagctttgttgctctttagacaaatgaggtgttctggtttagtcccgaatcagttcactttctctgcagctttgccagcttgtggggaaactgagattttaattcatggaaaacaacttcattctttggtttggatacttgggctcgaaacccatttgtttgtttcttcggctttgatcgatatgtatgcgaaatgctttgatatggtttctgcagagaaggtgtttgatgaaatgcctgatagaaatgttgtgtcttggaattctatgattacggggtttttaaaaaacgagttttatgataagggtgttgagtttttcaaggaggttattagggagagtttggtctctcctgatgaagtgagcttttcgaatgtgttgagtgcttgtgctaaaatggggaccttggaatttggtggacaagttcatggggttgttgtgaaacatggtttggaatcattatcttatgtgagcaactctttgattgatatgtactgtaaatgtggggggtttaacaatgctgttaagttgtttcagataagaggagactcttttagagacgttgtgtcttggaatattatggtaagtggattcatttcaaatagcaagtttgaagatgcttgtaaccttttttggatcatgagaagggaaggcttgaaacttgatgaagtttcatactcttcagcccttaatgcttcagcttcgctttcagctcttaatcaaggaattttgatccatgaccaggtaataaaatctgggtttgttcagaattcgagtgttctaagttcattaataacaatgtattcaaaatgtggaagcttgattgatgcttattgtgtttttgaagaaactaaggatcgtaatgtgatttgttggactgctatgatctcagcttaccaacaacatggttatgtgaacaaagtgattgaatcattccaggaaatgataagagagggaatgaagcctaattatgtaacttttgtaactgttctatcatcttgtggccatgctgggctagtggaggaaggttttgaatattttgattcaatgaccaaaatttatggtatcaatcctggacatgaacactatgcttgcatggtcgatttgcttggtcgtgcaggtcgattagatgaagctagcaggtttgtagaatcaatgccaatgaaaccgaaatcttcgatttggggagctttgcttggcgcttgcaagaattataacaatcttgaaatggggaaagaagttgctgagaagctttttgtgttggaaccagataatcctggaaattatgtgctgctatctagtatttatagagataatggaaggttagaagaagcagatcaagttagaagattgatggagtttaatgggataagaaaggcaagtgggtgtagctggattgatgtaaatcaagaataaaaattgtgttcatagctcttgataagtaaaattcatggatggattaatgagaaattgacaaaattgaagtggagaactaaggaaacttttttagtcatttggtaccgaaatattatggcttcaataagaataatggactttattatcatcactctcatatgaacaaggttgtttcagaaatttttgctagagatttattttgtttcggaaatggcaatttgggtaagattatatatagctaaataatgtaagtaaaagttttgatttattttttcggtttcaattactaattatatgaatatttttttttcttcaagtagtgaaattatcaaacaaggttattgtttttatgataaataacaaggtttattatttgacaaaccaatttgtgtatttctgtaggtatagaatctctttttgtatctacaaaattacagttccaattttctaattttgcatttaattaatttatttaattaaataaaagttggtaatctctttttttttttttttttttttttttgaaaacaaaagttggtaatattttaagtaatacttcttttttgtatcccttaatattttattaaaatgtagtcacttttgtgaattggttgtctaatttacttttaccctacatataagtctagcacataatttatattaatctaaggggtataataggaacattatttataaaagtgagtatatcttaaagaatgtgaaagtaaaggtaaaaaattaaaacaagtaaaataaagtggatatacaatgtaattttctcgcacatagaattgagtcagcttacatctctttatatatagggaaatttacactccatactgttttgaaaccagataatctaatggagatgtaaataagtgatgtaaatctcactttgttaaaagtctactctaatggtgtgctaaattatgatgcaaaaatcttacataatcaaaagtgatctaaatttacatcacaata

SEQ ID NO: 115926 - DNA, 2711 bp, Cannabis sativa
aaacaagtaatgaaattaaatctatttctttattgataattgaatagaaaagattacattgaaatgaagttttatttagggtacaaagcccaacaaaaagcccctttaatattagattgtaaaataaaaaataataattaattatactgatagttatttaatattttattaaaaatatacaaaaaattattattatttttttattatttaaataatggtaatatggaagataaataatttaaaatttagaaaaagtcaataaaatataataattagtggcattatagttgttattcgtatttctgacattaaacacgtggaattcaggtcaacatacaaggtctactagtgggtcagacccattaagacaagaccttttaggaacgtactttaactccgtgattggataactttctgccattgatagctcgtgtctagaagcaggtccagtactgtgacgccagatggataagatagcgtgttcttggaagactggtctggttttcctttttattcatgcgcacaaataagaaaatatatgtttccaagatctcgacaaaggatcacatcaagccaaaaggagaaattttctaaaacagatatcaagcaattaatttacagtcaattgcctacaatcatggtacacgattttgactaaattcaatcgaattctttctgtctactcagcatattttctcattcatgggttggacttcacaaggtagcccaaatgtataagtcattgtaaactcccaataaagggaaaaagaaaagtaagtgtaattctcaaaatattataaatatccagtgaatgttatggattaagggttgaattctctttcaatacttgctcaagcaaacttgagaacttacattcattgtattccccaaaggcttttcaagctaaagagttacataataatattgaatcgtagactagggctagttgatgtcccaacaacgtaaaaattgtttgtctctttcttactttttctcttttaattatttattccttcagtcctaattatctataattagtttttcaaaaatctcggtaaatattttggtgcttttattgagaactgaaggaagcattgataccatctagagattacgctcaagtaatcatggtactcacccaaacaaaatctggtcttcattttactggtcctagcaataaagcaggagcactgatgacccacacaaggtgaccaatcgccagaaaggtcaacatgataaagatcgaaatcgagactgtaataccctactagattaagtctgtttccgtgatttaaaaactaattatgtaattcattgctaatcaacaaatttattgaaaaacatgtttaattaaaattttacataattaacctttaaactttaaatatataaactttacataatctaggatcctgtcttttaaaagttacaactgcattacaaaatattaactacaaaagttgttgcttagcgactaacaaaatacagcctgttgtcctaaagatcaaacactctagttctagccgcccgatatgtataatcttcattagctcgaatcactactgttcagccttagcattgcccttacctacacatgcaaatgataactgtgagtcaacaaactcagtaagaaaaacataatcataacataatataaaccagattataactagagggcccatacacgttccacgcgtactgagtctgaacgttcatacgacaatactattgaccataatatcaacctatacttggtactctagtcgtaccgatgtaaagcatcaatcagtactttgccaaacatatgtttgacggtatttagtgcaactctatgtacactaatatcgccgataccgatatgttatctaacaagcattcatagatatgtacgtcaaacatctaatcatatatgcatatcattatactaattttaccttgattccaaatttaggtgtgtcgatcaacctgagtgaaaactaatgctcgacaatttataggcccctaagtcataacattcgtaaactaataaatgatacgctaaattactttttggggacttaaaattagaattatagttagtgtggaaatacccttaatatcactaaaacacgaaaaactagggttccaatactgctagagccggtgaactggattcccaaaacaaaaaaccggttcttagggttctgcctggggaaatgattatccggttctacaagtatgccagaaccggttagccgattcattgaaggaaaccctaaaaacttcaccaacaattcaattttatcccaaatcatgtcaaactctctagaccacctacttaagccacaacaagcatatttcaagcaacaaaaacaagtataaacctctgaatccaaatctgtcactaaagggcaaagtttaagctcaaaagctcaaaccttgcctaagctccacaataagcaataattctagctaaaaacaacttaattaactcaaaagaataccaggaaacaacctataacgtccccgctttaagcctccattagactcttacacccacgaatgatggctcttatacacgagtacgtcactctagctgcttcatggaataatgactggctttataaactaacacgagtatttccagcgtgctttgtcctcactcgcacacttcttaggaaaacttcccagaaggtcacccatcctggaattagcccaggtcaagcacgctt

SEQ ID NO: 115927 - DNA, 1675 bp, Cannabis sativa
  modified_base (26)..(43): a, c, t, g, unknown or other
cggatatccgcattttgcggattggnnnnnnnnnnnnnnnnnngattggattggatcggatactttgtgaacacccctacgttaaaatgatcatcttagtagttttttttttttttttttttttttcttgaataggatcatcttagtagttagtatgtcacaactgtataattttcaaactcaagtaattataggtgtaattggaaaaaaaaaattcaaattataaaaagaagagagatagacaataaataacaaaaataataaaattaatcctaacttatttttttaaaaaataatatatacactaatttttttaaaaaaagaatattgttattataataataaaaaaaaagttgtagcttgaaaagaaagaagtaagataatgacaaaaacatagatagatagatatattgtttcaagaaaaagaaaaaaaaaaaaaaaagctaacgtgtatatgtgaggagacagaaaaaaaaaagtaaaacaatatgattaaaagctgaaacaaaatagaataataggcacattgcatatgtgtctaataaaaactaaaaaactaacgctatattacataattatatagttagcgataattgtaatattaattttaaaatttcgtctctgtgcgtaaatttctcaaaacaaatagttcatgacccaatatcagtgtttagtatagtaagtccataattttttcttataatttctgcaatattaagctgtaagttttagaaaaatgtgaatgcatatacttataaaaaatatacgaaaataaaaactaatacaaatatacaataatctacgtaagatgaataagcatgaggtgttgagtattgaggatgacaattaacaatactataataaaatccttgtgaaaaaattaaaataaaaggtattaaaaaggtaaagttgtaaaagatgtgaaaattaagataaataaaaggaattaatttttttattaaataagaaagttgtttttgaattacaataaaatcttgtgaaaaaattaatataaaagatattaaaagggtaaaattataaaacaagttggaggtaacgaagagacttattatatattagatatggtaaaataaaaaacaaatacctgtaaattttttataaaactaataaatattaaactacacaaaaccatcacttatgttgttttattatttttttcaataggaatatgcaacttcattaattaatattcttcaaaataaaatcaagtgaagtcatgcaagccatacctccatatagctgcaatcatcgagatgatttaactaaatagtgagcaactcaattagtaaatcgcttttcaaagaacaaataaacattatctaaacaagacaataacatataaaaggagatcaaatccatcgcctataaacaaaaaactattttactaaaattcaaattttctaatgcttttttttttctcaaaaaaaaaaaaaaaattctaatgcttttgtcaaagatattttttttaatatgtttacgtgaatattccttatgttattactgttattttataaactaccatttttatggataacattaaaaaagaaatcggcaacaaaaagatatttattttaacatcaatatattttttatgaagaaaatataccaatgcttaatttttttttctttttttgaataaaggattttcattaaa

SEQ ID NO: 115928 - DNA, 1559 bp, Cannabis sativa
tgagtagatctaagatcctgttaaaataatttccaacacaaatttcatatcaatatattctcttgatatttttgatcgacgactatgcattgttgagataccaaatccaaacaacttagagtatttcaaataaaaagcatgtacatcacggtgtgagtcaaactccataccaatagatggctctataaatttttcacttccatcattcaatttttcatcaaatatgcattcactattatttttgtccccatcacccaaatatgcatccaaaccaaaatttaaatccatatctcctattaaaataaataaaaaaaaaataataattataacttattaatatgccattattaatacagataaacattgaaacaaaatataaaaatttgaaacccaaacaatactaaataaaataaacaaaatttagagatataattataaatcttaataaattttgtagttaccattttccttttattttattttttttattttttatatatatacaaataatgaaattaaaaaaaaaaatctgtaagagttaaaaaaaaaatactaaaaaataaagaaatgggtagtcattaccttaaaatggatgaaatcttgataaatatggatgcatttgaagataaaatctgaatattgatgaatactcttgctgaaaaattttcctcccttttttacttaggaagaataagagaagtggaaaggttaatcttggagccgaagtcaggatatatatgtatgtcacaattggtaaattatatatcacaatgagattttttagatgaaaataaaataaatatatgtatggcacaattggtaagttatatatcacaatttgaaaatggagtctgactatagtattgctctaatacttttcagtatgttctaatttgtgtgtacataattaatttgattttcgttatttgtgtcattattattagatttacgtatataagtaaaaaattctcaaattagattgtttgattataattatattattttataagttatttttatattgacgtatatatgagaataataaagttagtttacacaaatatagtatggaggcttaataaagttagttatttttatattgacgtattaaatttaatttcatattatatttatctatattaatatatgagtttttaaaatttagtgtaataatattataattaaataaataatacattattgtacaaaaggacaaataatatactaaatagtaatatatgtaagttcatgataataaatttaaataatacttattattagagtagctttagaagtgccatttgataaaaaaaaaataatgtagaataagatcatatctaatggatgtgtaaataaatggtaaaaagtttaaatataactcatttattaaatagtgtgctcttatggtggtgttagtgtgtatctttgcttgagttagtttcagttagttagaatcttgttactggttagttggttgttattttccagctgtctcttatcaactaacttgtaattgtttctgttattcttgttcagagtgtaagcttgtatataagtca

SEQ ID NO: 115929 - DNA, 1774 bp, Cannabis sativa
aatctcaaagctagggtgggccaacttttcctaaaagctataaatttcacttaaatttttgaaaaaactattttttaaattttaccaaacacatattaactcgtaacattttttaaaagtgattttagcttcttaaaaagctcccccggctataatggcatagactcgtattatatactaaagtaccaatttttaatatttttatataatgactattgactattataatattattattgttgtaatatttttattgttgtaataatttatctaaataattttatacatattaatatatttattattattattattattattattattattattgtaatattttaaaattttcagctagagaaaaaaatataatgactattataaatagtctttgagtgttgggttgctattttgtagtgtgtattgttcagtggttgttggaataaaattttcttcctttgttcaaaaaaaaaagttcaaacaatttgttgtactcacactttttttattatacgtgtatgaaatagactatttgaacattattttttaaattgtaaattatttttaatttcttaaaattttataaaatgtcttaaataattataatatacaccgtcataaaaaaaatagacaaaagaaaatgctgaaaatttttcaatgcatttattttagaaatataccctagaagctttccaaaatatttttttattaaggctaatttgggcttcccattgaatttggtatctaaaacatttcaatgtatattattaagagttaaggattttacttcattaattaactaggaaattatttaatcatgatttagagattacttttatataataatcgaaatagttttgtagtgacaaaataattatagtgaatgagtgacataatacatataatataccgttgtgtttaatttggctatcatatccaaacttacttatgctttacatgttgcaatggcttaatcaatgtatgcaaacatgtaattaagagtggtagtatattattataaagcaccataactcaaaatttataattaaaaataaaaaatcaacttgcccaagaaaatcataactcaaaatttgtaattaaaaaaaatcaatacttgtttgacacccttttgtagaaatttgtttatttaattttacatataatttttgctttatttattttttttttcgaaatatcaacttcattaaattaaatcagcattctgaatattaaaaaatatttagaataaattaaaattagaaaataagaaatattacaattaggatgataccgagagtgcttagcaacgtagtgtgctactcgctttattgatcgtcttatgaaaaataattaaacattagtcatcgtagataaaagagatttgcattccccaacaaggaagccaaaagttgaacacatggcaagattactacgaatggcttggaccaaaaccatactgtctgtttcaatctcaactcgctatcaattgtgactcttaacccaactaagggcctttttgattctcattgcttcaatgatctcaggcgcatatttaccaccaaaacaaccagcactgacaataacaagtaggggtgttcgcggtgcgtgtggtgcggtttttgactattttttcaaaccaattacccgcacatgcggtttttctaatttctcaaaccgcatttgcaccgcaaaactaaaaacctgcaaaaaccgcaccgcaaaaaatagtgcggtgcggtacggtttttgtaatttatgcggtttgaactatcac

SEQ ID NO: 115930 - DNA, 4085 bp, Cannabis sativa
aatttaccattctacctctcaatgcattttacccttaaaatacttagcttcctataaatgatatttcagtaaactaatataattactgaataagagctcttacatatatctctgttaaccaaagctcaaaggaaatcatcattccatttctatgtcctcatagaagctatagattttgtatctatgattagcgctcccactcaaaagtcaaagaacaagttaaagaacacaaataatacagttaagttagaaccaaatcatctcaggattaagatttattgatctaagatcaactaagtgatattgacttagaaagtacgatggtaagtttatgatatattatccaatatcaatattggtccagtctgatgtatactatagacatctgatactagcatactttgtcaatgccctagaaaggacataccacatatcaatgtgtaaataaactgtaacgctgattatccatgaaaaggccatcatgagcctcccttagccacttttgtaaggcctcagcttctgcttcacccttcgatagttcatctacagcgtagttgtctttggcgatacaaagctgcactcgctcttcatcaggatgagctggggttaggaggatagcaggaggggtaggaaaatcttcaacctcagataggatcccaaaatcaagacttgggcaaggagttgctgaatgcttaggcttctttgaaggtttagggctggaaaccacacccttttgcttccggtcgagttggggaacctctttttctttttcctctattaacaccacctcctggtttccaggtgcctcctcgtttggacctccaggagttaccaccacctgcggagggtcggctacctatggttttgggttgtgtgtagcacctagcatggccaactatccatgggtttcgatgttaaaagcaaacaaaggaaaggttaaaaagaaaacacatatatgaaatacaaacataagtatgaggcagcaaacgagggaagctaatcttatcctggcgccttaattctgccctagcaaatttgtaaattaaaaagttagtgttgtcatcccctaaataactatttgaaagaagaaaccacctcgagaacatgtagtaagaatgatccaagagaataggaacaggagaacagaatccatttgagactggcctaaggaactactcaaattagataaataaaaacccttttccctattaccccagcgtgcatggggcattcgaaacctatacagcctcatagtaaaactaatcggctatacgtgagagtattcttgagccgagggaacaaaatgaaggttcaagggggacttacgggcaccagagttagagttccagagttgggaactagaaaaatgaatatgggtctagctggtcgggctaaggatttctcaatttcgaacaataggatgttactttataaggcccgagtatgtgttatgagcaatgatgagcttaggaaagaaatgctagatgaagcacatactacaccttattcattgcacccgggtactactaagatgtaccaaagtctaaaaccttattattggtggtgcgaaatgaagaaggatgtagtgaattatgtgtccaagttcttgacatgtcagcaaattaagtagaacattagaaattgatagggttacaataacctttgacacttcctgtgtgaagtgggaagatgttataatggaccttgtggttgagttaccaagaaccacgggaatgtatgattcggtgtgggtcatagtggactattttacaaattcagcacacttttgccgataaagacaccctatacagtggatcggtatgtgaagttgtaagtaaaagagatagttcgtcttgataaagctctgaaattcattgtttcggacagagatctaaaattcgcatctaagttctaagaaagtcttcagagagctatgtgtacaaagctgaagttcagtaaaacttttcatctccagactgatgagcagtcgatgaggacgatacgaatattagaatatttgctacgagcctacgttatgaacttttagggttcatggaataaatatttgcctttgatggaattttcttacaacatcatctatcagagtacaatattgatggctccttacgagatgttgttgttgaaattatttaccaggatctagatttactaacaagtatgctgaattaacgtcttaaatatgaactttctaatatgatgaaattgaacacataagagtttagaaaaccttacattgattgtagcggaataacattactagaaaagcgggttttcatgacccagattgagtaactctaaaactgtatagtgacacttcaatacgtgtcactaatgagggtgactggaaaaatagtttttagtgacacttcacacgtgtcactgaaccattttacattcactttttgcatgtcactataggcgtatagagtcaaattttgtcaaactgaaaaagtaacagccacacaaataaagtatcactatatccctttttttcttcttattttttattatatttttgaagatatagtgacacacaaaaagtgtcactacattaaatatttttctaaaaaaataatatttaattattttgattcaaatttttatataaataattattttttattatttttttttgaaaaaatcaattttttaatatgggcagaataatcaattatttttttaatttatcaaatatgtcttattttatgatttttttttcttaattttattaattttctgccattaatttttattttaattcaattttagcacaaaaaggtccaaattgaccagatttaaaataaaatgatactaattttttttttttaaaaaaaaataaaatttaaagaagtgatttttatgggttttaatgttatgcaggataattaataaaatttctataaaattatatataatgtttatcaattaaggaaacaaaatacttaacaaatttttttataccaaatgaaaaaacacaaaatacaaaatagaaaaaattacaaaaattacaaaaatttcaaacatatgactatttgaatcaaaaagagtaaataagtgttaaaaagaaaatacaaatctattaacaatgaaaataaaaaattatgggtatgaacatttgaatcaaataaaatagctagaaaaaataattgaatcccacggattctagcttcgatctccgtccctaactaactgtgaccctgaaactaactcgagcccaaccatttttgagccccatcgatacaaatcttccatcaatttgtagagaaaatattcaaacccagattcaacaagagagtgagagataataccatataacagagatctatacacaaaaaaaattaaggacagttgagaagacagaaaaaaaattcgattaaaaaagaattagaagaagaagaagaagaagaagaaaatctaattaataccatagtacctaaagtcgttggtcgtaaaaaataaatgcatgctttgttgaagtcgttggtcgctgacaaatagccctcacctaggtcgattgctctgccataccgatgtttgcatcgtccaccagccctcgcctgcgctgtcgaagccgtggcccatgggtctcttggatgtgtgcaacgccgttgagaagaaataaaggggagagagaaagaaggaaaaaataaattagggttagttttttttacaattgtaaatacaatgaatgtattacaactgtataaataatgtgcctcttttttatttatttatttatttatttgaaaatttaggtgcatttttttgaaagtttaggcgcctcttttcctttttaaatggatttaggtgcctcttagatatgtacgtaaatattaaactttgattttttttattacttattaaatgcatattaataaagcaatttttgttacaaaaaattagaactatgatatagtgacatgctaggtgggtcgggacatatttactcagtcacacttgacgtgtcactataagtgagtatttttaaaattaataaaaattaaaaaaaatatatgagctttactctttagtgacactctttacttttagtgacccacattaca

SEQ ID NO: 115931 - DNA, 3720 bp, Cannabis sativa
  modified_base (2502)..(2507): a, c, t, g, unknown or other
gcttaacaaaacaaaaatagacattatttaaactagccaacatggctttgcaatcttggatcacacatccaaaatgagaagacagaatagccgagttccgcgaagcttgtacaaccactaaacaatccgtctcgacccaagcttcattatatatatagtattatatttctaaagattaataatcgaagactacatgatatatagcctccgatcattatttgttaaaacttacaattctaatttgaagataaagtaatcatttgtgaaacaaatttttacttttttggcatatccttatatattaatggagtatcattcacttttttaaaatatattttagtgtacttttttaagggtgagaaaatgtatgttgtatatccttttaaaatggtcatttcggtagacttatttatctatttgggaatctaaaaaagtttcttaatcaattttttttttttataattgtgtatattgttgctgtttaagattatttataaattttttagaaaattctaaatagtttacaatattaaaaataaaatttaaataattatttaccatgcgtacaataaaatatttaaatcttacttttggtataataaactattcaaaattcttaaaaaatttataaatgatgataaataattatatactcactgtaccagctttttgttgttagattgccaaagttaaaatgtaaggaagcaaaagaaaagagaaaaggaattagagttgggtagtaaattggttcaagtaaagtgaaaataaataattatgggcaaaattgcgtagccaaagagaagtgatgtatggtatacacacttgtactaaataaatattggttgtgatcttaaagaaaagttggttagattagagaaaatgggaaatgggaaaagaagattctttttcaaaagcctaaattattttgacaaagtacacacatattcatggatagatagacagattttcagtaataagagtatataatagagaagtttgatgtgatatttcaatgagaaaattcccatcaaaaacccaagtttatggaaagtagcattaaatagtagttttcaaatttgtgtaaggaacataaataccactatcatatttcagaaccctctgtctgtgactctgtccatgttcattttcatattagcttaagaaaaagttacttgagtgatgaaattgaaaatgatgtttgagtgtgaaattatacatagataggcaatttttagtgtattgtgcttttttaaaagaaaagaaaagaaaaaaacactatataagtcaacaattcatatatttggccaacaagtatatattacctttatcaatccctgtcctgtacatatatatatttcattttttgttttatttttcttatagctaaaagtttggtcttggttgtttgccattactagagagaataattaataagtccaattagtaatataagttgatcttataggatacagactcaactgaaacaaaaatattgttaaatctagttaatactgaggaaagagaaattaatcaacatattttagtaattttacacaaaaataatatataaaattgtaatttgaataaacaatttaattatatactattaaaaaatttaagagcatttaaataaatgaaaaagttttaagttaaaaactgtgattatgttattttgtgtaactattaatcactttcttcaatcaaataagataaaagaataaaatatgttttgtccaattgaatttataatccaagttgactttgttgtaaaatcccaaataagaaaatatatcaaacataaagaaaataggaacacaaaagttgtatcgtaattcagactaaccctagatagaggagaaaaatgtgaagaaagaaaagtgaaaaaaaaaaaaaaaatcaaaatatttaaaaattacaaaaatacgtttgtctcatcaaaaagttaaacaactaaaaaaataacgagaaactgatctcatgacaactataaatcaaaatatcaataaattataaaataataaaaaatagttagaaaaacaatctcataacaactataatataattataaaaaaaatagtttattatttttatttaagagatacttttgtaaataaaaatttaaaaatttaaaaaaaaattctatgtcaacgtatttttatatatttttttaaaaattttagtctataatgtaatttttttaaaaacaaatctttattttgttgaagagaaaaatgagtagaagagaaaaatgaaagaaaaaaaaagtaagtgggtcccaacaaaatttttcactccaattttggagagaatagtaaagagaaaaccttttataatatacatttaagggtaaataccattttggaccttgtattttgtaaaagttattaattggaccttctgttttattaaatgacaaaatggaccttatattttccaaaatagtacaaatagaaccctgaactgatttttttctcaaactaaaatttaataataatccgatcnnnnnntatttgacaaaactgtttacattttctatatttgttcgtattagaaattatcttcaagttgattatattaaaaaaaaagttgtcgaaaattaagtttaggtttctatttttaccattttagaatatataaggtctattttatcatttaacaaaatagaattttagaaaaactcggcctaatgaatccaaaatcgagtaactcttgcaattgaatcttcaattctctcaactccgcaagagccattcaatatgatgctttagatactatttctgctcctgaaactagttcaatggcaaactcaatttctttatgatgaggtaatctaggtaggtcctctaaaagcacatccaaaaactcacacccaagtcttgtattttaagatctaattgttgtaggtctcccaatattcacaattgtaactacaaaccctatacaacctatttgcattagatctctagctttcaagactaaaattttaggtatacgagattcttataccatacccataaacatagttaggttggcactatcaggtttcaacaccaccatttttcgtttacagacaattgttactccgtacttgggcaagaaatctattccccaaattataccgaagtcactcaattgtaactcaattaggttagtgcctaattcacaaccattaatccataaaggtaatgacctaatccatctactagaaataaccaaatatccagttagtaataaggttccaaaccctgtcacaaatgacggacttgcttcagcctcagcctaagttacagtaaatagacgacctagattctggttattgctcttcttaggttcctccttctttacttaaggacaatccttgataaagtggcctacaataccacacttaaacacggcttagcccggcattcgccttgaggaggcatcaaagtacaatatgaacatattaccacaaaccttgacagctatctctatttccccaaaatgtcttatttattaccgatgatttgaaagtctcaacctttcttttctaatttgaagtgctaccaccggtccccttactgaaactaccgacaacactgaaggtcctggtcccaagcatgggttcaggtctcaagtctcggcttcgggtctcgattcgagtcttgggtctgggttttggtctgggtctggatatgggttcgggttcgggtttaggtcttaggttcgggtttggctttg

SEQ ID NO: 115932 - DNA, 1027 bp, Cannabis sativa
attgtaatttttgttactaatatttttagccacggaccttttagtcacaacataggaatactaatttataattatagtcacaactttttactattagtcatgagttttgttatgactaaaagtaaaattttttgtaatgattgtataaaggtatagtaattgatctaaaccgtattaatgtgccaataatggaacgtataaatatagaataattttatagtaagtagtcttattatgttctcatagcataggatcattttcttaacccttgatttatatgacttttgagtaatatgtactcaataaaaaaatttaattattaaaataatgatgtgtcaaaaaaaaaggaaaaacttctacacattatatgggattagttcattaaacacaaatttttttatatttatttttgaccaattaattaatttttgtgatatatatacatacacttatttgcattaaagctagatcatcttcgtggtcttgcagccttgcaacatgggattgaagcttggaaggtggtctttaaggaagcttaaaaacttattcattctttcatttgttgcaactttgattatgttttggttcataatatatatagctaaattaatggtctttacattgtaatgcttttggtgacattggtttgttttccatccctcgtgaggttcttagagcatctctagatgtttaattgatgaggtggacatattatgtggcaaaatattaagatgctatattattagagaaaaaatgatgtcattctaaaaatttgcatgatactatggtataacattgatgctattcattattttttaatagaaatttaaagctataaaaagttatatattgtaactaaaaattaggatatatattaaataataatgtgtgagataataattatagcacttttaaagagctatatgttatataaattaataatatacccaagatctatttgtatataacatagaacacaatagtagtatatgataattgagtatgtgtacctgattgatccataaca

SEQ ID NO: 115933 - DNA, 4784 bp, Cannabis sativa
atgtagaaaagtattagtttagggaaaaaattatcccctaatgcatgcatagaaattcaaatttcccttttaatatcgaagccacatgtatgtatgtatgatatacatgtagaagtttttattaaattaatatttttattatttttactttttttaaagactataaccgttttttaatgtgcagtagtagttttttttcttcttttttttacaatttcttatttatgtgttttttataacatctattatttttttttctgtgtgtttggatctaaagtgttttgaatatagattcaatcaataaaaaaaaatgatatatggagcattagaaaatatattcaatttatttaatatttattgtatttacttatctatttgttaatcacttcttcttcttctttattttcttacactaattgaaagaaaggttttctaaaataaaaaaaaactgctcaatttgattatttagttcaattgaaaaaataaatttaagacttataagagaagatgtagttgcttattagcaaaatctaaaaatatctaggtttaatattacatatttatgaatgaataatagagatttcaaaaattgaaaataagtctcatacttttcatagttaagcaaaaaagaaaaaaaaaaagtcatatttttcaaaagtataaaaaaaaaaaaacaacatattttaaaataataaagaaacaaaagagtttgaggtgatgaaggtaaaatcacaatataatttttctttttttttttaaaaaaaaaaagtataccaaacactatcctacacaataacatatgttaatatcatacaaccaccctattcaaccaatgataagtctaaaataatgctcttacatgtgagaacaaaagtgatgctctcacctaagaattttcctataaatattatacttggtttttctttttgataaatattatacttgattttagtttgcctatattttttttttaaatgaaaaatttagttttattaaccatcaaattccaaattctgttaccaacaatagtaacaaatcagttaaaacagactccaacctaaaagtacaaccaggatagagtaaagaagctctagtaaaactatgagctactttattcgctgatcgcttaacaaaacagataacaatattaccaagttcagaaattacagccttacaatctttgattacatgaccaaacatagaaatcataacaatggagcttcgtaaaacttgaacaacacttaaacaatctgtttccaccgaagcattattccatcatcgctctttaatccaactaagagcttctcgaacccccatggcctcggcaagttccggttcaatgcttccattggacaacattgtgcgcctttcaatgagcagtcccctttcatctctagcaaccaaacccagcccatatttatgatcagagtcaaataaagctgcgtcaacatttaccttaatactgttagcttgtggtgagatccagtgcttcgctccgtcacccgcctgaaaaccaggccatgacgactcatattcagagctcttagcactcctccattgatcaaggaatctttttgcattagcaactacatcatcctctttgaaaagttttccattccaaacaagattgtttttagcatcccaaatcgcccaacaaaccattgtaaatgtgcattgatgatcaacatccatggtctctaaagaatgcacataccagtcaaaaaaatcgatattcatggccacattagtgccaataccaactcggttccagcaagacctcaccacttcacaagtgaccagaatatacaaagtagactcctcatactgaagacagaagggacaaagtgaacttacatccacatgctttgttcgaagttggagcttggtgggaagatagcctcgagctgcacgccaacacaaatttttcacttttgggaggagctttaatcccacatttttttttccaaaaattagcatcctcgttgtcataccatcgaccacgatttttttggagaagagagtatgcactcttaaccgagtacaagccagacatttctaatgatcatatatagtggtcggtagtgttagtcatttgaatagggatattaaaaataattctttgatctcttttctcaaacaaatcaaggatggtttccttatctcaactagaaccatcaacacatagcaaattagaaactctaacattaaacaaagcaggatgtagggaagaaacatacggattctccttaataggcaaccaaggttcgtcaagaatattaatgtcttcaccattacccacacaccagtgcactccttctcgaatcaaatgttgagcttctaaaataattctccaaacaaaactcgagttatttccaagggaagcattgagaaaagtaccatttgggaaataccgagctttaaaaacatgggcagcaagcgaatctagcctagtaaggagtctccacccttgtttgcccaaaatagccaaattaaaatcctgaaggtcccgaaatcccattccacctccattcttgtgtttacatagtcgattccaagacaaccaataaatacatcgttgagaggaattagatatttgccaccaaaacttcgccatcatgctttccatatcccgagtgatctccaaaggaaggaggaagacattcatggtataactaggaagcaactgagcaacagctttcaataatacctctttcccggccttccagaggaacttttcatccctactttgtaaacgtttatggatcatttcttttaagaatcccaaagcagctgatttgtttcggcctaaagtgcttgggagtcccaagtaaaaactattaacatcagctggctgcatttgagagtcctaattaccgtatattaattaaacgggactttacacatttatacatataaaaaataataatatatatatatgtttacaaaaagatgatataaccaaatcataaaatttattattagatataacatcttctttttgttataacaaaaaaaaatatattattactcatattaccttatataactttttttttttttttttatttgactaccactaaaaaggtgaagcaattattttaagtatcatttgtttttccttttggacaaaaggtacaatttggtatttatttaatatttctaatttctattactttttcttttaaaattttatcatattctaataataaaaaaacacatttcaccaatctattttttttatgttacagtttgatcgtttttctatatgattatggctactaatttaaatttgtagagatttaactcttaaagtgaataccaaaagtatgcatggtattaaaacaaaaatataatgacaaatattattcaaataaataattttggagattggaatgaacatagaacaatgtttaatgctatataaaaataaactaaacactcaatttattaaaaaatttgtcaaacgactcctgttagtttttaaaaactatttctacttttaaaaaataaaaaacagttttcaaactataaaaccaaacagcctctaaatctcacgtgatcacgtggtgatgagagattcaccttgttattaaaaaaaaaagtgttgcattaacaatataatctataataagatcaatgtaacactcagtgtaatggcaacaaggatcatatattcatattgttttttgtattgataattttatatgaagttgttcaaatcaaagaaataaaatcacctaattttctctaaaagagtcgttcattgttgatggaattaaatttgtttaacccaaaacagttaatcataatcaatatatagtaatacaccaccaataaaaataataaaatcaatcaagtgaataattcttatatcaggtggggtcattgggatcttgactataatcataatcagccatagattgatattgatctatttgttattaactcaattattatccaaatgtcttaatttaattaaaatttgtgatatgtaatctaaatggttgtgtagaagtcaaataacttaggctatttttgtcaaaatttcatcaaatcatcataaactcacttgaatatttaatacagattatatacctcaaattgtgtaccaagtatctttatcctcttgttcttcttttctcacccatatatgtatttattttacatttattccctctcttttgtttacaagaatctaatatttcaatgtgaattgataaagtaatggaaaatgtagttgttactttacttttataatcacatgcatgcatcacctcaataattaatgatagaaacattcacacattacaaaaataatttattaaaaaattataaaataatgatatagattatacaatattaatgctttatttaattttgacattatttgcaatagtgtagctaaagttttaagttagtaattagtataaactcaatatgatttttttaaagcgaaataagtatttaatattagtaaaattgtaatttttatctaatttcgttaatacaaactctgttagtattttaaataagacatatataatggttggattctatattattagatatggacgtaaaagcttagatacttctgaattttctttcaacaaattcaaaactaagttagagtacaactttaagacacttatggagttcatattaacaaaattggacggaaattacaattttattaacattataagtactcgtgctactttgagatgaaaatttggaagattgcttggaagcttcaagttcctccgaaagttcaccaacttatgtgg

SEQ ID NO: 115934 - DNA, 2081 bp, Cannabis sativa
gacatctcttatcccttgcaccatatcatagacattatatccttccaagagaataattgaagtgattccaccagtcagcctaaatgatagcatgattttaatgctcaatcaaattggtaggtgttagtatgaaaaatagtttaaggcagattagcttgttgctcaagtactctgtttaagtattgattgatgctcatgcctgtataatccgcatagattaatgcatcaattattgttatttattttttattcagatgagatgcagcctaatggagtttgttcattcaactaatgtcttagctaatccacatatataaacaggtgtatatcataggtggagatggcactttgcgtggtgcagtgaaaatattcaatgagattcgccgccgcaaattgaatgttgccgttactggaatccccaaaacagtggacaatgatgtaggcataattgacaggtctttcggtttccagacagctgtagaaatggctcagcaagctattagtgctgctaatgtggaagcagagagtgcagtcaatggaataggtctggtaaagctaatgggtcgaagcaccggacacattgctcttcatgcaacactaagcagtggggatgttgattgctgcttaattcctgaaatggatttctacttagatgggaaaggaggtctctttgagttccttgagcagagactcagagaaaatggacatgcagtactagtagtagctgaaggggcaggacaagaactgataccaagaactgatgcccagaaggaagagagggatgagtccggcaaccttgtctttctcgacgtgggtgtctggttgaagtcagagctaaaaaattggtggacaagagaccatccgggtgaattgtttacagtgaagtacatagatcccacatacatgatacgtgcagttcccgccaatgccacagataactcctactgcacactgctagcacattcagccattcatggagttatggctggctatacaggatttgtgcctggtcccatcaatcgtaactttgcttatatccatttggaagaggtggcgcagactaagaatgaagtcgacacaaaggaccataaatgggcatgggtcagatctgtatctactcagcctgattttgtgaggaggtaaatttttaatcatctcttgtgtccataagaagtgtttatcttctcaggttttggtctttttaagctctacctatatcacgaataagttaacacacttatttacctatcaatagataacaatgatgatgtaccagaattagaaaaccgaagatggggacagatctaatctgtaaaactgaattacgttgaaagaaaatattcaatttccaaagacctgttattcttgtttctgtgaaatttacagttgatctgtagccatgtttttggtcggtgttttgatattgtttttcttttgcttcttttattttatgttatcacttcacttgtttagttcatgtgctgtggctttactttcggaagtactaggccagcatatttatattatgggtgtgtgcagtgtgtacaaatccatttatattttattttagtttttcttaaaggtggcaagaagttgacagtgatgattgataagttggccgaggagtaaaatttaagtcttctttatcttatggtagattttcaaagtttactttctagacacaaaagattataaactatattagtgggattatggacccatacatgtctcgtactggatgacactttcccataccgcaatgtcatggacgaacgaataagtcgaaaatgcgaaggtatgtgaattgtgatgaacatacttttatcggtatattagtattaccatttaaaatggttcgttatttattccattaaaagttgttaaagtgataaagcaaaatggaaaaaaggaaaaaaaaagcttctataattgtggaatcaccaatgaatttggctgcaagaggaattgctttgacaataatctagcaatgtcacatacacttgctttctataaagaaagacaaccaatttgcatggaccactttatcacacactgactagagaatcacaaatctctttcaa

SEQ ID NO: 115935 - DNA, 871 bp, Cannabis sativa
  modified_base (52)..(54): a, c, t, g, unknown or other
  modified_base (829)..(834): a, c, t, g, unknown or other
tttctaatcttttattgttgacaaatcatattagattgtaatgggttttatnnngggcataaaatcccaacatatactttatatgagtctttactctctaagaatttcggtctcatttgtacaacttgttgtaaaaaaagaaacttggtatcttgatctgtgtagacccacttaatcctacaccaactgcttatgcaggtgcttttttattcatcatgataggtctcaaaagggacatcagttcttcgaatgcaagtggcaacaacagtcctcgtgggcagacgaaaaaacaagatactgcctttcttgctacatcattgtctacaccatattcatgtggggaccacacccagcgtcctggtcagtcgtctttgcaaggctaaccttgcctacacccctcatcttttcttccaaaaaaaaccttttgtgggattcactttccccgtgaaaattgtacttcttgaccccaccactatgcaaagggtggatgagattaaaagagctctagagggctgatgtcttggagggcctctatgcctctttactaactggaacaacaattaatgtagaggctttagagaaatgcttggcacccaaagtggggagtgagaccaagtggtcggagacacgtccaaatcgcccttggacacctaggcaacttgcaacagtattgacgccttttctctagctcatgccaccaaaaaataagcgattggggtcagattttgaacttttatattttaacttttgtcgttgcatgtagctttcttatttttccttattgcaataggtagctctgttggcagaaagtgttggaaatattttaccnnnnnntagatttactaccatgtatatttcattaacatcctaa

SEQ ID NO: 115936 - DNA, 1139 bp, Cannabis sativa
tctctctctctctctcttgcagtcgttggagaactatcttcctcttctcccttcttcctccatgtgcggagctgcctaaaccagtttgaccccctttaattgttgaacggtaaaccaataccatcgttggcttccccacacccaaaataaaaggatcacatgaacctggttaagtgagtttcttactatctctgaatattacaaataatttggcagcatttaatatttgaatgagtcaatcccatgaaatcctctcatatcccctgattctcgaaatgcttcaattataggagtattgattgacctatttgcaagaaaaaaaattgttgaaatgaatctagacattttctcctatgaactcgctggtcggatgctttcgatgagatggatctttggttgctcagacttctggtcgacataccctgtccagcatatgtctgatgctcaacaattccatttggtctatacagctgactaacgttttttggagagtctcatcaaaggtccctcattgctcaacctctttcatatttaccacatgtcacattgttttcattagagcaatttttggatattaatgcttcgtatttcaaggtccttttaatttattttcatttcaagtatctttaaccaaaaattttaaattataaaatattttaagaatgtgtagtcaacaatctctctaatagtaaaggtgtatatgatacatttttttttccaaaaatattaagaaacaccttaaagttctaagcactacaggtagtatcatactactaatggtgtaagatattatcaactttcacacattttaattttataaattatataagtaccaattaaccattcacaacacaccacatcaatatagtgttgaacatcttaaaatacttaatgacaatacttttttagtactattatggtaggatcacatacttaaacttacaatgttgctagaaagtagaattaatcacaattgacatatataccacaaaatttttttttaccatacaatcgacattcatgatacttatatataaatatattagggttcgtttggtatgtcgtattacatcgtattatatattatatagtatattaaattatattttataaacttttatgtaaaactatatgtggta

SEQ ID NO: 115937 - DNA, 3728 bp, Cannabis sativa
  modified_base (3657)..(3693): a, c, t, g, unknown or other
attttttttgaccatttcacttcatctttacccaaaatgatgaaaagtaataataaataataaaatagataaacaagagacaaaaaccatttgtttggatttactaaaaaccgtgttgtttatttgaattttgttcttatccaatttcattttcatatatagatatgataaaagtgatcaaaagttacattacatcatccctaactggtcaacttttaatcaaattttcttgctctttttaagtgaatttgtcaagattagcacaattaggtcaaatactaaatatgtatgacaaagattgataataagaaaaggaatacaatgagaccaaaacagtgtacattatagctagctttctttctcctcttcttatataatacagattaatttctaagtttgaagaaaatagcagaagcatgaatgatacaataggactgatgatggtgaaggaaactgcagatgtacttggacgaagatgaagaagaagaaggcagtacgagggttatccttaccttcaaattcaagggtaaaattgtttatctgaaatagctgaactttgagaagtaatgtaagtaagttcctgcagtttcttgatatttttgtcctaaaaggtgccaaaaacgtccgattgtacccggtgcaaagtcccgattcccgaactacttagctcatcaacaacaatatctgatcacacttgtctgcattgattggttcaacaagaagaataatgtaagacatacagaaagctttcatgtggattgtatgagtttccaggtttcggaaggcaaaaaagaagtctagcttatcatgcgatgaaggagagtgaaaatttactaacaattttgaccaaactgcagtagatataggcatgttattcatttatgtacttaaataactatatcaataagtaggttttccccactattgaacagggttttccaattctacagatgctacgatggcaaatcggaaagcaccatcctcataatgtagccaccaatgggcctggaaattggacaatctcaaatctaggaaatgaaatcgtacaagactacaaaacttggaagaagcatacataaagaatatatgtcaaagtgagggaacggaaataggtgaaagggcacaaacaaagaaagggtatttggtgaagaaaaaggctttgagacaaaagcaacagataaaagagggtagtgttgggttgacagagaaaaatgtaattgaaaatatatttcaatatgtagaagtagctagtagcatcaatgttgaaattttcaacctcaagacatgattcttacagtgaaattcaaccacaggacattgcttaagatgataagctaaaacagtaatgcatagcaagaaggaagatatatgtaaagagaaattcatgggagggacagtcttcatttggataacaagacacgaagagacatgatacactctgtgttctgaagataaaccgtagacaatgaagatgactaatttatagatgcaactattggccttactcaaggggcaattcccacatcatacaaatactgtaacttttaaaatccattcccttcactctttggtttctctcaatccgtctcttgtccacccttgtccaagcaacaagagttcatatacacaaacacataacccacaacattagtcagaagtggatgattatacttagaagtatgctctctactgtaccagcttctgtgagagttgatttagaccctcggtgagcctgaactacgactcttacaaactctgaactacggacaaaccacgtctcttcccaagcctcacaatactgattaatatgttcaatcgaaccataacacttatagataatgggagaaatttgttcaaactcacacgctatcgtatgctggaaataaagaaccaaaaactaaatcaacaccccaaacatgcatatgactccttcctgcatttctcttttaatccaaactcattcattttcagttaaaagaaacattagactacatgtccattaaattgtgattatcatctcaaaaagacaaataaatcaccaaatattatggctgataatttaaagtacaatatagaaaacaaattacctttgataagaccaaaacgaaaggcagaagtaagagccaatcacctattccatcgcaggaaacctagcaattttggactttaacttcctattatgattttcctgccaatttcagagaaaaagaacagaaaagaattcatcttaatctacaaagattgcaaaatatatctctacattttccttcaagtaatacaaatttcagatatctctatcataaacagttatgataaaacagcaacaaataaacccatatgaccaaagaatcccaaatttgaagaacaagttgttacctgttcaagtacattagctgagctcttctccacaagactagccaaattctcaatctttgcaagcattttctcatacatgtcctcaacaccacttgtataattcatggcttgagaccccattagtttactaagttccccaacctccaaaccctgggcacacacatccaattccctctgaatcttcgacacctgtttcctctgacccaaactctcatcgttcctgtcctcgctcataggcgaagtcctcagctcacagggcaagagaggaaacggcgagttgggactgaaagaaccgtaatttcctcgaaacgcaggcccaatgttgacaatgtcgatcgatttgggctcaaaagatcgagctaatgtccgaaactggtaacccctgtactcgtgggtatgaatgggttggtcaagaaacggagtaccaaagagtatgaagacacacgaggcaagattagcggcgatcggattgtctacgatagggatagaaagatcggtctttaaggaaagagaagccgagacacagaattcacggattgaaggtcgaagctgggtttttcttcgaccggagaaccaaccaatgagcgtgcgatgttggtctgaaccggcgagaaggcgattgagagcctgagagtcgattcttccggtggagtcgtagaaactgttgatagtccctgagcagatgaatccggtgacagtggcgaccagaggagaagaatcagaggtcggagtagtggtggaagggaagtcatcggagagattggagggagtgatgtgtgtgacgtggccgaatagaagaccgtcgactgcgcctgaggagaatgagaagcgttggatgagagaagctagggttgggcctgatattgctatcttctgtagaggaaggtcggccatggcgaccgagagagagtgagttagtgagtcggacgagttggtttgggggcgagtttgtgactgggaagggaaaaagagaaaccaaaacaaagccaaaaactacgtcgttttaaaccaaactcaacttccttcttaaactacttgataaaactcttacataggttttctaccttaactagccaagattttcggactacaatgtgatattttattggtgaaatttattattagattttgttttatagtttaaatgtgattcgctagtgtctttccgttttttagtattgctataagacaccagtagtgcttaacaccttctccacatgttacgctgcgattagctaaccatactccctaaaaattattatggtaccgtttggtaacacnnnnnnnnnnnnnnnnnnnnnnnnnnnnnnnnnnnnnaaatttttgtttttaaaaattttacttttgaaaaa

SEQ ID NO: 115938 - DNA, 3234 bp, Cannabis sativa
accatttttatttatgtatatacagctcatcatatctttaaaatctcatgctaatccactatctgattctgatgctgtggtttcaactacccaatttcatacaaacttatactaaatttaaattaaatgtactcgtacacatgatatatatatttatattgctttaagatttttggatatgatcatttataatgatagctttataaagctttacaaaactctagtgcattctattatacagctaatgaatcaaattaatgaaattgtttgtttgtacttaaaatagaaagaaaagaagaagaaggaactcattttaggccaaacaaaacgttgtggccttattaaacttgatttggtgtatgttgaaacttcacaattagtcattattaatttgaccactaaattatcagagattgaatcaagttcttaagggcgcatttgtcgcgttgtagttaaatttgtgtgtaatttgacatatttatttgattatgtaattacattataattgtgtaatttaaggtaattgaggggttttattacacccatcaatttttatggccccataaaaattgagtataattacacggtataaatactaaaaacttctcattttaaatatttattagtaaaaacaggttaatttagatttttaccccctaaactttgacatataccaaatcatactctctgaacttttctggttgttaaaaattcctctcaaactattgagattgttagaattaagaatctttgtctaattttactaaagaaagtccgacgtggttaaaaatttaggcaattgatcaatacatgttaaagttcaaggagaatgattttataaaaatcaaagttcggggggaacgatttagtatatggacaatcaacatattagcaaaattaaatgaaattagacaaaaattcttaaatcaaacaattttaatagtttagagagaatttttaacgacctaaaaaagtttaagagcatgatttgatacatgtcaaatttaaaaagtaaaaatctaaattttatttttctgtgtaattaccatctattttgtcaaataaaatattgtgaaatcatatataattactatctaatatttaaatatactttatattttaaaatataatataattactagactatataattaccactctaataattacactaaacacaccctaaagaaaacaggaaatttgaggatcaatatattaaaaatttaataaagtaaaagaactaataataagtagctaaaccagtgaaaaaataaataaattataataaaaatcagaagaacctgaacacattgagttatcatctattaatataattttatagaaatcataattaccaccaaccaactgtaataaaaacatattcaaaccagttactaccatcattatctgaattatcttccttttattatcttttgggaacagtttggtattaacccttttttaattactattattattctccataactttctccttgaaagggttgtttctttgtttttttttttttttttgggtgcaagcaataatggctgtttcctttctcatcttcaccacttgaaatatatttattattattatcactcttcatttccctcaatgtggtttttattatattctttaatttaatttgccagagctctattaatgtccttttagtacagttagttcaactacaatataatatcaaaagtaattcttttttattttatttttttttctctctttgtgagagaattagtatattaattatatcagctttcttcattctcaatcattttggttgttgcctgtctcttctctgttcttttttttctttttaactgtgaaaattagctgtaacttttgctcaaataaatctcttgagcaaatatctgaaactcattatattactcttgtcctactcaactcaactcaactcaatcaactttggttttgttcataagcttaatcacttatcttggttttttctctcttgtcctactaagttcaatcaactcagaaatagtaactagttactggttactttctgatattctgttcttggaaaatgcctccaacatattttccattaaggtgggaaagcacaggagatcaatggtggtatgcttcaccaatagattgggcagctgcaaatggacactatgatttagtgaaagagcttctcaaaattgacagcaaccacttgatcaaactcacctcattacgcagaattaggcgactagaaactgtttgggatgatgaagaacaataccatgatgtatccaaatgcaggtctcatgtagctagaaagcttttccatcattgtgaatcaaagaaaagtaacaagaactcactcatcagagctggctatggtggatggcttatctacactgcagcctcagctggtgatttcggttttgttcaagaactacttgagagaaaccctcttcttgtttttggtgaaggagagtatggtgttactgatatactatatgctgcagcaaggagtaagaattctgatgtttttaggctcttgcttgactttgcttcttcaccaaggttcatggctggtaaaggtggagactttgaggaacatattggtgatattccttctgtttacaagtgggaaatgattaatagggctgttcatgctgctgctagaggtggaaatttgatgattctgaaggagcttcttgctaattgttctgatgttttggcttatagggatgttcaaggctcaactatttttcatactgcagctggcagaggacaagttgaggttagtttaaataaaaaatccacttgatatttcatatgattttgttaaagttttaaacttgaaaaccaagaaagtgtttttacctctctagccattaatattcttagctttgtctttttctttatctattgtaactagaaaagaaaaagaaaaagatttagtggaaatttggtcttccaatctctatattctctctttagatggtgtttttctctaggggtcaatactatttgcatatttggcacattttgtaggatatggattttgggtacttagttttaatgctcaccatgttaagaaaataatttggagcaaaaatggttatgctgcaaatatcattattagaatattagatgcggtaatatttttgtttttttaattttttaatcataaaatgaaagtaaaatttttgtttttgaaaaataaaaatgcgttctgtaatcacttttgttttt

SEQ ID NO: 115939 - DNA, 1740 bp, Cannabis sativa
aagtttccgcttgaagaaccatactctcaagacctagattccatctctcaatggtgcgcttccatcactgacgcttccgaaaaccacaattgcaacccctttgcctcaacctcattcccttgttctccggtgacccttgttgatgccttcaatcccgtaagctgtgactccgattggttctcccgttccggctctgcatcagactccgactccgactccgaccgcgacatcagctgttttgtcaccgatctcttcgagcgtggcagctcagagcaacgtgatggttatagcgatcgaaattcaggtttgtctttgaacgagtttgaaattgggggttgttctgtaggggttgactttgaattaggtgaacgttcaagcccacgaggggtcgattcgcttgtggaaggacttagagttgttcgattcgattctgagtcggattctgaagatggtaattttggggttttgggtttcaattcgttggacgataatgaaggcaggaataatggagtcaacgattgggatattcgaagtcctttaaatggcccttgtcaggaggatcaaaggtctctctatgaagagtttgattgggaagaagtggaggaaagagtcaatgagagagaaaatctaagcattgtgattgatgacgaatttgaagaagaggtacaaacaatggaggaatacgagcctgcagaacaggcagcaagaaacattgagtgggaaattctgttggcgatcaataatctagctatgaattcgagtttggaacgcaatgtagattctggtaccgaatcctatttctctgttcaggatgactacatttatgctgttggtggtgagtacgaaacccttttcgagcaattcattgaaagtgagactgctttgaaaggcagtcctccagctgcgaaaagcgttgtggagaatcttccttctgtcgagttaacgatggaggagttgcagaaaaatgatgtcgtttgtgctgtttgcaaagataagattttagtggaggagaaggtgaagaggctaccatgttgccactactaccatggggattgcattgtgccctggttgggcattcgtaatacatgccctgtttgtaggtacgagttgccaacagacgatgcagattatgagctgaggaagagccaaagggctcgccgtgtctcgccaacagattcccaggtcacattcaatttcgagttatttgcttaaatgttttccatgtgtatatactcactccatgtatatagctcccgtaggtgaaaattgtgtatgaaccttgtcaaagagttttttggattgttgtaatagtgtatagtttttaatattggctgctacgtacaatccatgcaatgtcatttgaataatttgcttttgatgtcaaattgagttcttgcttataccagtgatcctttgtttgaatgaagagcaatagtttatcattcacttaagtaaattttctttcggtacttattatactagtcctaggataattaattcaaggatttactaaaagttattgaattaattttaaccctgttatggagttgtattgctgataagtcgttaagctgcattgtaactgtctatgatgaccgaatcatttgctctccctgactaattggacttttaaggtggcgtttggttggaggtaatgaaatagaatggaaataattttcattccattccttgcattttaaagtattagaatggcattctaatggaatgctctttccacta

SEQ ID NO: 115940 - DNA, 2034 bp, Cannabis sativa
  modified_base (1884)..(1894): a, c, t, g, unknown or other
ggtaaaatatatccaacactatataaggtagctaccaaattgatttgcataagactcaaaaatattctccctgatatagtttctctaaatcaggatggatttataaaaggtagataaatagcacataacatcatgatatgccaagatctcattaggaattatggtagaaaagggtctaagccgaattacatgatcaagcttgatcttcaaaaggcttatgacacaatggattgggatttttcggaagaaatgttatattctttgaaattcccagagaagttcataaggttaatcatgacatgcattagaactcctagattctctttaatgttcaatggatctatgcatggattctttgaagcagaaaggggattgaggcaaggcaatccaatgtcccctttcctttttgtatttgggatggagtatctcagtcgaatcatgagcaagattgggaagaaagggactttggttaccatgaaagatgtgctaaaatgaaattaaatcacttaagttttgctgacgatgtgcttttgttttgtagaggtgattttaagagcatatatttgttgatgcaagggctgaaattgttctcaaacacatctggtttaacactaaataacacaaaatcagcagtgtattgtagcggaatggatgagagagagattaaaagaatactggacatgataggatttactagacaagaagagccatttaaatacctggggttccaatttgtgcaaggaagattgcagctgcagattgcattagtcttgctcaaaaaatgacaaggaaaatcagagtttggtccactagaaatctgtcctttgctggaaggttaatgttggttaactcggttcttcttacaattcatatgtattggagtcaaattatgattctccccgaaaaagtcattaaagaaatagagggagaatgcagatgctttttgtggacagggaagagtgtaatggcaggggctggatcagttacttgggaaagtttatgcaacccgaaaaaagaaggaggtctaggcttgctgaatgttgctaaatggaatgttgcaacaatgtttaagcaggtttgggcagtggcaaacaaggacaatttatgggtgaaatgggttcattgtgtatacattaagcaccacaactggtgggagtataaagctccccaaagcagtaattggtactaaaaaaaatggtggacattagagacatagtaaagcagaagtttcagccagacgagtttgcaaagaatgagtttaaagtggcagcaggttatagaagccttgcacaagatcatgagagagtggaatggtgtaatgaagtttggtctagacttaatatactgaaacacagggttagctatgttaaataggttgaagactaaagataggctatacaaatacaaggtgatcgactcttctacctgccccttctgcaataatgaagaagaaacaatagaccacctgttcttcaagtgtgatttttctcagttgttaaaaaacatacggaaagcaaagcaatccaaattcaagaagggtgtaagagcggctagtattgcagcccttgtgtatttgatatggagaagaagaaatgacttgatctggactgagaaaactcagcagccaaccgaattattatagcagctaaaaaaaatgttaaaattagagtgatgcttgtaatgccaaaaaaagtaaaactcaaagatagagaatggtttgaaagcttgtaaataattgcatagaaattattaaggccattgatggtgcttatagattgtaaataaaagttttgtgcaatgaacatcatctgattcataaaaaaaaaatgttgactgataacaagctcaatggagctaattttatcaaatggagagagaacattnnnnnnnnnnncattggtgaaaatgccctgtttgtgtttactgaagaggctactgagcagccaggtgagaatgcaaccaaggcagtcaaagaaaagttcgagagttggcagaatgataacaacaaagctcgatactttatgttgtctagca

SEQ ID NO: 115941 - DNA, 1609 bp, Cannabis sativa
agctgtggtccagtcaattccaacatatgcaatgagttgtttctgtttaccaacaactttttgtaatcaattggaatccatgatggctaaattttgttggggttcaaacaaagatggctcaaaaatccattggagaagttgaaaattgctttgtaagtcgaaatttgaaggaggaatgggttttcgttcctttgtacacttcaatcaagctctccttgcaaaacaagcatggagaatttttgaaatgtccaactctcttctcagtcgactactaaaacatagatacttctccaacaacacctttttggaggcacgtcttggtcattcacccttacttaattggcaagatattcattgggggcgtcagctactagttgagggcttgcgttttaagattggtaatagtttcaatgtgttggttggtgttgataaatgaatctcaagtcacaacaatttcaatctagtaagttactcgggtccgaacaatgctcctgtatcatacttcatcaccgaccaacgagaatggaacttaccactcctaaatgcatatttccaaccgattgatgtggataaaattgtttctattcctctcagtttttttcctaacaatgatcgatacatttggcatcacaacactactggcctttacacagtaaattctggtttccacttggctgagaatatagttgagggacaagaatcaagtggttcaagcacacatagagattggtggaaaattttttggagtcttaatctaccttcaaaagttaaaatctttgcttggagaatgatgcaaaacgctctacctgtggctactacactatgctgaaggaaagtcataaattctgccacttgttccttatgtaataatgcgtgggagtcaatgttatgttcaattgcaccaaggcaaggaaggtttggagggatacaaagttcaccattgatcatgcacatgcacaagatatgcacaattgtgacaatccatttatcttcaatacactcaaaacaagatttcaaattgattgtatgcacaatgtgggctatttggcatgatcgaaacaaagtgactcatggaggtgtaccaagatccagcctcaccattgcaacattcgcaagcacgcatctggacaaataagctcggttaagataaaaaaaccagcaactcacaacctgcaatagccattctactaatgctgtaatagatccgcaaccagttaggcatgagtttcgagctattccatgggcaccaccaaccactccaggaaaattgaatgtagatgctgctgctaatgaggagttgaaaatcttggcgtgtggtgcggttgtaagagaccatcatggtaatgttatagctactgtatccaaaccggtccaaggatgtttttcgatctgatgaaatggaggctaaatcgctctttcatagtctcaattgggtgctgcaattacaacttctaattacacatatagaaacagatgcattgcatgtttcttcggcccacaattctacatttaggaacctctctagttttaatgatttaattgttgatattagttgtcttttatcctttttctcaagagtaactgtttctcatgttaagagaaatgctaa

SEQ ID NO: 115942 - DNA, 4256 bp, Cannabis sativa
  modified_base (4213)..(4231): a, c, t, g, unknown or other
atgattagcgctcccactcaattacactaccatgttcctaagatgtaagtattaggtcaattgagctttaacaaacaacactaagaacataaataacacagttgagatcgaacataaccatatcaagattaagatccattgacctaagatcaacaaactgatatcgacttaaatagatataatagtaagtttatgatatcttatcccttgtcaatgtcgatccattcaatgtatactccatacaaccgatcctagtatactttttcagtaccctagaaaggacataacacttatcaaaggtttaggtaagctctatcgctaattatcatgttagtctaaatccagtgtactgataaatcatgggacataaactttgatacatataatcatgattatattccactgtgtggacaaaactataatcacgaaaaaatcatgtgaaccatgcaacataaaataatttttgatcttttattaaatagtaaatcttattatattgaaataggtattatttagggcacaaaacgcaatagaggtaactaccgaataaataatgacctacttcagatttttcgagtgaaaactcatctaattcgagctttgacgagtgggaagtcatgagtgactcattagagtcctcagagcccgtggtatagcaccaccattaccctaaccaaatcagtggataaggatacaatcagttcatttgggaattgaacagaggctgtaggcattatcttacctactgcttggacgtacaaagtctaagctaacatcctagacacactaccaaaaggttgaacagagcctttgaagaaaaactcgatactagtaaaaatcattgtctttatagcgaagtataaaaccaaaccagatcctccaccaaaatgtaaggtgatggcaaaagccacacaaacttgctggaaagcttcgaataagaacccacacttttcctaactttttgaaatggccagtgaagtttatgttggacctactacggaggatattgaaatggctgttatggatgttgatgtccaagacgttgaggactacggagaggtctgtgcaacctcttctcctaatggtgaaagagaagaagtattggaagaagaagaagaaatgggtcctcaatttcttccattgggagggtacaatgaggctggagagcttgtttttgagtctggggatgtctttgttctggaccaagattacatcaaagtggagtacaagaagctcgtcccctaaggaataaggagaaaaatgtgcctcagtgggtttctcctttatccattcttacctgcaagaggattaagaatcttcatgtaaaaggtcttcttggcagagtggaggcctttcaagcctaccccggacaactgccactaacctcagagaaggtctctaagtgtggtctgaaccccacactggagaaggtgtgatcttgcctgtgcatccatacttcaaaaatatcacgaactactgataggctatttttaggtgcattttattaagtgttgtagagttgtgtctcaattgattatattaatttttgtagaattacacttgttttctatttgtttcaggtttaaatggtaaaatttataatgtgaattgaaaatgagaaaaagcatgttaaataagatgaatatgatgaattatcatggaatttagagttctaggatataaatggtgaaaaattctacgtttttgatgctcaacacaccccgtttgtgattgaaaatcaagcctgaatcttcaagccaatttttgacaatgatgcattcactttgaggaaaaattttgcgaatagaacttctagatctctctttcatatttgtataacatcttgaatcgtccaattctgagcaatattgaaagaattatggctaaaaaattactagttgtcacactaggaagctcactgccaaagatggagcatcaagtgccgcgacactacaaggtagtgtcatggcccacctcttttaaaatgttagaaaattagggttatatctttttttagcaatataaatgccaacttttgaaacttttgaagacaattaaagagggacaaaaatttaagaagaaagcagcactagagacttttatgagtattttttgacaacttatttttttctacactttttctatgttcttagttaattattatcggatattttcaatgattatgaatagctagactttttttagggtgttaatgaagattgtttgtattttattctggttttaatgtgatttaattcttccccaattttctatgtgcatgtattttattcgtacttaatttttttaattgcatgaccattaattagttgtttaatgatttcaataaaaaatttgagaagtgagtattgattattctctattaaaatagacatagattttaatataggacgagagtacctatatgattgatgtagcatttgagatttttattcctaatgcctcctatgtgtttaaatttatcaagagagtggaaaattatcatataagtttagatatatatgccctagcccggatataagtttcttaagtaaatccgctatcacatgaaaattgggctttaaaacttaaattatattaaactaggtaaaatagattcaatagaaattaatcacccttaactttaatcattgtttattttatagtaattaattgctttatttgcttattttgttgtttaaattttgcttaaattatttagttttaaaatcctttcattcgattgctaaataaaaataagaatataatttgttggtatatagctactatccttgtgagaacgatctcacttacctaagtattacttgttaaaaaaatacgtatacttttgtgttggatttatcacaataagtttttggcaccattgttggggactgttttagttaatatcgatatagttgaattatattataatttgtttcttttaatttaattttgctaatattttactaaatgtgtttgacctacaaggtaaatctaaatgttatatcgagattagtaccttgtgaatttttcgcaacaacacaatgagccattctattctgcttgagggagatttaaggagcttaaggagagatgttatcccgatttctcaagtgggtattttatgctgttcttctataacagacttaatgatgaaactagaagctaggtgggtaatggagtagagatatctagagaccctttgttaaggagaagccatgatgtaatgaatctgttgaatgacatggccgattttgcttactactggcactcggatcaatcacttcagggttggagtcaccaattccgtccttattgcccaaattcaccccaaacattttaggaagaggagaatacactatcacttctagaaaaaattacacacttgggggacatggtaagatttctatatgataatttaagggtgcataatttagagtgttttaaggataataactcaaatattaaaaattatgagagttgtttgaataatgtagaagaaagattaattgaacacgtataaggtattggtcctataattaaagaccaagatccctttgaagtggtgttaactgaaaattgggtacattggatgcttgttcaacaagtgatgattttgatttggtaactgaagcaacaccaaatcttaatgaagaagttaattgatatcaaatcacagtcaaggttgtggattttcatgagaaaaatggagaagaagtttccttggagggtgaatcaattatagttgttgatttgagttcgtcaatattattacattataaactaccaatggatccttattttccactaatgtcacctacaccatattacatcctctacgagctaccaaaggtttctcctcaagcatatcatctaaagtctagtgttgttagtgctacttttagaactgttgttcatattcctagatgcctactaagtggaaatcataatagggtgtcactgaggactatctgcaatatgtatgtattttttacttaattaaattggataggataatatatttcgaaactcaatcgaaggtcctcaatgttagcgaggaaggaaaagactccaatattctcacaatccatccgcagttgtggaggatcaaagtttcttagagccacaagtattccaaacaggtagtaggtgttggaaattattttaccaggatctatttactatcatctatgttggattaacaacctaatannnnnnnnnnnnnnnnnnnaataaacacatataaagttagaaaa

SEQ ID NO: 115943 - DNA, 852 bp, Cannabis sativa
  modified_base (804)..(808): a, c, t, g, unknown or other
agggcacaaaacccaacactttcgtcttcaaggggatttggtgtaagagagatcgagagagacgagagtgtgagagaaatagcgatgaattttgggtattttataggaggggtatacctgacattttaaaaccatcaggcatacccatttaaaaaacttacaaatttgttatataactgttatctcaacttttgcccacatgacgtggcatgtccacgtgggcaagactaatgccacatggagtgcaacttgtcagcacgaaggccaagtcaacatacataacatatcagttgacgtggagtttgaatacttaagtgggataaagagacaacgaactggccaacttaaggggtttggccgaaagccctgcccgaccctatggctagcataggtcgcccgacctccaacaaaggaagggccgaccagcctatattctggtaggcacttgttgtgtagccttgaccctggaaggcacttgttacgcagcttgtatcctggacaacactacaagccacaaattaggtaggctttaacaacccacgaaaatagggataaagttcagttatttacctattcttggggagtaattaatatattatttgcttattattttattatgtaataaataggtaatatgtcctctttttaagggatattaacctattattctcttgtaagctctcctatataaagagcactagaataaacctaattccactaagttctaagtctcaagctcttagctcagaactctttaagtctgaagtgctaagtctgaaaccctagctctctctctctctctcnnnnnctctctctctctctctatacatatatatatgtatatctctctct

SEQ ID NO: 115944 - DNA, 3011 bp, Cannabis sativa
aaaaaaaaaaaaaaccttatttttctcatacatattatattagagtagtttattattgtagttaatatttggacatattattgactactttttaaaataatgcttaatttttatattatattaattattgtggttgtttatcgaaatttttagaaattaattataaaataaataagcttataaaagaagtaaattaaagaagaagagataaaaaaatttacatagttcgagtgttaataaattctagtctacgagttaatattattaaactataataactttaaattaattcttacaagtatttatgccctagtttaagaaccttaattctcatttcttctcctaaagatcaatttttctccaccttttacatgaagagataatgttctatttataaaagagaatcgggtatggtcatacccagattcggtaaggttttaagatgtcaactaggccctcttagagtaaaatacaatatttattgacttcaagccaattgagtgaggccctattcacgaggtgaggcttatccgtacaaacacagaccgtttgaggatgccaagtgtcgtgcgcagccaggtccatatcgataatattagagaatatagcggacaaaaaggtgacgttcttttggtagcgtacgtgctccgacaatctaatgtgggggacaagttctaacaccgtggggccctgtgtctagagaattccatgtaaggggacgtctggatgctatctgggtgactcttcgattacccgcttccggatcaccacatgaaggtatctagatttgtcttggcaaaatctttgcttctaggtcgaatggccttttcaagatcagagagggccggccttggcaggtgagcaagttgggctaggtccggatcagaactacagacttggtcatctagttgaataatcaactagactgggcccaagtttgggcctaccttagctggtatttaggcttaggaagttacatgtcatcattccggaatcctggataacatttcaggactcatgattcgtgaaggcttgtaggcccccttccaaatttacttgtggatacggagctgggaaggaacgagttcttttgaaattccaaagcaatgagtggtagaaacctacacacgtcaaaagctccttagttcgtgcaggttacgcgccttgagaaggcgtgcaaaatctagggatatggattaacgactggtttatgtgagcgtgacttgcaagacgcatattatcatcaaatgacctcaaatttgcataaggcattaaatgcagccccttttgtattccgtagccattgggtctgcgttgtgctttctagagccaaatctggatcgttagattagagagcacgcaaatcaccacttttggtataaatgttggggaagttgaccattcatcatttttgtcacttcaagtttttgagtttaaattttttagagatgaaaaaactcttgagaggagaaaaaatcccaaaaatatgcttttggtgaatgtctgagtacattgacaaaataattcaccttcttctttgagtacatttgagattaaaaccaaataaaccacccctaaacctcaacattgatccatcagagctaccgagattgcgatgttatcaagtagacgttgacgaactaattgggcgagttcgtgcctttcagacgagactttatttcctcgatcgaatcactgccgccttgccctcaattcagccagaacacgacattcaaattcttgtcccaaagccttcatctccatcacgtaaattatgtgtattgcttgcacatttttaatttttgtcgaagttgatgtggcttagtcaaattaaaaggtagctgactcatgtagttatagggtttgtgagaatctttgttgtgctggtatagagcatttaggtcgattaggacgatttagcttagcaatttaaatttccattggtgatctagtgtctcttgtgaaacttgtgttttttatcgttcaagtctctttcaatgttggatggtatctgttgtaagctcttgttccgtcttcttgttttgcatccttgtgttcccaatctttccattcataagtgaagtttcttggaggacatgcttctagatgttgggtctaccaaggacctctccaagtagttataggagaggactctcttgtacctttactatgtttattagtgtagggttctaactgcttggtttttcctcctttattcttagttacttccatggctgaagcggacagattcacagaagaggtaaatcttgcagaggagctgatccaggaagctggaagcgtagagtcagctgtagtggctaattcatctcattgggagatggatcagtacaagaacaaactttgcaatttcctgatattgtggtcttacgaggagaacgtagggcttagaagtaattctgacttgttctggaacatgctagcactaaaggacgagtctttgtgttattgcatggatggattcagggcttggagctgggcgcacattgagttcggaccgcaccttcctctccggagctacttcacacatttctacaatgaagtagggctagcgccattccaactcattccccaggtatataaattactggcgagatggaacgccttctgcaaggatcaggacgtggaagtcccctcacctaaagaaattcttttcttttacaatgttgaatcaaaccctatgtgaaagaacacattaagggtaggcttttatatgctgaagaagggcgaggatgtggtatgccctgttagctcttgtaggcattaggggtgtacgtcggttggtttggtcagtttatagtaaattttattcaacccaatgtaaagattggttataaaaatctaagtgcgacccgcccaattaagaaaaaaaagtagttacccgcccaatggaattggtcgatttggtcgggttaacacgtccaaaccgaccactaatatttttttttacattcaattgttacattttagttaattataataatgagacaaat

SEQ ID NO: 115945 - DNA, 1796 bp, Cannabis sativa
gggcataaaacccaacagctacatcttgtgatgttttacaatttaaagtgtctatttctcttaatggagcctctcaatgatatgtgtggatcccgatatttaataatagctaacaacaacttcaaaaatataattttgattaacaataccatattcaatatctatcaagatgaagaagaagaagaaaaagtttaagtctcactctaaataataaaccacaaattgaaattagtaaatttgtagtcactttgtaattcaactgaaacaaaaccactttatgattatgcaatgctccgaactcattccatttctctctttttcttttttctacttggggcgccactctttgtaaataaaaaataaggttatttagaatttttacctcctgaactatgatctatgtattattgtgtcctctgaactttcagctcgttataaatggtcactaaactattcacaatattgtaaattagtcagtcaagttttgtcacacgttgcaaaaaaaataatgacatgagtgcttagccaattgtcacatcagcaccacaagtataatttaacattaaaaataaaaaatatgcatttttaaaaaattagtaaactaaatatcaattaatgattagaaaaattacgtaaaaaataaatgaaaaaattttaattattttttcaaattaattacacacgtggtgttgacatggcattgacgtgacaattagctaagcaaccatgtaattattttatttgtcacgtgtgataaaacttgacagaagaatcaacttacaacactgtgaatagttcagagaccatttttaacgggctgaaaagttcaaggggtacaataatacataggtcataattcggggggagcaaaaatcccaaacagtcaaaaaaaaacctacttttcaaattgggcttaatgcctattaggctaggaggagcatgaaaggttgagaaataaatataaatataatttgtgatagaaatgtatttaaaataatgagatatttggaatggcaagatattgctatttacacacagatttttggattccgtcagtgccaccctttgtcttgaccccctctctgcattcgatgtctcaagtaaggtctctttacttagggatgcatcatatgggacaaagacttgatttgctcaagcttcttgactagtgaagctgaggctattctttttatttcgtgggcttctcatgatgtttcacataagataatttggaacttcaaaaagtcaagatggtattctatgtgtggttattggcttgctcttcgcaacttggaaatatcttgggcttttccttcagggggtttgttaggttggtggaaaaagatttggtccctgaatctccctccaaaggtgagactttttgcttggcaagcttcccataatttgattccaacaaagatcaatttggatcatcacgatcttttatctgatggtttgtgtcctttatgtgggttgggagaagaaactacacgccatgctttttggggttgcaactcgctcactcaatgtagaaaattatgagcgtttgtgttgggagatcctcttattcattgtggggattttctcgactttattcatagatattttaatcccctattgaaagagatgatggagttggttttggtgatcttgtggagattctagtacaaacgtaataaaatggtcttgttaaccgaggttttcggcaaccaatataataataataatttagagagctatatggaattaagagagagatttttacgtggttgggggtgttaatgagccttagtcca

SEQ ID NO: 115946 - DNA, 1707 bp, Cannabis sativa
atccacataattattaatatttataatatagcttaataatactcattttttagttgcatttcccatagtatttgtagtagtactcttactcagattcagaaacatacatatctctgccatttacttccctatctcccaccgcacaagtcaccaccaccatctttcctctatcactacttcattttgagacataattattcttttcctctcccaaagtgttgaccttgcttacagaagcttgattaaaaaatgactgaagaagttggccaatatgtttcaaatcatttttaatttcagtcatatcattgtctataatttttctactttcaactatttggttttttatttcagcaacatctctccttatttcagcatttctttctttaagttcctgaaaaatagacaaggtgaaacacaaacaaaaaaaatatgttaaactgcatatgtaaaccacaagtaaaaacatatgataaactactggtatatactgaaaaacacaagtcaaaatatgtaaatcaaagatactaaaatgtaaaacacgggttctcaaatttaaactactaattctggaatgtaaatgttgtaaaaattaaatcattaattctaaactgtaaatgtaacccacagttttaaaatgtaaaatacaaattcaacttattttaagaaaacaaattaggagtaaaaaatcaattaatttaaaccacaattgtcaaaaataaataacaaatcgaatatgtggcaatgtaaaccatgcattgagaattgtaaaccacagaagcatttaatataatcacatgcattaaaatgtaatcgccaaattctgaaatgcaagtcatgcttttgaaaatgtaaaccataggtatgaaaggtaagccaccaagaagattacaaacaaattatttaagataaggaaaaatattctgcattttaccttcaaaacatccaatattttctcatgagaacttgatgatttcctctttttcttcacaatccgaattctagtctccataacctacaagaagaatatctaaattgttaacaagtacaaacgaaatacaaacaatagattttacatggaaactattggcttaaaaaaatgtaaaacacaagaagaagtaaaaaatgcatgatttaatgatatctacatctatgggagctgtgatatcttatttcactagaaaccctgaaacccagttccatatgtaatagaatgctacagttcccatcttctactaggaattcattatgtagaggggatattattaggtggaaggctttgctagtggaccatttatataatgaattaatagtaagacaattatattctttaattactccaatctagctagcagcaagggaattagagcaatcttggaaactaaagttagaggcaataaagttaaagacattatggcttcttccttacaaggttgggaccatttttctagtcccaaaattgaaggaataattctaattgtatggttgaataagcttgtaagtgttgagattttgaaaaaacctgagcaatttgttcatggtcgaataaagatggcagggcttgataaatctttttgtctcacatttgtgtatggtagtaactctctagctgaaaggaatctattatggcaaagactggctaactcgtatatgtcgttcaaaccatggattctatgtggtgacactactacaaaaacaccctttagaggc

SEQ ID NO: 115947 - DNA, 1381 bp, Cannabis sativa
  modified_base (47)..(60): a, c, t, g, unknown or other
  modified_base (172)..(178): a, c, t, g, unknown or other
  modified_base (1314)..(1343): a, c, t, g, unknown or other
aattaataaatatattaaatgacactattatttaataattaattttnnnnnnnnnnnnnnttagaattggcatttaagtggttgaattggaaaattcgcgtttctaagaaaatgggatggaaaaatgacaaaatgacaaaattacaaagtggggcccaataacatcctaagnnnnnnnacactagtggattttaccatttatttttctattattttaatgctaatcccatgtctcgggtccgggtccctatctatggtgggtcctacgtctcggtcgaggttaaaattcgggttaagatttgggttttcgtgtcgggccctattctgtgtttgggtctgggtggcggtcctaatctcggtccagttcctagtttgggtttgggtgtgggtggcggtcctagtttgggtcctgggttttggggtgtggtcttgggattcgggtcccgatctgggtctgggtccggatctcggcctaggtccaagtctcggtatgagttctggtccatgttttggtttgggttttggtttgggtttttgtttgggtcatggtctgggtttgtgtccaagtcagagtcctagtccctttccagtgtcccaatccgctttcgatttcagtatgaatttcgaggcctagaactgggacctggaaacaaaacgggaccctagtctcggtcccagacacagaccttgagctgggactcggaccgggacaaaggacttgaaccggaaccagaccggtacccatgaccgggatccagatcttgacccgagatctgagaatcggggtttagaccagaactgtatttgtgtctggatttgggagtcggacacgaaccctagaccgggaataggacacggacccaaatcaagaattagacttagacccaatgacccagaaaaggacccagacctggacctagacccgaactcggacctggacccaaactcgggatccgatccctgactctgactcaaacccagacggggatccagacacggatgggggacccgaaccaaaactcgtacctgaacccaaacccataccaaactcaaacccgtaccataacccaaacccgtacccgaactcgaacctagactctgaccgggatcgaaaccctagagttggacccgaagccaaactgagatccggacctggaccaagacccgaacccaaactcgaaccaagacttagaccctgacctaaatcaaaccctgacctggacccgaactcgaacccggacttggaaccagaaatgttatgaggaacaaaatccgaacctggacccaagccagtgttggaaatattttaccagnnnnnnnnnnnnnnnnnnnnnnnnnnnnnntaacatcctaatataaatttctaaaacaatgaaataaa

SEQ ID NO: 115948 - DNA, 1053 bp, Cannabis sativa
  modified_base (40)..(76): a, c, t, g, unknown or other
aactttatatgtgtttattattgttttagaaagttcatannnnnnnnnnnnnnnnnnnnnnnnnnnnnnnnnnnnnagatcctggtaaaataaaatccaacactcaggttagtgaaccaaaaatgcctatgccacctcacagaggcctacctctaacccaaacaagtgaaccacaaataccagtgccatatccaacacctcatgcttcatctcaaactagtgaaccacaaatgcttgtgtgaatagagacaaatcctgctccatctttatctaatgaaccattagtgcctgtgtctgatgaacaaaccattgtcctacataacaatgccttgcctattgccttagttatttcaggtactagtaggagccattccatgagaaccaggtctcaaaatggaataattaaacccaaatcctatcttgctactaagcacccgcttcctgaatctcttcttcttactgaacccaaatcccttaaaactgccctcagcaatccaaaatggtttgttgctatgaattctgagtttcaagccctcactaaacaaaaaacatggacccttgtcccttacaacaaaaatatgcaggttattacaaacaaatgggttcatagagttaagcttaactcagatggcagtttggacaaatgtaaatcaagattagttgcaagaggttaccttcaaactcctagaattgactataaagacaccttcaatcctgtggtggaacctgtcactgttagacttgtcctctccctgactatcaatgctaactggccaatcaagcaactagatgtaagtgatgcctttctgaatggcaatctaaatgaaattgtctacatgcaacaacctcttggctttgttgatgcatccaaatcagaccatgtttgcctccttcacaaagctctatatggttttaaacaggctccaagagcttggaatgacaagctaaagcaaacactacttcattggggttttcaagggtcaaaatctgattgctccttgttcattcatggttgtaatacccgataaaaatatacatatattttaaatttta

SEQ ID NO: 115949 - DNA, 1694 bp, Cannabis sativa
ttttttttttttttttggggggggggggggggaaacaatcattacccccattaaattttttgcaaaaactctttctctctccttctagtataaataaccatccgatactccatttactttttgtagcaacttcaaatttttttagagaaaacctttttgttctttaagttcttctagagcaatcccagagttttcatgctaacatcctatgagtttttaaacttcgcattttagcttcctctcgactttaaacagtgagtaagtcttcttcccatcccttgcatgatttttttacaagttttaatctttatatattgcacttcactatctattggaatattttgtgtgagtgcactgccaccgtctatttgaaataaacctttttatgaggggtgattttaagttatttcattgtccgtttgagattaggatgaccttaggtgttttaacttcactcgaaactatgcttttagctttatttgcattggtggttgattctttcaacttttgggtttcttaagaaattcaagaactttcattttttaaagtcttatagaaaaatctccaaaaccttctttctgattctctatctgtgctaagtcaacccattagagagccaaactcttaacttataaattctaatgtactatgcaaattactttaacaagattaaagtaaacttataccatttgattgtgtgtagtcttgatgtagatgagtttcttagcttgatttgcgtattttgatccaaaattgactttacccgagagttaattttgactttgactattacttttgggttgacttttgactttgagcttttgtagccctcttttaaatatggtcttgaattcttgctctcttcattaaacttttgctcttatgaagtatgaagtagttgatatacttgttgaatccacttctttgattatgtttgactttaccgagcaaatattaatactatgtgaattttcatgtaaaatgatcaagaaaatattagtaacaaataataatcaaatatgtgtatatcatcaaaataagtgaatgattgacttttggtcaacactttgcccccaacgtgattatcacaaaagcctttgtggacttcactgaggaatcatgcaacttattctttattaaaacatctcatgagaggtaaagagaattcatgcctgtacattaccctatctagaattagataccgtacaacttattgtacaaacttccgggcttcatttttttcgtcaggtagtgctcatgttttaaggtaggtcgcgatgggagtcatccatgaaggagtgatgtctagcaggttgatctcttctgaacaggtaatgcttggatcttcaaggtattcaattgacatgagatttgttttgtccacgactgtgctacttgctagtcgggccaatgcatctgatgttgcattttcttctcttgtgacctgccttatggtgtaccctttaaattgtgctagtaaatccttaatcttgctaagacatgctgcaattttttcaccccttgccatgtattctcctgtcacatgattgaccaccaattgtgagtcattacatatgtcaaggtgttcggtgtgtgttgtcgagcgaaattcgcaacaccaaaagtatatgataattctaataatacgaagaaattgtttgaagaacaaatgcgagtattcaacctaaaatagc

SEQ ID NO: 115950 - DNA, 1179 bp, Cannabis sativa
cctaccatatttttgaaattaaattacaattaatgtacttagatataaattttcctctttttttttatatattttaaattttattattatttccattcttatttctatccatgtactttcatcccaactaaatctccctgcgtgggtttattggaatggttgggtggcttttatgtctcttatcaaagtatatgagatctcattcacatataatcggaaagaccttaacaaaagacaaaccagccctccaaaccaaaattatataaatatatatagttgattaacttgacaataacaaaaaaaaaaaaaaaaaaaaattaaatctgaattttcgaaaacacccccaaacatcaaagtaacaaaaaaccataaatgggtgattaaaactcaaattttataaattttttaaaatttcccaaatttcttaaatcagaaatcctcaaagaatcaaaagtaaatctgatactacttgtttgaatattttatcactcataaaatatacaatattaaaatttaatttgatagacaaatatatatatattacatattaatatattaatataagtgtttaatcataaatctaaaaaatacatttattaattaaaaaaaaaaattcaaataacgggaaaggtactttaatctattaatagagatcatctttatggtaatgatcttaatccatatgtagattagatctttaagtaattatcttacaagagtacaaggtttatagtttctctagttttttctattgataggagaagatgagaatagagtggttgttgctttctatggacaactattaatatataaccccaatagctatatcatttattttaagtatttaattataatttagctcattaataaattataaatattgctcaaagtatatacatataaatatatataagcccacattagagatttgaatccaacaaaacaactatcctctccgttctcgtacttctatttttttctaaactcttcgttcatcttactttgcttcctttctattgaatatggcttaaaattgagattgaataatctacaagtatgtatattgcaataaatacttcgtgcatatatatatatatatactagtaaaaaattacgtgcgaggcacgtatactaaatttatgctagttttttttttatattatatgaaagtgatacaat

SEQ ID NO: 115951 - DNA, 902 bp, Cannabis sativa
aattccaaggttcataatcttggccaaacacttgtataaatcaagtagatttttctacccatataataatatattgactcgtaaacggttattaatttttgaaccaaataaaaattcatctcgttcttcatttttgagctatttctttaattttattatattttaaatttttgaagaagaatcctacttcacatatttggtttccaaaaatttggttttttctacagaattctacttcacatatttaatataattagttaaaaaaaaatggaaatgtgatggatattttgttcttgtgctagcttctttatggactccgcgtcttgtattaatatacctaaccaatttacataatgagtagaaagggattcattatcaaaaccaaactaaagttaagtccttgtcaacacacatataaattccaaaacacgaagctaaataaaatttgcatgttttttttttttaaaaaaagagaattagaggttgaccaagttaataaaatgaattagttccaaaagaattggagatggtagaagtactaataataagaaagaagcaccaaataaaatggggtttctcctcctcactcgttctaactccaatttcttctcctccgattttgttgcactaaaataattactaattctgattaattaatcttaacattatttatgttcaataaaaaccacgaaatcacatagtaacttcttctatcttcatttacactttccttcctttcctatcgttttctctttcgtacttacatacccaactccttactaaacgaatccgctttatttttcaccaaaaaacgcgttctttattattattttgtattatttcatttccactatttaacagacctttgtttctgtctcaaaaaagaaaagagagagagagag

SEQ ID NO: 115952 - DNA, 1093 bp, Cannabis sativa
acctccatcatcatcatcagattcagagccaattatggagtttctactaaaatgatgagcgagattagggactgtttgtatcaaattaattggctcaatagtggaagagattacccaaacagatatgcccatcagaatgacacatatcgaagccaatactagtaaaaaaataatgaaccgacaagacatttggtcacggctgctacgactactatccctagtcaccattttgatgtaagtgtttttttttttcagtttctattttttgaatttgtgtattgtttgtttacaatatatatatatatatattcaaaaaaaagaagaagaagaagaaaacgaggatgagagaaaaagagaaaagatcatgttgaggaacgaagtggtaattgtgaataaagaactggatatttataagcagaggactcttgaattgaagcacagagatattacttatttaaccctgatacgctgtccttatatgaatagccgaataggattagtaataatatcggtgtgaagaaaaaataattttaggaagagcattgttattaggcactggtgcctagcaccttctcgacatgtcgtgttgtgatcggctaacgataatttttaaaagttattatattaaactatacgagatccgatacttagttggaccaataacgatactgatatataagaaggtgttaagcgccactggtacttttagcatttctcttttaggaataatataaaatctacatcgagaaaagaaatgcgtgaccccttaatctacattatattaacatattttctttatcttttatttcttttttttttttaatgaatttctaattttttatgttaagaaatataccaccttggcgtggttgatcataaaaatttcaaactatttatgaaaaaagtataaattttggatagatagtttgttttagtcactaaagaaaagtgttttcttattattatattttttagttggttaattaagatttttgcctcctaaattttaacatgtgtcaaattacactctctgaatttctctggccgttaaaaattcctcctgaactattgaaattgttagatttaaggactt

SEQ ID NO: 115953 - DNA, 1627 bp, Cannabis sativa
gggggggggggggtgggcagaaatatagaggcttgtagtgccagattggtcctcttctttgagttggaaagaaaaattctattgattgatatgtcttctaagggttgaggagctagaaatattcactgggttctggtttggaatttgtatgagttgggtgggggaaatttgcatattagggaagtgtggttggttaaaaataggtaatataccaaacgggccatggttgtgacgagctagaccacgcaagacatttttgtagggcagtggtggggaatgtggggattcatctcaagcacgcatgtactgagtacaaccattgtaggtgtggcccagacgatcacaaaagtagcaatgatcggggatgtctccatactttaactcaagccatgtgggcgagaccattcttggaaagaggattggaactcctctaagcaagggtttagtaacgtcaaacatgatacaaactttcagataagagccccaagtttgaaggagagtaggttggtgtattttcaaaagggtcccaacgatttggccaacaagtctagctaaagaagaggaacgacgagaaaaggaaatgttgtgaatttgcacccaaaatggtatcttacgcattgactctggggtaagagtggagtctaggtcgtggatttcaagaagaacagggtttttatcaaaaatccaaggctagttagggtgatggctcttttcctatcaccctcgcagtgaaaggcagccaagtacaggttggagttaggggacctttccttgacactaacagggaatctacctttctagtacttctctaggaaattcttgagggagttattattgaaacttttagtagtgtataaggtcagcattagatgaaaaaggaaaagagctggtggaagtcctccatgcacttcagtttaatcaacaagagagtgcatggtatttgcagtgtcagcaaggtgtagagctacataaaaagagcaggctaacccttccataactagcaatttatgagcgataagacaataaaggataatatggataaaaatggtaatgcatgaaatctgggaatgtggcgttaaataatctgacactataataatggcaaacgaatggatactaagcctaggtgctaggactgaacattttgaccgggtttgacccggacccgaccaacctacctggacctgacccgctcaaccaaaaaatttttaaaaaatcatttttttgggcgagtcgggttcaactcggtaccccatcgggcgggttcgcagattggttttttatggccaccaagttgttgaacccgaaactgcccgccaacctagctaaatttattttatttttttatatttttcttatatatataatatattaaaaataaataaagaaataaattttaaaaaataaatagatgacatgtctgtgttatttattatagatataaatataaatataataatataaatctaaatattctaagatatattatatatgtatttattattattgttattgttattattaagtgatagttagtgattagtaaatggatgatagtaaattagtaatgtgtcgtaaaaaggtgtagtagtggttgtaacgccctaatgctaaggcacgctacagt

SEQ ID NO: 115954 - DNA, 1599 bp, Cannabis sativa
agagagagagagagaatgagaaaggaagagaaagaaagagaattagggagaagtagtgggaatttgaaatgtcaaaataaatttagaacaaagtagaatacttgtacaattttttaaattcttttgttattgaggcttcatttaagtataaaaattctaattttcctttgtaatgaggtatttaatgtatggtattattataattaattttgactacattatttatgtaattatttatatattgtatacaaatgaaatttcccaaacttattaagaaaaaaaaatccaaatccaaacttaaataattaaagggctgataatacaaataaactttttgaaatttaaggcacaaagtgtagtagtgggctgaaattttgtttctaaaaaaagaaaggtaagaattttgaatggtgggtttttccataaagtagggcacacccaattaagcaactttttctccaaatatcttgtaaacgtggaaacaccctttgcactcaacaaagggaaccatatttttatgctcacccacaacatccttttctgcattattattttaattattttttattttcttaaaaaaaaaattaattctttaatcgataccgtcattgctgtcatcatccttcgccaatcattttattatttttattattattaatattaattttcttaattattttgaattacaaattacaaagtccttatcttttaagcaccacacacaacaagtaaggcaagcaattttctctctcaataacgtgagttgttctgactcaaaattgaaattatccaattctgttttctacatacagtataaattataataaagcttaaaataccaaccaaactccagaaaagcttgtaagaatatgtctagccaactaattttgaaagctacctccatttacaaatgaatatatattttcctttgtctctttctttactatcacagctacttgtttcttaatatacaattattttcatcaatgtatagactaggcttttttatttattttttttaaaaaagaaataataataaataaacaaatagtttggtggatggacagaaatgaagggaggaaatattcttttggcgaaaaaaaagagagatggatggagatttttttcactcccactcaatatttctatttttggaaagattcaagaaagtggtaaaataaatatattatatattacaattattgaaaaaaaaaaagatttaatatttttattttgtttgtttgttagtaggaagttgtgttaaagatcaaaagtagaaaggattgagagtatagtgaaatgaattgtaaagataatgtaaaatttatatttaagaatgggcatttaatttggggttctctttatccaaggctgaagtcattcttgtattgtgtgcaaatgggttaatttccattaatctaatgttgtttttaggcttattagtgatgaaaatactttttattagttactgttagtgtaattcgaattatgctattttacctgttatgaatggtggtcatgaatgttatattatttttaatataataatatgtagattaaaatgtggtaatatataatattatgtgaataatatatatt

SEQ ID NO: 115955 - DNA, 1647 bp, Cannabis sativa
tgtgatgacatcactgtaattgtgaataactatatgttcgaaatttaatagaacttatatattaatgtataaaacatgtgaacaaagcatataacaaggtacttactcaggatttaggctaatctaccattgatcaatattatgatatgaattaagtctttatagtaaatgacatgtttgataaagacaacgtaattacatatcgctccttgtcatatatagtctctattacatataacaccttcacttagatgtaatgctacatcaataatctgaatcgagattacttgcactgaataacagacatcattgaactgcactagcaaccattgattaaagatttataaattttaatatatttctgactgttttattcatggctaagtgattttagttcttcatacaatacatgttacaacctcatatatgaataagaaattttccgatatttatatataaattattcaatattaaatgttaataaattaacattcatgcatatatcaaaatgtttaactcttatcataatcataaatattttaacaggttttttaaggcataaaccttaacatgcgtttggttttgggtagacaccaatttaggtcattacgcgtggacactaatgtgtgtttggtttggggttagaacgccggtgtgggtttcttcaagagttatagagagaataaaggagttagagagagaaagtgagtgagagattttgaaaacattaaaatgctaagggtactttgagaatgatgttacagaattaagcattaaatggtagaatgtattaaggtgtgattttttggttagtgggtggactctaatgcaagcttattaaaatttttctttctttaaagctccaaggatcaatcttgatggacatacattcaaatatttctaaaacaaattagagaaaaaaagaggaagagattaagaattgatttattgacctcttactctaaaatgacactctctacaattatgctaaatactactttaatatattttcttattatttaatattttatttatgtacgaataattttttttttacaattttggaacctgagtgtttgggggcccaaggcacacgcattggtcgcctcacctcaggaccgaccctgtctactgaagctctgatatgaaaagaaaatagataactctagctaaattatgaacaactctattagtagaccaataaacaaataataaagagaccctgttcatataattaaatagttttcgacaatcatcaactactaaacaaaacgacgaactcatacactactacaaatatcagaattcacgaaggtcttaaaaataatttttttcggggtcgctatataaaaaaattaagtaactatttaaaactgccgggaaaaatttaatattcccgacggtttaaaataggcgatgtttttttaataaaatatgaatttttaggagagacttatactcgacggtttaaaatcgtcgcgtatactatacccgacggttttaaaccgtttggtatatgggcccattaaaaattgtcacttacttcttgccacattttccacgtacccacctattttttttttctatttcccacatgcccacctatttcttctcacatatttcttctccatttcccacaccctaaaa

SEQ ID NO: 115956 - DNA, 2430 bp, Cannabis sativa
ccctaggacattgattagtcaatattttgccttatacctatagctaatttatgtattaatattcttaaattgattctttaaattactaattagtgtaattataatttattaggttattttgaagactaatcatgcatttggagtcatttggagggatgttagcataatttggtggaaaatagtagaagccacaagctcaattttacaaggcagaagttatggttatggcggagcttaacataaacataaaagctttagatctcgttcttagcttttcagaccatcttgagtcgtccaatttcgagttgtattgaagaagttatggccaaagtactaatcagatacagaacattaattgtgtttggcactatagcgcccaattcctacgcatagcgttatttatcatttttttaaaaaaataatcctaattctaagtggattcatctatcttttcaagcactataaataggacttcttagcctacgaatttaatcattcaattgctacaggttagagagagaaactcagagagagagagagcaaggaagagacggagatcagctttgaagtgttcttcattctagttctattcttctccttctacttttattaaatattatgatttttgttataatgtctagttctgagtagttttcttttagttatgggttttttcaaaacccgaaacatgaattcttatcattattgaatgttaatttttagtttccaccatatcaatatgcttctattattctatgtcaatgttataattattgttttaatcttgtttaggcagccgctaaattaagttttactttaatctacgttcatcttaggatgactatttgcctaatagtcaaggattctaagtgtttgtgacaaattgcaattataattgtggtgaagaatagaacctaggttaaatgaaatatacgcttaattgatttgttgcctagattagtctatgtccataaaactcaaagctttatctaagttaaataaactgcatgcttcgtggatttactacttaggtaaaagagttaattatttagtgatttgccttgattacatacaatagggagattggaataattgactggtttagcgttatctacgggattaatagtttgtttggaaattgaaattacattcgataataggaattaggaatgattgttgagggtggaaaataacctttaactagtttcttatatcataatctcaagtttaatttgtttgttttatttttatttatgctattttaatcttaatctcaaaaccccccttttctaacttttatcattaattattgaattattgaataaacatagccctcgtgggtttgacccatacttacttctatacaaaaataatttaaagtattagagaaaaatagtaaatttgatacggcatacaacacgcatcagacatggtccagctatagttctgaaggctcagtgagcccattcagtggattacctcgggcgtcataatggcccaagggccagtcagggaggatggagcaagtcctatacttcctcctcctcattggagcaacctcctcaagcttagattctgcatcaaaattctcagtccctaagtctatctctggctcaacctcgatggggggttggccagtctccccttccactctaactcgacgcttgtggccaccatggccacatgaggatcatacaggggcgccttacgtagtgtctactttgtccttgccataactccaaggtaaataagagacttatccggctgtcaccaccccaattcaacacccggcactacctgcatggaagaaataacgggaggtgagcaacctgacaaagctacaaatatattcaagtcaacgacacccatggacattttctaggtaaaaaaagtgtccaaggtcaacgaacgaccaagtaccgtcttagatacgctcactacgacatacagtaagtcctaagttatacaattgactataatggactcctttcctagccttatatcgagtttccaagagaaaccacacataaggccagatatgtacatgcctccaaggccatcacgagaccctagacgaggtcgaaagagggagaaaaataggctacccactagagccttggccttgcccgacaagggttccagatcctagtgggcggcagacccgaagatccaacctagtggccggccagaaaccgtagttttaggcataagctgaccagcctaggcacacagtcctcatggccagtcagaccccatgaaggccacctatggcctgccaggcttcaaataaagcctacctggccgtccaacatttgcatggatctgaacacgtgtttttttaagaactcaaacatgttcttcgtgactcaaagaaccaagaatcacaacgaaggtcagatttaattatttttcatctagaaatcacatatt

SEQ ID NO: 115957 - DNA, 3316 bp, Cannabis sativa
  modified_base (56)..(56): a, c, t, g, unknown or other
ttgtcatttaacaaaacacagggtccaatctataacttttgcaaaacacaaggtcnaaaatagtatttacccatttttaaatttttttttcaaattaatgttttgggttctcaagtagttttttaggtgatttctatgtaagttgttatacagatttttgttgcgatttacgttgctcagttagatgctataaggatttctatgtagatttttgtaaaaatacaaaaaataataataataataataaaaagtgtaaaaataaaaaattctattatttattgctattcatggagtaaccgcaatgtaaatattattttatttattttttcattctattgaatattcaagatttttaagaaaaacaaaaattgaaaagagtacagatagtaattaaagcacaaccacaatagcttcaagacgtattcacgttttcaaattagtatagttttcttgcactgcaaatagaatctattgaatccagtagacatttcttttaacgttaacttagaagaaatctatttaaacaatattaggatttggtttgggtgcaatgcaacaaacaaagtacgatgaaaagaaataaaacaaaaatacgtggggtctttgttacaaagaaaagacatgcccgttatttcgaagctatgagtgagtgtttttattgaattattgattttttttttttttgaaaggattgaataattattgattttgattgatgaaaagatgcattaatatatgatcataaggatgaaaaagttaatcataattccaccaactgcaattattgcagaaccaaagcacaacaccataaatttgtaataactaacagttgtaccatgcatttattttatagacactttaattaaatagctcctaaatatttaatactactaattactcaattattgggcatctctttcttatatacttgacttaatagttatagcttgcttttaaagagacagcttcattaaaccaaaaacaactcaaagttaaaccatagttacagcttacttgaaaaaccaataaaaaattaatagagcaagtaaattaccaatagaaaattggttagaattgaatgcttagtagtaaattaccaatagaaagtttttcttttactttttaaagtggatacatattagttgatgagttgatataactgttagtaataaataaataggatccatccactgtccacgttacccaaccaattaaagagggttccctcttctctcacaaagtatttatttatttatttattaaatcacactaaactaaacatagtatttatttaattattaaaaccttattatcaaattattggcttggtagctacccataaagaagttttatacttaactattcagtctatttgttaattaaaaccaaaatccgtaaaaacaataataaaatgaagatcccaccccacaaatcattcggacataaacaacacacaaaataataaaatataattggattttaataaattgataaatgctatggtatgattaaatttataaataataataataataataaaatgaaaattccatataaaaaaaatattgaaatgataggaatttaatccttatttttcttaacaaacagtattccatggcataattaaaaagaattaataaatgtatggcataaaataaaataaataaataaataaaagaaagagaagaagtcaaggactactcattcttcttaacaaagaataatatctctactaatgaatataaataaccaactatacattataatattaaagcagaataaatagtgagtatataattatgctctttagaaaattattgtaggtccgacatataaattttggcaaattaatttctaattatataaatttttacaagttcatcggtaaatattattctttgataaatttatctataaatttttagtttttcggcaattttaagttcctactattaaataatggtttttttgcttttatattctacattctttaatttatgttttacgataattttaaatatatattttttttattttaatttttatacttttctaagaatatattttttttttgcaagtatttatgtatatttaattattttaatcatatatgtatatttttaaatatgtgaaaaataaaaataaaaaattgagcataaattaaaaaaatcttaaaacaaaatttactaaggtaaaaaaaaaaactcttctatttatatgtattcttttttaatttatactcttttttcaatttttttagaatattttaataactacatataaatagattattttttaatattagacaatttatatttatatgaatttttgttaaagtgaaagagtaaataaaaattatacattattttattaaaaaaatttagaagaaattttggaaattaacacaaaacaagaaaattaaaaagataacaaaactatatattattatttagagtatagattttataaggttaccaaaaaattcaaagtttgggactaatttatcaaaaaaataaaatgcaaggaccaatttaacaaaaattattttatttagggacctaataataataaggacgaggaacgaagtaaaggtggtgacagctaccttcctggtgtttatgaatatgaatgaatcatcatattgtgacaaattcacaaacaacagctaataatttatactttccacacatatgcctatatagaatggtgggtcccgtgatatgtttcaaacaataataataattacatatattctcagataaaaaaattatataaaaaatagtcctcttttcagttttaacaacaaaaaaaaaaataacaatattacaaagatatttttagttggccaaataaccatcgggcaagccaacgcaaccaaaataaaaattcaatcagaatgagaatcgccattaattctggtgacttcacctaaaaagacaaccagaaaatcaaaacatgggctgtttctaattcatgaaaaaaaaatttgtagaaaaactattacgaaactataattcaaccaaaaatctagtttaatttgcataaaactaatgtcatggcttcaatttttagatccatgaaatgcagatctcaaaaagttgaattggagttctcaaacaatactatagtaaaatatttatcctaatgtattttcgttgttttctaaatttctaatggtaaatctattcatattaaattacgaaaagacatgtagacaaagttacgtacgtggaaacactgttttgatttttgatgtttcataacagttgcataaatattttgctaacaattatttcttcacatattactattaagg

SEQ ID NO: 115958 - DNA, 1358 bp, Cannabis sativa
ataaaaattttgagaaccacaaatattgatttctattttaaaaaataattgatttgttgtcaatatttttttgttcactatatctcacattattttctcaactcattttctctctcaccactttatctcttcttattttttctctcattactttctctctctctcattattttctctatcctcactcattatcttccatatcatttttttaggtcaaggtcaggatatagggtcgtggtaagggtcgggttcaaggtctggatccgagttatgagttgagtccaggttcgggttggggcctaggttcgagtttgggtcctagatttgggtctgggttaaggtaagtttctggggtcagggtttgtggttgggttttggtttgtggtcgagtttgggcatgggtgtgtggcagggtctaagtttgggatcaaggccaaggtccagggtccgggtctaagtctgggtccaatgtcgaggtccaagtctactcaaattcaggatcggagttcaggtccgggttgggtgggatcgagtctgggtccaaggttggggttgggttcttagtcaatataatatgattgatattgtgagtaattaaatagttgttttgatttcagcaatgacaaaaatatatatactttccacatctcaaaatggtcaccttgaagataggccgcaattgtgttgctctcgagtgtcaagtccaaatgcattgtgaccagattttttttttcaaaattaaggagaagacagattaaagaaaaactgaaaggagcttcttttgtaaactcccaccctccaaaaaaaaaaaaactttaaactctaagtagtttgggaccatacactatattttgtaattaatttgttaaagctagttggtgggattttttttatatttaatgaaatttgattattatttaaattatggatgaaaacttttactcgtggggatggactatgtgggtacgcctattaaattttgactcaaattaatttttatatttataaagttataattttttgggtaattattaattgtgtgaaaaggaaagttttggtgcccacattttattttttttgtaaatatgtatttttgtgtgtgagagagtggtatgcgagaaaaagaatgagatgtgaaaataaaagttagtgtgagcttgtagtgtgatgatagtaagaaagaaaaaaaaaatagtgtattaggatttgggtgaagaaattgagatggtgaatatatgtaattttgaagttaattataagtgaaatatattcctctttgtagttttaataattttaccaaactgagtaaatttagggtaaatatcattttggaccgtgtattttgtaaaagttactaa

SEQ ID NO: 115959 - DNA, 1537 bp, Cannabis sativa
  modified_base (1482)..(1501): a, c, t, g, unknown or other
attattatatttatatattatataatatatatgtataataaaaaataaataaaaatcgggttaaatcggtttgggcagtttaattggacggtttaggtcaattttcaatccgcccaattaactgattgggcggtttagaattttgtcgagttatgttggtttgtattttttatcaattttgttggtttggtttgggcgggttattcgagttgggcggtttacaaaaatttttgtacagtcctactatagggaacttgtgagtttgatagggtctaaggcatggatagcaagctgtcccaaaaactttgagaaacttgtaatcaagctgtttcgagtagatgatttggaaaggagattgatcattaagaattggtgttggcaatctgtttatgaggtaaacagctgtttgaaatgcatcccaccaatactttagtggcatatgagcttatgcaagtaatgttagtccaatttctacaatatgcctatgttttctctcagctcttccattttgagctgaggtatgtgagcaaggatggttgaaactaattccattttcaatgataatttgagagaaagcttgaaactctccccccagtcagttcttaaggattttattttcatttcaaattgattttcaactaaggctttgaactgaatgaaagcagaaacaacttcatatttatgtttgagaggttagatccaagtgaacctgctatggtcatcaataaagtgtatataaaattgataatttgcatttgacataactggtgcaggcccccaaagatttgtgtatgagatctagaggagccttagcacgatcactgttaagagtaaaaggcagaatgtgggatttgccaaattgacaagcttcacagaagctgtgtttttcattcatagtagttttaacattaacatgactcaagacaacatttaaaacacgattgaatgggtggccaagtctcttgtgccacttatccttgattgaaatagacttaacaacagaaattaaagctgaaacgaagtttttcttttctcaaaatgactctagaaggtggttgtttttttattcttttgcagctcctcaaactagtacacagtccctctttaaggttcccttggaggagcaccttctttgtttccatgtccttcacaacaaaaaaatcagagaagaattccacagatcattgttatcataggttagtttagatatacttatgaggtttttggtgatttctggaacatgaaggatgtttttcaataataggggatttgaggtataagatggcagagttaaggagccaacatgattaatatttagctttgaaccattacctactgtgagagtgtgcttaccattgtactcattttttagagtcatttggttggcatcaactatgatgtgattatttgcttcgttgtctgcataccaagcagtgtcatctaccatttcagggggagcaatgtgttgggttttatgccctnnnnnnnnnnnnnnnnnnnntaatcagatttactaattaatatagatcagaaataa

SEQ ID NO: 115960 - DNA, 4348 bp, Cannabis sativa
  modified_base (895)..(895): a, c, t, g, unknown or other
tttgtaaatatgttttcaaatgtgtacatttttaaaattgtatttttttgcacattttttgtaattatttaagaaaatgtatatatttatgtaaaatgcccttactaatatgagactaagggagttgcccaatttacttttagggcaagtgggagattgttagagtttatgctctgaaaaagcctgtaaaaatattactgattataaaagaaagagttagatatttaatatatgtgtgaatgttaagttattaatatttattattgaataatttatattaaatatcaaaaaattcctttttcatatatgagactatggcttgtagttgtacagagaactaagaccacttaactatgaataaaacaaccagtgacatattaaagttatggaatctttaatcaatggttgctagtacggttcattgatgtctgttctacggtgcaagtaatcttggttcagattactaatgtagcgagacatctaagtgaagatactatatataatagagattatatataacaaggaccgatataaataaagctatcgttattaacatgttgtttatcataaagacctaattcatatcataacaatgatcaatagtatatcgccctatatcctgagttatcatgaactcatgttcatgttattagtttttttgattcactcgttaaagtttctcaaagaatatgattcttgcaatttctatttttggaatctattaatatggatagctaggaaaatgatgattccctttaagtgttaattctggaactggaatgttgtgcataaattcagatgggatcttaaattatactaccactagtgaattaatggtactaaaggataaagaaataattagaagggtaaaatagtattttgaccaaaactaatnacgaaccaacacatggagggctaatcactggaatgattatatcaatggacactgcagctaaactttgttttttttttgaaaatgcagttaaacttagtaaaataattctataattactaagagtgcaatttcatatttatagtggagtaatcatggaattaatatacatgagattatttggttgatgagactcaataaataatctagtttattggagctatgaattataggtccatggtccccgaattgccaccttaaaatactgtcaagggtagggataaatagttgtacaaagatgttcagaaaaatttattttgaattggaaaaatagtaattatttattttttaataaataaataattttttcaaattttttaaatagggaaaagaaaaaaattggtaagacaaagtttgtcgagacatgagttgtgaggacaccaaccttatcctaaagataagtgtaggtgcctatagcattatgctaactctatggagtttatctttttgggttaattaattcaattagataaatatctaatttaaaaagttgttataaatatttcaaggtttttgagatattgtctcaagtggttgagagattccctcataaatatcagtaagcaaatttggttatagatatttatttattttaaaaaataaataacgatttaattaaaaggatttaactactataaataggagcctgaattgagaaatccaaccgacacttctcacttcttctgaactattatttttgaaatacatagagagaaaaagcaaattgtttttcactcaattattcttgctcatgtgttgagaacttaacaagaacaagggttgtacactttattctaatagctcaaactactccttatgtgtgcagatcgatttggaagacactgttgtgagtccaattgaaattttttcatcacctagattaagggatataagttacaagaagttttgagaatatcttgataggcttcaagagatatactctaaatttattattttgatttaatgtacacacatctagagatcctaggggctatggtacaatgataatcagataatatgaaactcttccgttgcatacctgatgtagtaccataaaaccaatagctaattcattagcaagtgggttgacacaatttgaactgaagaaatgtcttttattcatttagttagtcttacaattgtagtgttgccgtgtaacgtacattgtttgtgtaataaaggcttacaaataaaaccatgttggatgtgcaacatacattggtcttaataagtctacctttaaaactacgttttggatacccttacacggcttgccatgtaaaggctgccattaaagagtggtggtcatatagctcttttctaaattcttacacagtgagacgttggaggaaccactactaaagagtagtgttttgcacaagtgggctactggtagtactttatgagatgctccccattccaataccttggtaggagaactaattccattttctcattatacctacccagtttgtaagcacctttatttgtgatttttgtcacttggtacggtcattctcacttaggtccaaacacccctactacagaatctttagagtttatgaatactcttcgtagcactaagtctcttacaaaggatttcctctccttgaacttgtttattgaagtaccttgcaactttttactgataggcatgtagttttgagttggcctggtctcttctttcttctacttcatcaagggattctgccaacaaggtgtggtttgttacttggtcataggttatcctcctgtgagaaggtgtttccaactcaacgggcaatatttcttcatagtcataggctaatgcaaagggtgttttcctagtgactgtcttctccgtggtcctatattaggtcgggccaactgccttttgcctcttctagacatttcatagtgtccttaagggtcttgtttaaagcctctacctccccaattacttaagggtgtgcaattgcagataagcttttactaatgtcgtatttattgaagaaatctgtgaacatgtcgctgtcaaattacttccccttgtctcatatgatcttttgagggagcccaaaatgacatatgatattcttgacaacaaagtgaaagattttcattaaagctatggttgccaatggataaacttttgacaacttagtgaaataatcaactgcaactacaacatattatacttcttcttttctcttaagaagttgttcgatcaagtctatccccaatatggaaaagggaaaagcagactatatttttgtgagaacatttggtggagctctcatgatctttgagattattttgtacttgtcacatttttcgacatagtccattgaatcttcgatcatggtaggccaaaagtacccttgtttgagtatcttttttgacaggctttgcctcctgcgtgatttccttaaaaaccttcatgcacttcaaccaatagtctttcaatttcttccttggtcacacatgtcagaagtggcattgagaagccatgtctgtacataactccatctaggatgatgtacagggtacctttccttctcatttttcttgcttcatttttgtcctctgagaggactcctatttggatgtgtgctactatgggtgtcatccatgtcagactgtcatccaacatgtctttttcttgtgaaatagtgatgcttgggtctttcagaaactgaataggtaccaagttggtcttgtctgtcaaggtgcaattagctagtctggcaagtgcatcggttgttgcattttcttctctggagacttgccgaatagtctaacctttgagttgacttaacaattcttctcaagtaggccatcattctatctcctcaggcagtgtactcacctaggacatggttgatgaccaactgagagtcaccatatatgtgtaagtagtctacccatacttcatgtgcaagctttaatgtggcaattagagcttcatattcagcctcattatttgaggctttgaaactgaacttgattgccctgtgcaactattgtccccatgtgtaatgagggcaatgcctacaccggacaggtggtccgtacaacttccatcaatgtgtagtttccaggttgaattttcttgcatcgcttcttctcttgctctttctcttgcttcttctctggctcttgcttctctcctaaatcttcatagatttcaagagataagcatgtgccttcagccataaagttagagagagcttggccttttattgccactcttggttattggccaagttttattgtccacttgagtaaccgaccagatgctttaggtttctgaagaactattgcaaggactggttggtgtatactcttattggatgagcttggaagtaaaggcgttagctttcttgaagttagtgtttaacgccaaaaatgtgactt

SEQ ID NO: 115961 - DNA, 2185 bp, Cannabis sativa
  modified_base (2149)..(2149): a, c, t, g, unknown or other
tcctgcacctttatttataattggcttatgcctatatacacgtgtaaagctatatctttatatatagatgaaagggatgagaaatagacaaaaagttaaaatgtcacatggagagcactcaggtatatatattgaaaattttattttttatatgcaaaatagatgagaaaattgtgaaaagtattatttattaaaatagtccttttaaataatagtaaataatagatgtgaaaagattcgaggattgggatgccattcttctttttaatcattttctttttgaactatatacttttttatttttaatagaaaggaataaaaacgagatatatgagagaagttgtatttaaaatatttttcaggtggtgaaattttctaaaaaaaaaaagaaaaatatttttcaggtgtgaatatttaagtgtaatttttaattagttatagataaatatttaattaataatatataaattatatttttgaaattttcgtaaattttataagttggtgatcacatgagagtttttgatcagttcaaaatattaatttttttcttttatttaaatacaatatataaacataatacatgaatattaactttatacttaatgtcaagtataatgttctaaaaatataatttaatatttttactattaaaaattaaatttaaatatttatttataataaaaaattactaatatatttatgacataaattatttttttttatttttttgagtaccaaacgaaaatttagctgctaattaaagattcttttccttaaaataatataatttatttttataaattgaatattgtacaccatatataacaattaaaaaatgatatttatatataaattattactaaatttgttaatattgttagttcatgataacaggaataatattgaaatattgatcactaaatttatttggactaaaagtaataattatttttatcaatatctttgttacatttaagggcacacacgaataacgatgactaaagtaatatcttaaattagtatactgcggtaagtatctagatattgtaaataaatatgagtgtgactgattgttttttttttgttttttttctattattttggttttcgaaagggagtgactctgagtctgatctaactgtatagttttttacgacacatgtacatggagttcaaaaaatttgtcgtacaacttgatatgaattaatggaggatattattgaaacacgtgattgaatacaaattaattgataataaaaaattaatggaccaagttgaacagattaatagaacaagttaaccgagtcacataaaagacaaaacgctccgcttcagccacttgatcataaacgtgcatattctttaaattttaacattttgtacacaatttaatgcatcaattatttaaatattattgatgttaataatataaagtatttttcaacaattattttgttcttagtcaaaatttttgattccgactccaacttagaccttagaacttggacccagacccaaaccctgaccttgatctcggacccctgaccccaaaccttagcccccgacctcgaatccaagacttggactctgaatctcgacctggaccgaaactcgaacccggatgcaaaccccaaacccagaccccggaccctgaccctagaatcgaacccgaagccagacccggatgtagaccctggacccaaacgcgaactcgacctcggaccatggactcgaaccaaccttgaacccgaaaccaacctcgaccttagcccgacccaaactcggacctcgaacttagacccaaacctcgccccagtactggacctggagatctgaccctgatctcaaaccaggacacaaaatcgacttaaataaaattaacaaataaaaataaaaataaaatttataaaacactcttttgtttttttgtttataaaattgaaaaacaacgattatagaacacatttttgtttttcaaaaataaaattttaaaagacaatattgtaattaaaaaattagagaatcacttcctataccattttttaacttttttttacagtttcggttgctccagtattttctatgttgatttgggttgcgatttaggttttggttgttgtgtggatttctgtaaaaatacaaaaanaaaaaaaaaaagatttaaaatgtaaaaattaaaaaa

SEQ ID NO: 115962 - DNA, 2441 bp, Cannabis sativa
  modified_base (26)..(32): a, c, t, g, unknown or other
tctgtttctttattgataattgaatnnnnnnnattacattgaaatatagttttatttaggcacaaagcccaacataggaatggtattgaattcttggtaggaaaacatcataacctaatgcctctgtaaaatttattagaaagagtcagagggtacaattggaagattctgatttactcaagattcgacgtgagatattagttggtggggctatagacttgtcaatctcaaacaatgggacgttactttataattgttgaaaaaattggcagtgtgccttaccaatatccgatcttgactacatagtccttaaaaaagcttggaatggagaaagtttaaagtattactatcaattgtactcgcatgtatttatacttagtcaatttaattcatagaatatactaagtatagcgggtgtaaccatcaatactgtactattgatcgattaatgaaatttttgaatttttagaattttttatctgcatcatttgcaagtttatatactttgaaattatcacaccaagctgtgaatagatcaatgaaaacttttgcgaagataaaattattgttaattaaaaacacaagttaacataaacgcgagtacccatgtaccgctaaataagtgcaaaagaagtatcctctaaaggatacgttgttcgataacacaagagaaattaaaaaggctaagcggttggagtgttgggatcatccgcaaccttgcgagcaacaccatctgtgacgtcatctacatttgcatttttggcatcctcaaggaaaatatttcccccaagtccctgggttttagtaggcgacatggcacgaaatgcatcagccatttcaaccacctctgctccgagaactacgaagtcgaagtcaggcaacttgatgaaggtagtgtagacgtaattagagatagcctggtcatatttcttcttcctgatctctttttcattctcaaggtagcgaccgagttcctcaactcgtgattccaaaacctttactttttcctccacctgctctttagcttttccaagatcattgatctctttatccttcataatcgcttccagcttcagtttcttcacactctcttggagaagtgagttctgcttcctcagaagatcaagatctttggaacctgcaacaaaggcccgagagaataaggccaaaagctacaatgccaattctccgaagcgtggaatcaagttctcgatgggaatcccctcgatcttagagacaaactcatcgctcacaaacttctcctgaagagttatggcattgcgggccttgacagttgaattaatcataaccttcttcccctttcctgggtggctttgtgctgcttctttgacgaatcagccacctgtgcaggaataacgtcgcttttcctcttttgcagaatgactggagaagtcttcgcagttccagccttaggctttcgattgaaagttggagcttgcttcaggaaagtaatttctgggataagatcataaataagaactacttctaaacataaaaagtgtttggtctcgaagtctgtttggaaagatacttgtctattctttcctttggcttctcagaaggctccttgtatggttcttgttgaagtctagcgttctctaggatgagtttgattatgttctcgaaattttttagtagtacacagtagtcgcaatcttgaataggaaggccacttaaaacatcagcgatctttcgacgagcagggtccagtacaaatcgagccagtctatctgcgatcactaaaaacagacattagcaactatagaagataatgaaaatatatgctaagtgtcaagacatgcaacatattaagtgggcgattaatgtcaactctaatccttggcactttaaatgcatagaaccatttggatttccaatctcccatattggaaatcctgccttctaccccattaattttagaattagcccatttgctaaaacaataaaaaccattgtcatggccgattctctctatatcataaaagtagctaaattcttcaatcgttggctccccttgaacatactccatgtagatcgcgtaatatcccagtattatgcggtaactatttggaattaactagaagggagaaacgtcgtaatgtctaaggatagccttcacaaaagggtgaaaaggtagtgtcacctcacatcggatgataggaattgagaccactacatcttacgtatggataatcgcaggatttgtgaagggaaggtgaggttgctgggatgctgaaggccttaaggttcttatgcgaaccaaatttagctgtgcaaaagtatgctggtacgattttgtgactcttgagaccagatcctcgcatgaaaactgtaaagaccacttagtttaatttggaaattagcagttattcatgtttaattatgaaattatttaaatctatttaaataattatttatac

SEQ ID NO: 115963 - DNA, 1256 bp, Cannabis sativa
aagtaatgaaaataaatctatttctttattgataaatgagtagaaaagattagattaaaatagagttttatttaggacacaaagctcaatcatggggttcataacctcatgtgtctgctgagtgacacaaatactatatacactttcttgatgactacacaaagtatacttggatatttcccttaaaagctaaatctggcaccactaccaccttcttacatttcaactcttatgtttaaagatcattttcaactaaaataaaatctgtccagtcaaatttgggggtgaatactgtccccttgcacccattttagccaaacttgacattgtgttcagacacccttgttctcacactcagtaacaacaagggagggctaagagaaagcataagcatgcgactaaaatgggtcttactttgcttgcataggctcaactacctcttgtttactgatgggatggtttcactactgtcacctacttgattaataggttgcctgtctaaaaagcaaattatataactccctttgagcttttattctttaagaaacatgactatcactttcttaaagtgtttggctatgcttattttccccttcttagaccctatcaaacataaaagttcaacttcaaaactagtatctgtgtctttttgggctacaacccttaccataaaggctacaaatgccttcatccatctggccaaatttatatagctcgtagtgtgtcctttgatgaacatgacttttcctactcaaagctattttctacacctcctaaatcatcacaacactctcctccacctccccaatacttacctttacctcatttaccataaaatcccactagtagtcctcctcaacaagttattcaacactctaatatctctcaaactcccaaacttacaccagtccctgccactactgttgttgtcactccaacaaattctcctcctcctagattccctataccattatatcccccatttccaagaagtccctctatctcaacacaagaatcacattccgtttcccttgttgaaccagaaccccatccctcaggcctgtctcatcagttcccacaaatactgatcctcctattccaccaattcgtacccaccacatgcaaactagattaaaaactagctctctaaaacctagactgctagtagcagaaataactagaactaattatttttatagtgttggaactttattttttaccaggatcttagatctactcataagtatgttgtttaa

SEQ ID NO: 115964 - DNA, 591 bp, Cannabis sativa
gcaacatccacttctcaaattaaccattttttacctgatagtatcattcccactaccagattgattcaccaatcccctagggagtctccccatgtgttactcccaattaattctactataccagcaatgcagccaaataactcacagaattctggtgcaactaatataccagattctgtcgacaggcagctcaaaccagcaggttgcacacctccaactgctgcactcgacactccaacatctggttctctcacaccagacctcaccgcacctgtttctctcttgaaacctgatgcattaaacatcccaccagctggttctatacccgattctgctacaacagtccctataccagatgctacaacaattccatctcccaaacttgttgcatcagacattacagcagctggttcttcaccagattctgctccaacaaccgatacttcagttggttcattaccaacacaaattcacattgaccaaccttgtctcacaacttcaaggacaggaagagtcataacaaaaccaaaacatttgacagattacatctgtcatgcctcctccaccgctcacccgattgagcaatacctt

SEQ ID NO: 115965 - DNA, 3640 bp, Cannabis sativa
tctaacatgaatgaaagttcaaggcacatgatttagtatatgtcaaagtttgaggggcatgatttggtagatatcaaaatttgagaagcatgatttactacataaaaaatcactaaaatagtaaaattgaatgaaattatacaaaaatccttaaatctaacaagctcaatagtttaggagaaatttttaacaaccaaagttcatgggcatgatttgttacatattaaagtttagtgagcaaaaattctaattagcctataaagaatattcaactaatttatttagggttattaatttatttttattattatttttaagtattttattttatgatattttaaaaaaataatagatatttttttttgctttaattgatttcaatgtattttttagaataatagaaagaagaaaacaacaaaaataaattaagtacaatttttaaaaatatattttctatcacctttttttttaaataaaaatatagtgctaatggatacaaatataagaatttaatgattttaagagcataataaatttctattcaatggaaaacgacaaagattttttttaatatcatatctctttgtataagtaatggctctacacacttcttcttgtattatatttttccttgtataatgaggataatgttgctcattttaaactataaattgtttgattaaattattttctcgataatcttatttattttaaaattcaataacaacaacttcaactattgcttttcttgtatttgtatataaaaaatataatatatctttattatgtactcagataactttcagctacttaatcgtagaactaaagaacaatgcataaaacatactttgtgataaagtgatatagcactatgttggattgaccgatcctcaaaataccaatcaaattaaaataacctttatgaagaagaaatcacatgggttgaaaaattgctatgtagcataattggggtcttgttcatgaatcaagaacaaaatagtctagaaaacaagtaggaatggcaaccctggacagtatcaagaagaggagcaatttggcatgagtcttcaaccgaacggttcatccatttaagcaccaaagcttcggcaaccttggccattcgatgttgtaacacagcagcagccaatggtccaaccaagttgagccttgttgctgcagatatcacatctctcgtcgttgtatacatgtaagctctctgagcagttgtgctgtccattccgagaaccccacaaacaaggccgaagatgggagcgtggtggaaacaaactagtactttcccagaagccgagcacaaagaggcatctctcatgattttaagacaaggttgagtctctgaatacacagatgcagccactctcataagtgcagagccctgtgcagtggacgcctttcggcccacttgattggttagtgtagcatccagcattttgtctagtttgtgccatgtctgcccatcaggtgatatggctgcagagtatacataaggaaggagtaagcttccggtgttgtccaaaaggtgacttataaaagtttcgaggtgttgaggagttgagactaagtgggcttggattgctgcctcaagaccaagagaatgagcaaatccaccagttgggagaatggaatctaatagctgccattgattccattgcaaagcagccgagtttgagtaatcaaaaccattattggggttttcgctctccgtgtctatttccattacttctgcaaatttggtatcgttctaaatttataccgaacaagaaaacttgattcgtttactgtagtacttgatgcgacataatttgtgcatgaagcctcaaacagacgaaaagagttaagagttttccactggtggatgttcaccagcaaggctggaatttactccactttgcagtctttcagcttcttcccacattgacatgtcaatcgaggatttcgcagttttatcttaaactaagggaaggataaatcagcccaatatgatttcatgaagatatatatctttaacaactatcagaagtagctagtgacatatttgacaagcatgtagtaaggagaactttggccaaattcttagttttcatatataaaaccataaatagacaaataaattctccatgcatctacagttattttcaataagtttgcatattcagctttgaaataattcttttgataataaaaacatcatggcgaaactcagtgaagttagacatattccatgaaattaaccaaagcaatttccccattaaaaaacatctttgcatcataaagtatctaccggccaaagagcatttataaaacagagggatcatacatgaaacatctattagcaaagtaagcttacaaggtgcaagaaaagaatccaatccaaagcttacctttgtggccgtcaccttgacttatccataagctcaataggaatggaaggccccataaaacaataaccaaagacagggactttatacaaatgactgttcccggtaatggtgtcctttgaagctctttttcttcccagatcaatccagtccactgctgatcactgaacaagtaaagaaagagcaacccaacacataaatacataaaaagtgtcaataaattcagtaatttacttccactactattcaaagtatcaacagacaataaatctagcaaaacaaaacacatctcctcatattgcttaaattgaatccaccaagtcaatcaaacaagaaattacagtagtgacaaatgagcaatgctgatgaaatcaaagagctaaatctaaaacaggaacaatgagctctgtacttgcacagtttgaaaatccatataaattaatgaagctgaatacattctttttcccaccagtaactgagttgatagttattacaataaactgaaaagagaatgattaactttaccttagcagtcaagcaaaataagttttttttccgataaaggaacagactattcccccaaagatgatggtgaagctataataccaatatcagaacttgatcaaaatatgagatgtggattagaataaatgttgagcttgtgtttcattttatcagtgtttttcttccattattaatgggaatttgacactattttggtacattaccagttaatttttaaagtgtgagctccttactgtaatgaatgctaattacaagaatccaatagtgcttgaagatgatcagttcattaattagttctgagaatataactcttgaaaagaacatgaaatatttgagaatagaatggcgatatacaaatatgtcaagttataaatatgacttttataaactaattattaattagtcatgtctgatattgtaacattcattctgtttcatgtataaacttctttataaatgaaagataataatagaaaatgatttatagatatttccattaaaaataatcttgattaaaagttatacaaacaaactcttaatcgccatgatgaggaaataactgtatgcacaataacatgtttattcaaattacatattctgtacagttggcaaattacacagaaaaaaattaagtttttacacaaaagcaaaatcaacagatacaatataatacaactctaaattaggggaaaatgaatctcaaaatcaaaattgaatac

SEQ ID NO: 115966 - DNA, 1424 bp, Cannabis sativa
tggagtggttcatgaattcaaatcaagaatggcagcatatgattcaccaacaacaacagaccaaacaaggcctaaatgaccaatttagcttattgcttgattcatcttctactgataatcagtcaagtaaaacaaggcatttcattgatgcttggtcaattgcagatgagagagatcaattgagattttccaactcttcatcatcatcatcttcatcattatcatcacttgctctatcaattcataatagtaacaacaataatgaagttgtagtgagccaaaatgcccaaatgagttataatcctattttgggttcaggaatgatgatgatcaacaacaacaacaacaaccaagtttcatggagtggttcagtaccacatggtggaccattagctgaagccttatgccttggaatgcctcatcaaaactcctcaaaatgattcaacttttcctttttttttttttaatcttaatcaaaatcccaatgttgatctgttcttcttctttgcagtttgtttgcttttgtattttcattcctttttttaagcttaattatctaaagaaataatgttactcatgatgatgatacatagtgctttgctttgttagtttaaaatgtctcaaatatattcccaaaaatcagtttttgtgtgtgtatatatatagaaaaggtaatataataggtacggtatatattatatattataacaaacaaagattcaaagtttaaatttttatgcatagtcacacaacaacaacaacacataaattgttttaagcaatgttccaaatgccctattctatttacagctttcactttcagttgaaatggtgtaattaatgcttcaaaaatttaaatccaaaagagattttaactacttcataaagaagcaatggctatagcatttttcttattattctaaaagagtaaataaatgcaaagtttaaacactctattttatgacacctaccactactagtagtagtactagctttgttaaccctactagttaatactactactgcctagtgcctaccctacatattaccacattgattacaaataacgtaaaccaagaattatgttgcttgaaaatacaagcatactccaaaaaagggtcaccatgtaaaatcactttccaatcaaaaaatagaaataaaaagtttgaaagaccaaatatgatagggtaagattatattcaatagaaaatgtaaaaattaagttatatttagtataaaaaatagttttgatttttacattaattattactattgtactccaataaataattgtaaatcttaatataaaatttaatatattaaaaaaaaaagaacattgttattgggcaccagtggtgctcttgtagtattttcaacacgcaagtatacatatcgttaacaagttatagactcacaaagagtga

SEQ ID NO: 115967 - DNA, 2968 bp, Cannabis sativa
  modified_base (2929)..(2929): a, c, t, g, unknown or other
tttactctttttgtcttgttccttttgtctgcttttctagtaagcttttcttgattagagctatgcaattttatcatcatatacaaatattgtgatttgccatctactcattagtcttgctcatttatcagtcatggcgggattagcaccagaaggatcacaatttgacgcacgtcagtatgatgccaagatgactgagttgtaagaattgcatctgtctaagactgtactttgtgttgttgattttgtgttacaaggttgcttatataatttgttgaaaaaatgagtatctaatttttgtttttgttgctgtattgaacatttttatagacttgatggacaagatgatttctttaaatcatatgatgaagtttgcgatagctttgatcttatgggtttgaaagagaaccttcttaggggcatttatgcttatggtataactttatttttctttctcaattaagtatcttgtttgatgatttactgatgaacagaatagttggatttaatactgatcggattgacttctaattattcgatttcatgaactatgtatcttgattgatgttttgttattatataaatatggaattaatagttgagcaattattatgccatagtatctctgacttggttgaggacttctttaggttttgaaaaaccctcggccattcaacagaggggaatagttccattctgcaagggtcttgatgtcatccaacaagcccagtctggtactggaaagacagcaactttctgctctggtgttttgcaacagcttgactatgatgtgaccgaatgccaggctttggtgctagcaccaactcgtgagcttgctcaacagattgagaaggtcatgcgtgctcttggagactatcttggtgttaaggtgcatgcctgtgttggtggcacaagtgttcgagaggaccagcgcatattatcaagtggtgttcatgttgttgttggaactccaggccgtgtttttgacatgctgaggagacagtcccttcgtcccgattacataaaaatgtttgttttggacgaggctgatgaaatgctttcaagagggtttaaggatcaggtttactttctccccactatttatttatttatttttggttaataagtaacttttttacaatgaattaattctttctggccttctgaatgtggttgaaaatagattatgaatttattagaaagttgcatctaaagttctctacttgttatgatgcgagtaaatgtgcggttgttcactctttaattttcttggtttcagatctatgatattttccagcttctgccaagcaagatccaggttggggtattttctgctactatgccccctgaagctctggagatcaccagaaagttcatgaacaatcccgtgaggattcttgttaagcgtgatgagcttaccctcgagggtatcaagcaattttatgtcaatgttgacaaggaggattggaaatttgaaaccttatgtgatctttacgagactttggccattacccagagtgtcatttttgtcaacacccgtcgcaaggtagactggctgactgacaagatgaggagccgagaccacacagtgtctgccacccatggagacatggaccagaacaccagagacattattatgcgggaattccgatctgggtcttcccgtgttttgattaccacggatctcttggctcgtggtattgatgtgcaacaagtctcacttgttataaactacgatctcccaactcagcctgagaactatctccatcgtattggacgtagtggaaggtttggaaggaaaggtgtggcaatcaacttcataactaccgacgatgataggatggtctctgacatccagaagttctataatgttttgatcgaggagctgccttcaaatgttgctgatctcctgtgatgagttattttattttagtagagaaatttggaatttgtttaggcaagtcttgaaactttaatttaacgtgtttttttttcctttctttttttcctttttaatttcccgtaggaatgacttttcatcaagttctagcaatgttctatcattgcgagattttgtgctatggcagccgtcacaagttttctgccaattttattttgaatgcatatttttcttttcttgacaaagaggattttaaaatcgtaattttcagcttaatatttgtgtgccattctcattttgtttactaggataaaatttcaattcttgttccattctattcttataagtaactttctttgcattaggtgctcttgacatttttgaacaagaaggaaaatgaataaagaagagatacattgttaatagtgctattttcaaaaatatgtaaaaaattattaaggttatgataaatatgaatatagtattatctaaccaatcaaactaaaatatagtttttttttttataaaacattaaaaagaaatttagatttaaaattcataaaaaataaaaatttaattaaattactataaaaaatattaaaatttctttcatatttattttttttcaaaaataaaataaataaaactatagtgatcgccgaagttgtcattcgtgctggaaaagtcaccggagtttattactggcaccagtaaaatcgtcagagtagccgtcggtaccgtaagtcaccggagttgctgccggcgctgaaaaagtcgtcaaaattagcattgtcgctggaaaagttaccaagttgatgaagaagaaaccggtttcttggaaaccagtttcttggtattttttcggtaattttaccggtgacaatgccaagtccggcgactattctggagtttgatgtcggtaccggaaaagtcgtcggagtagttgtcgttgtcggaaaaattgtcggtgtaaacaaaatagtcagaattggcattgtcgccagacaaatcactagaaaaatcaccaanaaagtggttttttcatcaagaaacaaaaatgatatacac

SEQ ID NO: 115968 - DNA, 2447 bp, Cannabis sativa
tattgttacaaggtcaaaaagttgtcacaatagacaatattcgattgcgacgacaatattgtcgttgcaacttgcattagttaactataaataagaacgtattataacaatttctttagtctattgtaacgacaaatattgtcgccaaaatagctctattaagaacaataagcctattatgacaactttttagtttattgcaacgagaatatttgtcgtcgcaataaatcatttgagaagtgtgaagctcaaaatgaacaaagaaccaattacagagtcacaagatactctcaccccacctacaaaatgagcatgtgctagaaaattacatttctagcaattgtatactcgagaagagcagtttccctttctttcaaaccttttcatagtttttgtacttcttacaaaacataagtacatacaaaagagttgtagctgtatgtatctagccaagaagcagtaacgatgacacattaaaatcattaattagtatggaattgacataagtatattctctccatttgtgcgaaaagcacacaaatcctattcttgattgtatatgttacatattgcgctctagtatttaagccatgcatatttgtttgaaaggaataaaaatataagaatatgagaatacgaaaataaattgaatggaataaaattttaaatacataaaaaaaaattcataagaaaattattaatttttttctaatcatacgttggaatgatctttccttctatttcaatatagaatagtcattccaacactttaatatgaaaccaaacaaaagaatagaatgaaaattgcttaaacgccacctatatgttttaagttttcaacttgttttcttttgtatctttgatactagtattggaataaaatattcatttcagattcttcatttgtagaccactcgtattggtctcttatctgatgttttaaatgagtgatcaatattaaggcaaaaagaaaaaaaaaaagtgcaacagaaaagaaaagacatgagaaataaaactactaaatttctgaagatattacattaattaatgaagatgggttttttttaataaagagaaatatagaaaagagagggtgaggtaggtaggcaggaagcatcttagtcttcttcatcgacatcggtgacaaatttaccagtcccggggttgactgctgcaatgaaaaagaagagaacgttgaacaacactagaggctcaatttcattgataggaactccagtctcaatgtttagctgtgccaatgctcccttcccagttatgatttcaccgattagagagaatgcaaatcccagttgagccaatcttccaacgaaaagctcgttcgctttcgtaaatccaaacaggggacctgtacacaaccacatgttcatttataaatgagaattgctaaacgcacttaaaatactaacaccacaacacacaatacaagactgaagtattatatctttcttacatcttttctatttaataaacaataagaaacagttgttaccaatgctctttataaataaataaatgatttttctttttttattatttaacataggcttgttaaagagaaatgaaaaggcactagtggtgcaaatactgtattggtcttattgagtattgggttcaatatagtttaacataataacttttagaaagtatcgctagctaatcgcaaagcgacacgccttaagtcccactagtgcattgctacgtgttaaattaaacatagtcaagtggtaaagtagtacctccttccttaagtcccaaggcagctctgaggcttttgcctggaggaatgacagcgccttcgattccggtgggagggtcgtcgatgaattgaccacggtcacccaaagctccaatggctccgagcagggtgaagaggatgaagaagagaagaagtggttcagcttcataaatgggaattccagtttccaggtttagttgtgataaaattccttttccagttattgcttctcccaatatcgatgcctatacatacaaacaaacaaacttcattatatattatcctttttttttttgtgttagtgtgagtgagacacagtagtgaaatttctatactcaccgcgaatccaatcatagcaacacgaccaacaaacagctcattctgctttgtaaaaccaataccccctgaggttccaaacaaaccatcttcaacctttggcttcggcttcacaacctattcaaaaaccaaatcaataagttcctactactaagaagtatttatttatttatttatttttgtttataataaaagaaaaggaacttaatatctagaattctgttattaccttcttggcaggggctttggtctttgatttgaagagagcaaaaacagtggaaattgcgggagagttggaagaagaggtgagtggattgtaagtgagagtttgagagaatatgttaactttgagtct

SEQ ID NO: 115969 - DNA, 2951 bp, Cannabis sativa
tttggggctttctatgattttctgtctgcatgaatgtgaccgtattttacttagtagtgttgttttgagagactctaattatgtctcagaacctgcaacgtcaaaatttatggatagaagttatatttgttgtgataaacgttgcaccagtcattctttaacagcaacttctgtttgtaggccttttccctgtatttcttgttttgtttgccatgtttttaaaactgttggtcgttgcaaacggacttgtgctgtgtacaaggtgtagacttttacccctttttcttttcttgctgggtggttgaattgctatatagtctagacagttgatccaatgccaatgcatgatgcagaaatttgggtgtgaaatgaatttgtgagatcgtaagatgtgaaatgtttgattcacatgtaatagctagtagggtccaacttcttgagacttaattagaagatggagaggagagattttttttcttttttattctttgccatctcattttattcccctgattgagtttgggactgctgaattattatgtgattttgaaattgttctgaacattttatgtttgcttatctctttacagcttgtccacaacagcaaccggtgcaatagattctgttccaatgtcacctgaagcagataagaataatttaaatgtaggagtttcttttaggacacctgagactgcacttccatctgcagcttcatcatcaagtgcaaatatatttgcctttggaacaacacccagggatggtcttaataatggattttctgcttcgatatcttctactcctgtagtttccagtacaagtcaaaacacatcaaatggatcactttttggaaatagtactagcaatgttcccactccaagcaccactacatttggcactggcagtggcagtctctccacctcaacaccagctccagcagtacctgtatctccttttgggtcatcaaaggcttcatccttagttgcaccagttacagaaaattcttcagtacctgctccatctgtatttaaatttggatcatctactgactcaactgcagttgcaccagcctctgaaacttcttcaataccagtttcccctgcaactaaatttggctatacatcaactggagttgcacaagtttcagaaacctcttctgtaccagctgcatctgtatttaaattttctacagcctcacctgcagctccaccagtttctggatcttcttttgatgtcacttgtggggccattaagacagagctggtttcatctgttggtaatgagagcagtgcaggtgttggtgccacaccttctaccaatgcaagctctgggagtacactttttgggatttctgctgctgccacctcttcaacttctaccacccaatctctgggtctttcttttggtgctgggatttcatcagtgcccagttctcaggcttcccctaccgggactggacttgcaacattttctcagagcaatcctttccaatttggttcttcttcaggatcctccccaatatttgggctatctggaagtaccactttctcttctggcagttctcctttcggctcaacaacttctattaaaccatttagttcaggaagtactcctggacttggttcttcttcgtctgaagccaacttggttagctccagcagtaccagtacacctagtgtgtttggttccagttggcaaccttcaaaatctccacctgtattcaatttcaactctactccaagcacatttgcctttggagcaacttcagctgctagcactaccacaaacagttcaccgtctatatttggagcatcaacgcctgctgccaccaatggtgcgcctggcatgtttgcatcatctaatggtgcatcctcaagttctcctttcttatttaattcctcttcaggtcctgcgtcgacacagactgtttttggaaacgccagtcctacatttgcttttggtgcttcagctggtcacaatgatcaaatgagtatggaagacagcatggccgaggacactgttcaggcatcagctcctgcagtcccaggatttgggcaacaaaatgttaccccagctccctcggcctttgcatttgcttcagcaccagctccctcagttgttaatccgtttcaatttgggggccaaccaaatccgtctaacccacagaacccttctccatttcaggctcctggtaatctaggtctaatggctgatggaagcaacttctcgctgggtagcgggggcagtggagttgacaagtccaacagaaaatatataaaagttaaaagcaagcaacggaagaagtgaaaagattatgtctattttgttctcctattgaagctcttaggaaaattgcaattggcaaataaatgtttctgtacaacatcagggagcagaaggttgctgggttggctggtcctcttaaaacgttgtgataaggatcatcaaccccttgaaagttcagaacggaacagctgaaaatctgctttggaaaatttttagtcttttttcatttgttctatttttgggttgtaagggaaaattatggtcgcaatgcaggcataagttgtcacaattttgtatcatttgtagccttaaggacgattatgtttctgttgctttgtactttgtagtgcaagtagatcaagttattcctgtttgggcaattgtactattagactcttctctcttattaagtgtactctgtatttgtaacataaaagtaattggtatgcgtatttgttaatgaaaagagtcttttgctcaacacactttgaatatgcaatatgcattcctcttttttacttttgtattttgtaccgtttattgatatagaggcattttttgacaaaaccattgaaagcaatttaatataattgcctctattaacattatgtaatatattccttcaaaaaaaaaaaaaaaaaaaaaacattatgtaatatatttgtaaa

SEQ ID NO: 115970 - DNA, 2128 bp, Cannabis sativa
  modified_base (98)..(139): a, c, t, g, unknown or other
cacaacctcaacaccagatgtaataacgactatatttgcaagcctaatcctgaaaaatcagaataaagaaaccacactcttcttcttcttcttcttcnnnnnnnnnnnnnnnnnnnnnnnnnnnnnnnnnnnnnnnnnnttcttcttcttcttcttcttcacgtactcttttttttgttatctactacaaaaagagatagttagcttttatttggttaatgttgtagacttaaaaacaatgaaaaaaaaaagagggggaagctacccattaattcaagagcagtatataaatatataaacatatataatttcttgaaaatgaggagatcacatttgtccaaatcattaaaaaaaatgaagaagaagaagataaatacaactaataaaaacatatattaaaaggtgtttcaactttttattataaattttaagtaaaaaataaaaataaaaaaaattgtcataaaagtgatattctcaatcaaatcaacaaataatgtgtttgtgttctctcattaatttaagaggaatatatatgtatgtataaacacatatttttttttatttatttatttttttttttttttgagaatgaggagatcacgtgggctcttgtccaatttttttaataaaaaaggataaaaaaaaatacatataagaacatgtattaaaaggtatttcaacttttcattatcaattttaagtaaaaagaaaaaagaaaaattgtcacaaaagtgacatgcccaatcaaaccaatatgttttacaaatttaaaatataataaaattggttagaataaatcttggattgccacctttcaacaaaatggaacaatttttttttaaaaaaaatacagtatacaatatattaatgggcagtaaaaatgtaaatttatgcgtataaaaataaaattgtaaaaaaaaatagaaaatacagtgtaaattttctaaaaaaaattgcataagtaaactagttgtaataactagttatttacatgagagagatgtaacctcataagctaatttctttttataagagaaaaaaaatcaaactggagaaatcaatataatacttaaaataattttattaagacaatacattaagaaatcatttactttcatataatcaaaatcggtttcttaataaaaaaaaccagttacgaatatcaaaattcatacataaattttacatatgcttatattctagttactttatgaaatatggaacaacacaataccaaaactaataccaattataaacttctcagaagttccaagactcaaccatcaatccacactatccaaaacagttattatccattaaaataaaatattggtcgcaaaaaaaaagtacaaaatagaatgagaacatttggcggtgttgttattgtcatcagaaaaatcgtcaaagtattcattatgagaaaatcaccggggttagatatcaaaattgtcatcgatgttggacattgaaatttgacacactaaaaactagttatatttactcaactatttaataaaactatgatagagaaaccaaatatttaaatcaattaaattaaagactagaacgttagaaccaattacgtaaaacaacaaaagcaagatcagttgctaatataacccaaaacaatcaaaagataaattaaaacataaaaactaatttttaacaataacttacaaattaaattacagaaattagttacattttagattgttaaaaacacaaagctaacaattaaatacagaaacttattacataatacaaccaactaaaaaattgaaataaaaacataaaacaataaaatgatatattgaaacacaaaaactaattattttaaattaaagcataccataagaagcatacaagtaaactttaatcactaaagctagctacatcaaataactaaaaaaagtttgacatagagaaacattttacattaaacaaccaactaaaatcttacacaaaaaaatcgttcaaaaaaagcaaataaatttaaaaatgaaacttaggaccaattacaaacaacaataccaaaaattagacacaaaaaattataacataaagactagatattcaatatatatatatatagggatatgattttgtcccgttattgtactttcacgga

SEQ ID NO: 115971 - DNA, 3869 bp, Cannabis sativa
  modified_base (1019)..(1032): a, c, t, g, unknown or other
ttagtgttttctttaaaaaaaaaaatagtgttttgtaaagtcatgtgaataatgttgtgatatatattttaggtttttttttttttttgaatatttgtggaatttaatatatattgatttgacgattaaaaataagagaaattctcaaaatgtctcaggcattcacaaactttggctgacttttgaaccaagttcatttcgttctcaggtttcacctctgatgagtcaaattaaagcttcatttattaatattgaaattgaaatgtattttgggaagtttttatttgttgtgttcaaactgtgtattagtggccataagagttttttgaattgtttaaatgcctcatattaggttctttttttttttttttttatctcttcaagcattttatatttgtaaagaataattcattatttgtgctatttctttgttttttttcgttgttctatgtattcgtttgtcttttaaatagatttaaggattgtgaacgtgacatataaccttaaataaaaaattactacaagtgttgtatcgggtggaagcaagcattcaccaagatctgaagggagttcatgttatttgtgtttaatcaagattgaattagaaaattagagttcaacaaagttgtggcaaagtatggagggagcttaaatttatttaagttaattgcttttatagtgattttactgattaatctcttctctagttgtgatctcctggattattattgacacctcataaaaaatctcgtgatcttgtgtctgattttatcatctgtaagtttttagtccatgcactattgtttgatccgtcaagtatagttcctcataaatgaaaattctatcatgttctatcaacttattcacatcaatcctttgaataaattttttgtataataagttggtaattataataagcggattttcatatataaatgtatgttctcaataaaaagtaaaaagagaaacaacacacttctatgctatctttatctttgctattattattattattattnnnnnnnnnnnnnntattattattattattatttgcagaatttatttttgttatttgataaaacacaaattctgttatatctaaaaggtgtccccttttatttttgtattctcctttctgttggaaaattgtatgaggcgtccccttctagaatttgctcagtaacctatactctttgagctgatttttcaaaacacatttctatgtaaaatctgactgtattaacaaattatggaccgttatcatcttctaattactcaaactaaattaacataactaattgattgaaattcgtatgcataaatagtatatactaaaatacattacatacttatccagagaagagaaaaatatagatacatggtggataaaagtggtggtcctaaattagatgggtctaaagttgatatagaaggttctagtggtacacacactacaagaccccatggatatgtacttcttttccccatccaactaccaacaaatttatacattgtctacattaatgattttcattggggaacactaatctacttcttctgcttaaaaatgattagtgttcttgtaatgtcccccctaagaaaattaccccaaaacaaaacaaatgaactcaatcagtatgagaagaaatggttgaccaaatccctcttgatttggacagagtggtgacacaaagagtaagtataatttgtagaaattatatattttatgggattttatactatatgtgcaaaaatataatttttttttttaaaaaaagttattttaaaaaaaatattgaaaaatataaaaaaaccaaataaaggtaattaacaggggcgggtatacaatataatatggcccctaagatatattatatgtgcttaagtttatatatgtagtttagtttttgttgataattagtatatggtgacctcgtgtgacaaactaaaattataaaggagaatttttaaaacaaatacccttttttatattttatttacaatttaacaacctaaatattttatttaaaaagataggtttgtgaagttttaaaattataaaaatacacatttctcatcaaaaagtaagaaaacaactaaaaattaacgagaaattaacttcacgacaactataaataaattagaaaaataacatcttgacaactataatacaactataaataaactataaaacaattaaaaaaacagtctattatttttactgaagagtattttgtttaataaaaaagttcaaaacgtaaaagtaaaaaatttctacattaacgtatttttgtaattttgttttttcaaattaggtctatttatgtaaaattttcaattataaatatgatatgttctataaagatctacttttatttatttattttaataaaattctatttgtttcctttttttatttgaagatatttgttttcttctttaacaatattaattttctttgcaagatataatattttagattttttctaattgtgtataaagagataatttttatcttacgtcccttcaatttttatagttatcacaaagaaatctttctcaactaagaatatggtgaagactacactctgcagcaagatggaacgaatttttaagtaattgtttgctagtgtatattaaaagagaaatcaccaaaattttttatataaaatcacttattgatgacttttgttatatacaagaaagacgttctgtattttaatcttaattacgattttaataaggtatatttagagcgaaatctccttaatatttgcactgtttacacattgaccttaataaaaaaaagtggcagcaaaactaccttacattacaattttgttgcagtcgtactcttaagtgtcaactcaaaaatacatagcgtcatattattagatcacgtattaaataaatattatttatcttactttttaattaagaatatacaattttgcataaaaaaaggagatcaatttttcaataattaaataaataaatgtttttttttagagaataatataattttttttttaatttaatacaaggtccaataatatgttgccacatatttttgagtttgtacttaacgagcttaatttaccattaaagctacggctacatcaaaataagataaagtagttttactgctattttttttattaggatcatatgtgtcacaactacaaatgttaaagaaattttactgcaaatatcccatttaggatcatatggataattttttaatgggtattacccatgaatggttactaaacaaatttaactataaagattaattttaaaaatattaaatcatcaaattttaatctaataacgaataattttttatatttttacatttcaaaacaaatacatatataaaataaaatataatttaaataatcattttttaaatattaagataaaaaaattaaaataagaaaatatataaaatcttagattaaaataaaagagtatataatattttaaaaaagataaaaaaaagtattgaagttaatataaaaagtgtttttttttaaggtgttatgagaacaagtgaggcagttgcagatcacctattcactaggatgaagtaggtgaaagaaagttcctaggtcccgaagctgttcagagaacaagtgaggcaattgataaaatctgagcacgaatgctcgcggttcagagcagacaagagttatgcagatccaaagcatcgagatattaatttttagatcgaaggtatggtatttcacttagtatcacctacgaagggcattaaacgctttggtaagaaaggaaaacttagcccaaggttcattggacctttcaagatccttgagaggataggacaagtagcgtacaggttggctatg

SEQ ID NO: 115972 - DNA, 1612 bp, Cannabis sativa
ttttttatgagatacctatatttgttagttcagcatggaagatggcctgttatgataccttgaaatcaagagtactttggtcattgtggatgtcttttattttcttgcacaaagttacagagtttctttactttcatatctcagaaaaaatatagctagtatctttttagtattcctcatgctgttttttatgcttgcaatggatctttagtggagatgtcattatttctgcggggtcaggtacctgcttgcctatatttttgggagagggggtggcgtggattggggaggggtcagttatgggtatagttttctatgcgttatagatctctaaggtggtcaggagatcaagcccttccttgactccactctgatatacatgacttatgtatatatttaatccaaaaggttacaaacccttaactcttatcactgtacatgtactgctgcctacttgtctcgcaaatcatcatcttcttcctagtacacaatctccgtttctttattgtatttaggtttctgcattcataattcatgtcttgatattattgatttttatttcctgttgagaaaccgtggttgcatatcctttgactgatgtttccttctcaaaaatctccagggactatcatccagagaatgtttttcaatccatggagacaataatgacccttgtcttagaagaaagtgaagatattccaatggagcttctcacccctatattagaatgcgtgaaaattggcaacaaagtaatttactgtccgaattacagattacattttttttgatcttctcattttctttttcctaataatctgttaccataatatctttttaggatgttttgcccattgctcggaaattgggagagagagttcttgaaatatgtgctccgaaggttaagccttacttggtacaggctgtaaaggacctgggtatttcattagatgactatagtaaagttttatctaccatatgccaagatgctgatggtgatgttgagcagaatgaagtccaagcttctgatgagaatatggtacttatcttggtattaagaagtgtgaatttattgcttattttgtgaaaaaatgtattaattgactgctttctactcaaaccattttgtacctgagcttgctttgttcttcacacttttgtttaagttgcatttttatatgataatttgtattttcattgccctttcgatttcttgtcttctgcctatagcttttctccatgtggtatgttttgtgattaaacgttacaatgacaagaatgaaagttgactgcttgtgattaattcctaatgtcttgtggttgttacccgttcatcttatccttttatggaaattgtttagaattctttgtgtttgattttactttcttttgttcagcaaggttttatttgatgaatgcatgttgtcatattatcatactttctcgcactatcttactccattaattttccgaattgtttagttctgttattgtcacttaattatacgcatgttttcaggctgttgagagcaggccaacgaagccacccttggataacggatcccaggcatgccatctttctactttaattaatttaggaataattacataaggc

SEQ ID NO: 115973 - DNA, 1016 bp, Cannabis sativa
agcgctcccactcaaatgaactaccatgttcccaatatgtaaacatctgccagaaccattggttagcttccacaaaaaatttgaagaatagcttcctcttcttcaagaggaacaccggggaagggagatttagtccattgtatatctatttctataaacagttacttgtcgatgagcctaataaaatggactcgttgactaaggatagttaacgcctgaaccacgtaaaaatcttatttgttatctttctattaattttgttataactttcttatgctctaaaaatatttagtttccaaaaaatttggtaaacattttggtgctttcgttgagagctaaagaaagagacatcacgatggtccctagcgcaagcctataaaaagaagagcctgtacaaacaaaaaagaaggaaggccgcctaactgcccgtcaaggtttagctagaggtcaagaagatcttgattagaagtattattaaaatttgatggccgacatcctcaaccgcccgaagaaggcacagaagatgaacgcacacggtcttgaaacactcaccgcactgatactcacccttaaaaagtcagatctggccagcgaactccctggccagatgaccggccacgggtatcctcaagctcgtgttccttgccatccattagggcgtaactacacagacacgatgaggtgcaagagttgttggggccaggcaatgatgttaagacccgatgcagtaacgatgactgactcacgaagggttgctgatataacgaccctatccagctcacgactccagtgtcagtcctaatgcaaggactagatccatcgccaacagctagttcccctaccttttccatgcgtcacgaagctaatcaaaaaccaatgttacaagatcatgtcgtgacagcagttgagaggatatcatcaatctcattagtgcctgttgggtttccagtcaagcctgatggaatactgctggttggaaggtgtaacaccctaactaatttaggcgtattacgtga

SEQ ID NO: 115974 - DNA, 2896 bp, Cannabis sativa
ccgcctatgaatttcttcacaaagatttatatcaatcttgcaattctatgactatggtcacctgagtagggtctacttctccttgaataatgttcaatatggatatgtacttcgcttgactagcttctttatttctagcataagaggaaaccatgatgttttttgtctacaaaaaaggaagaaaaagaattcatcaattgtatacataactggtggtaactttaccataagaacctaacaaaaaaattcttgcctgcaaaagtcgtctcataacgtccaatacagtagttttacgaatgacatttgcctgcaatgaagaaacattcacattaaacagccaatattctcttaaaacaaagaaaagtgattcaaacaagcaacatgtcatttctaattcactctccagtatttcctctaatatacatggagacatatttaatatatatataagtatgaacaaaaggataaacttacctgacgctccactgtaagaggtgtgtatccggtcataagaaagtggcatctcggtgttggaatcaaagatgcaagaagcccaaccaagtcattgttcatgtatcccggatatcttagggtagttgtgctggctgacattacagtagaaactaaagaatttgtttgagcaaaggtgggatttgatagatgaaggcgctcaacagcaatcctatttaatgcagtgttatcaagaacaacaacacagtcagcattaagtgttagtcgcttaagtgtcaaaagagagttatatggttggaccaccacatcacttgtttccatctgattagggaacacactgtatgtctgaaccagttttttgctgtaccgatcattcagagtctccaacagatatgaacccatacctgcattatagccaacacatgtaagcaatgcagaataatgttaataagcacacagtaacactaaagctaaactttaaccaatgcagaataatgtttataagcacgaccatatcactaaagcagatgtttcattcaaattgattaatattttcaagtgtaatctcactctacttgcgcaagattaacagggatccatatttgtcatccttatccaaggatgaatccaatttggtattgtttcaaaacagagattagacactcataaatagtcatttaggttgagattgtagtatttaaatagagtatctacaatgctatgccgaaatgcttcatcatattaccatcctgagcaaattaagttaggaaaaagtaaatgactaaagtgtggtgaagtgaataaacctgagccagttcctccagcaattgaatgacacaaaacaaaaccttcaagactatcacttccatctgcttctctgtcaatcatgtccattatatcctcctcaacaccttttccctgatcagaaattaaaaaaaaaaaaatcattttccaaaaagtaaaatagccggcaatcaacatcggaaacaaccatgacataaacacagaacaatctatgtgtacgtaatgggtaggtcagcttatcaatgtcttacaaagtgttggattagctataggcatttgtatctaatcactgaatttggtgttctttctagtgaacacagcatgcaacattctgggaatacatagattcgtcattaatgacatgctattttaatccatacaacgacagcacttttatacagtacagtcagtttgccaagttaacattcaaaacaaaggtcagttaattaagaagactgcaattgtttttttgcaaaaaatcatgatccttgacaaacccatataattattactttagatttattgctcaattatgcactagtagttgtaagttaccatcagaaaatgtcagtatttcctagttcatatacaaagaaactcaaaatttattttcttatcaaaatgaatttcattattaagcattacaagttgtggccataaataaatttactacaggcagtaactaccgagaatatctaaacacctaacggaagtaaatccaagggacgaacctgatggtacccactggcccagttgttaccagcaccacctccatggtctgaaacaaagatgttctcatgattatacagatttctgtactcactattttgaatgccattaatgactcgaggctccaagtcaatcagtaaagctcgaggtatgtagtgttgatcatcagcttgataaaagaacacatctttacggtctcccccctacacgaaagagcaaaaaggaaatctataaatagcaaactccttagaagaaaaaaaaatggcacattaaactaattttgatgtcatcacaaaagcttgaagtcccttttcaattcaagtaaaaacttccctagccttggataataaaaacaggggcaaccatagatagataaacgaaaagagattcacaattttacacttcaaaaaacgaacaggagcccaaataaaaaagggaaattagtaagcactagagaaaaggaggtggtgtagggacctgagtggcaaaatcttcgagaatgccgtctttgttgatcccatgctcgaggcaaagctgcttccagaattccatcccaatctggttcccgcattgtccgacctgcaaggtgataatctccctcggcattttctagggtttagtcgaatggaagtgataataaatgagagaaattgagtttgaaaaagatagaaagaaggaaagtgaaggtagggagggaaatgagagtagaaagagtgggaaaatgaacgaatccaggaaattagggagggagggtgggtttaacactgtttctcttcactgaagaaaatactaacttgattttgtacaaacaaccacgaaagaaaccagttgagtgagtttgccgcgattatctattttcctttttcttttcttttctttcaaaaataataaa

SEQ ID NO: 115975 - DNA, 2587 bp, Cannabis sativa
  modified_base (2547)..(2562): a, c, t, g, unknown or other
ttttttttttttgaaatggagtttgagattttgatttttaagattttttttttaactattgctacattagtgtgccatttgaatgtgattatacatatacacatttttaatttttaaattttttttaattaacgtatctgataatacatatattatacatgattataaatatctataatattttaagtattttaaatttaaatttaaattaaaatttcattatgtaaactatctataaaatttttatttttaaatataaataataatattataaaattaataaagaatattttgttaagtaataggatattctgttaaagttaacgtggaaaccaaaaaaatatcattaaaccaaaaattttattacatagacatattttatataaaatagatataataataatagtaataataatattctatcaaataataataacaataataataataactattataaaagtttgagttggagagttatattattattttgtcttgtagtgggttaatgtttttaactttttgttatttttgtttgtttaaaagtttttttttttttttacaattttcctttttcatttaattatttaattattttatttagatatatatattttttttttgaaaataagatcgttcattaatagataaaattagacatcacggtcattataaaataagtttgctagaatataagaaacatgcaagctaccaaagtgattgtgggtaaaagttcacttagccacattataagtagcaaaattacagtttctgaggatacaattaaaaacacaaccatcaaaacaactagagagatcaaagcaaaagaataatagttttcgatctcctaacatgacgacaagcgattgagtgaattgatgatcactctagagtcactctctacaaagatgaatttgtgtcctttgagctttgccgtatcaagggctatgtgacatgcagccgcctcgccacaaagggcatccgaatagtcgaacctagccgtagtaacccagaccacctcaccaaagtgctctttagcaaccaccgtaatacacaaactttccaaacccactttaacatcatagtttagtttgagccaatcctgaggaggagggcgtcaatcttctctctagaccagggtcgaagcagtagacccacgtgttgcgctcacacatctattttacatttacaaccttactagggtttgtctcggttatagttaccgagtccaacctggttatgtcttacccgcataactctactcacatatatacataatttatacattatgctcttaaaatagtttatcttgatgatgtttatcaggtctaacccagttatgtcttcgacttcgcttgaaaagatcaaagggtgaaagcatcacgggaaataagacagacttcaaattgaagacatgtcatacccccagtgatccttcacgcacgaaaaacatcgtgcatgcgagagtcatattgaattttttatgtagcaagctttggcttccgcgaatgaaagctaaagttgctaaaaaattcaagcttcgactttgctcgaaaagattaaagggtgaaagaatcacggggaataacacaaacttcaagtagtcctaccatttcgagaaggagggttgaagacgtgtcatacccctagtgatccttcatgcacgaaaaacatcacgcctgtgagagtcatgttgaatttttatttagcaagcttcggcttccacgagggaaggctaaaattgcataaaaatttaagcaacgactttgcttgaaaacatcaaagtgtgaaagtgtaacgtccttgcttcaagcctctattaggtccatacacccacagaatgatgactcttatacacgagtacgtcactatgactgcttcatggactgacgactggccctgcagaccaacacaagtgttttcagtgtgctttgtcctcactcgcatgcttcttgggaaaactttccaggaggtcacccattctgaaattatcacaggtcaagcatgcttaatcgtggatttgaacaaataataatcaattcattcgaaacctcctccaaaataaattaggaccaaatgttggtgtttctataaaatagtcacgataaagtctttcattaccttcaaccctattgcgttgaataatagtacaacttatagtagatccacgacgacaaggggctcgaattttattcgtcatttcttcttcttcagccatcaccattgtcaataataaaagatcatcataattatcatcatcaaaaagcattttagctaatcgattacaacccatcactatttgtgaaatattttataaataaacatagttgatataaacttgatagataaaatttaaatgaataatatgagaaacaaaatggacttatttatcggcaaaaaaaatagccactgtaaatataaccgttacaaatatagtcgttgtaaatatagtcgttaaaaatatattcgttataaatataaccgttgtaaacatagttgttagaaatgtagctgttataaatatacctgttgaccgaggttttcggnnnnnnnnnnnnnnnnattataataaagagctgtaagaaag

SEQ ID NO: 115976 - DNA, 1346 bp, Cannabis sativa
catataattaatatgttcatacagagcaaatgaatttggatgggcaaatacatatgtgtttaccaaagcaatgggagaaatgtgcttattatccaataatattaataataataataatatcataatcatacgtcccactatgattactagcacttataaacaaccctttcctggttggattaaggcttaaggtaattaattaatcaattaaaaaatactttagtatattatattaattaggttatatatatatatatatatatatatattaatcaaacgcatgcagaactgtggatagcttaattgttgggtttggaaaaggcaaactctcctgcttcttgggcagacctcattttataattgatttggtacgtaattaaatacaattataagcttaactattaattgcagattattataatattaattaattgtttattgtatgtatgcaggtaccagctgatatggtggtaaatgcaatgattttggccatgatgatatctcataataataatggagctgaatcatttaatatttaccaagttggaagttcaatgagaaatcctttatatttttcaaagatttaccattatatatgcttattcctagctatttcatccaattaaaacccatttactgatcaaattaaaaaccaaaaaccaatcaaagtcagcaaagttaaacttttccatcatacttgtatgttcaacatttacatgctctttccattcattctacctcgatctcaagctgcttatacaatatctttcttctatttataataacgttaattatagtttctgcctctcgaacacatctcctaaattttttaaccttttaaaatttcctccgaattagctagttagaattaaaaacttttgtctaattaaatttattaatagaatgacacagtttagtatataaacaattcccgcattagtaaaaataaatgtaattagttataagtccttaaatttaaatatttttaatagtccaaaggatatttttcaaaaaagatgatttgatatatcttaaagttcaagttgaaaaccttaattagccttataatagtaatatgtatatattaatcctaattaatatttaatcatgtagaatattgttatatatgtataataattattaatatgtggagtgcagatgttggaaatgggtgtgaatatattaccaatagtttttggatgcttgaaagatgtgtacactaaaagcgtgaggaaggttaagaccatattgcgttttctagacctttacaaaccatatgccttattcaatggaatgtaagtacttatttatatatacaaattattattattattattataaagcaa

SEQ ID NO: 115977 - DNA, 1788 bp, Cannabis sativa
tcgaaaatgaatgcatagcaatcttaccataaaaaggaaaaattattttgtcacctaacttgccaaaaaaggactttacaacagtaaaatactctagccttgagagtactaagtcatgatcttcaagctaagaaccttggccaagtcacaactctcctcaaacacacaattatttctattacaccaaatgtaatagaccacagttgtcatgacagcagatttagtcgcttctaacaggttattctgattccctcttggcccaaacaaccaatcttcaagatttttaggccaattaaattgactcaaccaactagaaacttcaaaaatgacactcttagagtaatagcaatcaaagaaaatcagtttccaaacacactagatagagaggagaatcaagctccaaaaaacctggccaagagatcccaagttaaaagattggtgttcagagcctgcaacaatatgaatttgtgctttgaaactttgagcttgtgccagatttctttatagtaagaaaccttcataaccgaaatatgtaaaagataaaactttttaactttagaaacacatgtcagccctgctttaattatggtctgcctactaattttatctcaaagatttacaagcttgcaaaagtaccaacttgtatccaaacttggcttgaaagtccaaaagtcctcatttttcataaaaatggcattcactcaatggacccaaagattatcttgttttatagaaggacccaaatgtatttagccatgagagcaacattttatttttttttccccttctctaaagccaatacctccaaataccttagataaacacactttttcccaagaaacaaaatggaacttgcttcggtttccagaggaattccaaataaaatctctgcaaagtttgtcaatagtcactttttgaggtaagatgaatatgctcatccaataatttctaatgcccaaaaaaaatgaatgaactaattgagctctgccagcaaaggaaaagttcttactactccatccatgaagacttttatgaatttttcaattaagccaacacaatcagtatatttccatttagtaggacatattcttccgtatttataatgtccaaaaggtgcttgttgagattagccgagatacctccaaagtagatggaagatttagtctacccttcttgaaaatgtatattctataacccttggtacctaagacatagcataggaaagtttccttaactgatctaggttccagtttgtcaatagattagtgtacatacgctgtacacccaaaggttcttaaatgcattaggactttagtgtggcaaggaaatcctctaatgcaatcatatctctgccatatttaataccaggcttgacttcttgatatgcgattgggagagatctcaacaaaatgatggcatggctttcttcatcaactttatgatatatattagtcaatcctacaataatcttattaaacatgtcaatattatcatctaaaatagagaagaaatcatcataaaatcatataacatttctaccaaactaatcttgctagcaatcgatggcttcatgtagaactcttcaagcttgtttcaaattccttgtcgtcttttcagtgacaagctttctcctcacactgttggataggtacatgatgcacatgtaataagccatcttctccatttcgactatctcgtatggttatttctcagccaataatttctcatctccaagaactttggagaccttctggtgcactaagattcctttcaaactttctctctata

SEQ ID NO: 115978 - DNA, 2929 bp, Cannabis sativa
atgaatagacatatgttttgatgtgaaacaagagtattcacatagcttatgtgacttttagattattgcttaatgcaattgtatgttgttgtatctcagagatgcagtagttgatatgaaatttaggacctttatgatctgaaaagagtttaggttaatttataatttgtcatcacatagaaggaagaagaatggttaattagtgttaacaattgtgtaatcaaagcaattgaaatcatatccctaatttcacatccattgttaaaccttttatttgtttgttttatttaatttttcttagtttatttagttcaaaatttatttattcgatttccaaatagaaataagaatttaattgattggtacttaactacagtcttcgtgggaacgatctcacttacctgagtattacttgttaaaacgatatgtatacttgcgtgttggatttatcacaacacagggggtttagtaggtcgatttgaaggggttcgatatctggaaatagcctcagatgaagattcagaaacagttggattaaaggctcataatcttcttgcatccactggcaaaggaaaagtctacagagggaatttggagtttggtagaagtgtggaaaaagtaaaaaaaaagaactattaaggccaatttatactttgagaagaaatcaagtatttttgaaatcaacggtctaattctccttccttaagtatcattagatccaacgtttggggagtcgaaagggctgaaatatttatttcccatgattttccttgagtccaccaagaaataaaggagggcctttttaaatcaccctgtcgttggctgtacctttttctgacagattcaccatagcatgtgcgtaatgaaccaacaagggcatttaatatgtcatacgatcaccatgtcagcaggcctcaacgatccatttgcctctaacagattatagctcaccaaaaagaagcgtccacgaccctaacagtcagcacatgtcaaaggtcagtcctagaggactcagggagaggttgtaaggtcctagcactcacagagtcccaaaaagtttgggggtaagtgttttgtgtgttgttaagcaggagacacatggcacaagcagaggggaagatttgttaatttcccggattaataatagtgaccaccataactcctcgcggagatgtccgttaatcctggaaagggcataatgaatgtttaatgcggagatctatcgttggcctagttagcgtctctgagatgcggaaggatcatacttatccctgaactccaagaagtccagaacgacgatttgattacttaatacccaaatagggactctctgaactgatcgtggacaactacaccaatgtaaatgcgagaggctagctcaggtttatatggaaattgacctacagaaggttacacctttttctaacacagaataagatcttgtcccctatgccaggccatggtagtgcacgtacgcacctttagacatatctttttgcctgatgggttgtctagagagtaatttataaaggagaaacctttaggaaacacgtgtccctgatccagacggtactattcaccatccttgggcactgcacaatcaagaacgttcttcaaggccgaacggtcagctctgaagttgtatttatttgcccttacaatgggctgtggtacgaaactctaagagaataaaaggaatgcccttacccacacgtgagccaataaatacttctatttttatttacaaggggtgaataaatgaatactagcttaatttctgcaaaaactcctacgagctttcttcttcttcaagagaaacaaaaaggagtgtagagctagggtttatactgtaaacacatactttattattcaaatacttgctcaaaggaccaatacaactgactcgtggactagagattattaacgcccaaatcacacaaaaatctcttgtctattctgcactattttatctatttttgaagctatatttatttagttttcagaaatctcactaaacagaatccatttagaattaggatttaaattcaaaaatatacgtatgacgctatagtgccaaagacacaacgctatagcgccatacatgatttcccgatatcacccacgtgctaaaattatcttttttttttctttggtttatctttttttcaggagcgacgctatagtgccacatgtcatttttcgtcgctcttttactgcttcgaccttgctcattaaatcatgcataactttcgcatccggactccaaatgagataacttaacatgttttcaaaaactgggaacgagttctatcattttgagtttcataagctctttgagaaaatgataatattgtcaaaaattggcttaaagatctcagtccatcacaaaattatcttttaaacacaaacctacacacttagagaaaacacatcaaactatacaaattttaagaaatcaatattaattcatttaataattaattaagaataagtcaacaaatgtgtactcatcacatgtctaaccgcatcaaaaattgccaatcaaaatacaattacccttaagaataaaatgtttgttatgcttaacatattgtagccaacatcaacgaacatgtttgtctctttcaaatgtaactcaatattggagcgatgaccagagactatcaaaaccttcaaatttattaactaatacaactagagcattttagaaatattaaaaaatatatttgcaatgaaataactatcagaattctatttacgttttttttttttaacaaatacaatgtctaattttgtttttaaatagtcgaaactaattaacagaacatagtagcctaaatgacattaacccataaacaggggcggacccacattgtagcgaggggggcagtcgtctccccgaaaaaaaaatcggaaaaaaatgtatatg

SEQ ID NO: 115979 - DNA, 2366 bp, Cannabis sativa
ttcgcaagatctttaatgttttacccaattggttttgagccaaagcatgaaattcttgaaacttttcaaatgcttcaaatttcttttgcattaggtaaagaaaatcatatctagagtaatcatgaagcaaacatgtaaaccaagcaatatatattaaacaagtaataaaataattttgtttctttattgataaataaatattcaagattacattgaaatagagttttagttggggcacaaaacccaacaataaattggattgaaatgctagtgcatgagctacattgagcatatgttggtgttttctttcgactacaacatttcgctatggtgtaccaacataagagttgtaatggaagactccttttgtggcatagaaagtagtgagatttaattctttggcattatcactgcggataactttgatatttacctaaaattgagtatgaatgaaagtgaagaaatttggtatggctaatgggacatctagttttgtttttaataactataaccaagggtgccttgaatatggttagaaagtatttgtagctttcaactgaaggaattaaatatggtcccaaaatatctatataaatgaggtcaaatattgcagcaaccatgtattagaaataaaaggtagtttcttttgctttgcaatatgacaagtaggacaattaaaaggagtgaaaatttcagagaaatataattttttattgattttattagtaacaagtacagatgaatgtccaagacgagtatgccattggagattgtctatttgaacattacaagtattgattggtaaagcatacttggggagggtatactactacatgtagtataggttcccaattcgtttatctatcctaatcttcaattttcgagaatgatcctgaatataatagtagttaaaagtgaaattcatggaatggttgttgtgttgtaagagagcatgtatagtaaaagattaaagttaatcgtggtacaaaaagaacattatgcagagtaatgtgagagtttatttgaatagtaccaatttgttcaatttgtactttagtgccattaggaagagtgacaaatttagtcattgtattatgagtaagagcagaaaaataatttttatcacaacaaacatgatgtgttgctccattgtctataatccaagagaaaagagtggtagtacttgagaaattgttcacaacaacattgtcattggatggaaggttgtaattgttgtgtcaacatagagatcaattgttgacactgagctgaggtgagttgtgaaggattaatgtcaaatatggtacttgaaacttggaatgtttgtggcatgttcttctgtggtaaactaggatcagatttacgagtggcaacatgatcagttggttttcgattgccataactaggtagaaaatatattagaaaatagcatttgtctttacaatgacctgatttttggcaattagtgtaataaggactactctttccttttaaatatgtaatgacccaagatatagaacctttcaaaaaagaaaaaaaaaaaaacaaatgcattagcagtcaacaaatttaattaagctcattaaaataaataaatacaaaggagacataaaatctaatattaaaaaaaatattgattatgcctactatataaaaatcaaatctttgatcaagaataaaagtaaataaatccttatataacataaaacaaaaacaaataattaatgcagagaaaacacaagtacaattcacaaaataaatgtgtacctgatgaaacccaggttcatgggttatcccaacgccaatctctaccacgcacgagaaaatcattttcctagcatcgcttccatacaagtgggcatacctcatcaagcaagaataaaaaaccttagccgaagaatggcttatggcgacgcctccaccaccaaacgccatgtcaaatgagtacctcacattcggttgatagctcttcgaattgctcccgacgtaaaaccatcgatcataagtcgtatttcgatagagttttgaccaaattatccacgaagaagaccgtgtcgttgaccccaaacacaaaccacctaacattcggcttgccgcgatcaatgacctccttcaccacatgagcgacctagatagtagactacaatgctcattataattctattattttattaatgatgtattacatccacatgtatatagttatataatattgttgaccaattaaattttttatactttttgtttcataaaaaaatggtctttttcatttttacacttctaacttttttttttgtatttttacggaattctatatagaaactcctatttcaactagcgcagcaatctaaatcacaacaaaaaat

SEQ ID NO: 115980 - DNA, 1526 bp, Cannabis sativa
  modified_base (46)..(53): a, c, t, g, unknown or other
aaattagacaaaagtccttaactttaacaatctcaatagttcaggnnnnnnnnttaacggccaaaaaagttcaaaaagcacgatttactacatgtcaaaattgaggagaaaaattactatttatatagttatttaatgatattttattttggagcattagagtataacagtgttattgcactacctaaagatacctcataaatgattaacgatattatataattaacaagtgtctagtcattaacttttttttatgaacaagaaaatttattacttcaaacaaacaattagtacatatatcataaaacacctatcattagaaggtgtgtatgtattctatacaagtataatcattaaaatctaattataataattcaaaacaatatttatgtctttgagtaacttgcttgcttaggcaaaacatttttgactttgccattttgtttcctaaataatcacattcagactcacaatgcttgcttatcaaatcttgttgttccttgccttccagggttgataaacattgaaaatattttctctttaaaattactcttcttggacatgtttatccatctagtgtagacaattttgagacaaagagcactcaaaaaatagaagagatgctatttcttctgcccatttgattaattatcatttctttttttatcctaataattgtgatgatatttgattaatgaaagatatggtttccttcttctaagtactccccttcatctaatttttttgatttaatttcataattttggttcctgcatgcctttcttctttaatttatttaattgtgttgtttgcctttgcaaatatcgacccgaaaaaggggaaggaagtgagcaacctaaagcttcaaaataaagaaacctgagcctaagtccaagtcttcttctccccttgattcttctattgctgagaaggtgattcactttatgtctcaagctcctactgcagaaatatttgatcacatcctgataatctgaaagtgctactgttgaatcatattttctctcttccccgagaaagacgattagaatcttatcaattacggatctccttttaatatcatatgtgattacatgtttaccgtacatgttatgaatatcatgtctgatagataacatatcagtaatgttgagcaaacaccaattcgatcactccagcaggtgtccctttcatgcaccagaacagacccaggttcaacaactgaacctctccaaggaactcgaatgcaatttagacagaattgagagagaattaaagctttattgatacttggctttattacaattggttggttaaactagatagccaataggctatttatacacacaagtaacagcaaaggcacataactaacataactgtcaaaatagttatgtcagttggtgtccaagaaacaaggaaacagtaaattgggtattagtaggcacaccaaaattaacaattctccaccttgactactaatacacattacacaaggtatttacaagtatgaatacaatgaacaaaca

SEQ ID NO: 115981 - DNA, 1502 bp, Cannabis sativa
  modified_base (1459)..(1476): a, c, t, g, unknown or other
ggtaaaataaattccaacaatatcgtatattaattttaaattaaataatttattaatgtatatatatcttttatttaaaattttaaactactactactgattttccttaataaaatattctttttctcaaaaaccttcgtttttttattaaaaaaagatatatgtacaacagaacatggtaaccctcaaaataaagctcctctccgatcgcaacttcggcgataaagagatcagcgaggtccagatcccaatcaaagaacttctggataattacaaggacggtagtggtgggaagcacatgagttaaagcgtccgcttaccaaacggaaaaaccaaaggtaatctcaacttcacctacaaatttggggaaaaattcacagctcaagctccagctcagccgacttttaaggcagtggctggtgaacctctcatggcttacccaccgggtcatgctgccggacccagtcacgggtacctagcttttgggagatacccaccagccggagcttatccataccctcctgaagctgggtacgcgcctcctcctcctcaatactgtgtctatatatgtatattttaaatatattctgaaaacacgctcttccatcaaaatctttatccaaaataagtaattgtgaaagtagtattactggccatgccaatgttttattccttcaggagctgacgaagcatattgaagggcacacaatctgagctttgggtgatgctactgcttggcctgtgcaaggtcttattaggcattttaggccggagctcgagagaacagagagggaattcctggaggctactgcttagatgtctttcaggtactagttcttcctttatctgtattcagttcctgcaaaggtttaaattaaattgatagcaatttggattctcttagttgtcatgaaagacacaatctgtttgatattttcttgtaaaaaatggtgataaaaagtcgtagtttggatgaattagaatgctaaatcagaagactatttctaacttatggttggtgttgtgtttacaaggaaaatcatttgttaaaagttcttgaattcacataaattgatatggacataatccttagttcattataatgttattcaactaattttagccatttttttcgaaagaaacgtcgatatatataaataaaaggagttagacctctcggtcattacaaaatagatagttagggatggaggaaatctttaccatacctgaaatattctgagcgaaggtccatttggttacattatgagtcgcaaaattacaatatctagaaaacaaagaaaaattacagcatagaaattgttaagagagttgattacaaatggaaatataattatctaaacaccaaaaggaatctttcccgttaagtgcgttgataaccttttgcgaatcactctcaatcagaacaaaaggatgtcttttctgttggaaattattttannnnnnnnnnnnnnnnnnaccaagtatgtttgattaacatccta

SEQ ID NO: 115982 - DNA, 1598 bp, Cannabis sativa
  modified_base (1541)..(1562): a, c, t, g, unknown or other
attcaacaagtgatttcaaagtttgaaagtctaaaagcattaagttttggctgttggaacttaaagagttgagaaaatctaaggcaatatatcaagtggcctagcaaataaacaatagcagaaaaagtaaagaaaaaacaagcatatggaaaataaagtaaacatacataaatcaaagcagcagtctactaatctattacacaaagtctcgcagttaaggcatagttaaattgtctccacagatactcgtttaaagtaataaagaagaagaaaacctataagatgaaagttactctttggtctggtcttgggattgatcttgagcttgctctaaagggatttcctaaatttgatcattagattggtcctggagctaaacttgaggtgcatcttgggttgaaactgaaagatcatctccttagtagggtcttggaggttctaaataacattccctaaagaaaccaccacttcaggagaatgtttagtttccaagtctttagttaatttatcaccagcctcctcaccatcgtcatgggggatatactttttaagataagtatcattgtcaattacgagcaccctttaggtgtattcttcctcatcctcctcaagattcttgagggtagaagggtctttctgcagaagagtgtgaaggagcaatgagtaggacatttccatggattgaagcttgaacctctcagctttttcctctacctcaatagcatcctagttgaatttcacggcagtctctcgagccctttgcatgactagcaatgcgataaaagctttcataccgttagtaggatggtggccagctttcttctgtgactccactatggtatccttgcgagcattactagttacatggataccctgtaggagaatatcttattgattatacttgattgataatgaatctttctctttttcaagtcctcgatcttctacttcaggttgttagcttttcccaacataccttgcataaccacctctttctcatggaccttattttgcaaattattgacctctcgaagtgtagtctgtagagcatcaccttgaagcatcagtcgagcctccttactgactttctcctctatcactttgagaagtttgcttttaagagataagaccttagattttagatggtccaactatgccttgttatccggattagccttggcctcgtgttcttggtacaatttccagtacagagcactgtcctcgttgtccgtgtgcttaacttcaaccttgcaatcggttttgacctactttacctgttcttctatctccttcatacttggctcaccttaaaagtaatctgggatttagctttctcaagattggagagtaaagccctgtcatctatgtgtaaagcttggctccttgcattggtgtgcttaagttctacagttcagtcccccacttcttttgtatatctctctaccatcaatgccatctgctgcaacaacacagcatgagaaaatcttatgcaacaataaagacaaaggtgaagcaattgagactgttgggttttgtgcccnnnnnnnnnnnnnnnnnnnnnnaatcagatttactaataaagattagaaataacattt

SEQ ID NO: 115983 - DNA, 2233 bp, Cannabis sativa
  modified_base (2185)..(2186): a, c, t, g, unknown or other
aaaaaaaaaaaaaaaagaacttatagtaaaatggtccaataaccaaattaaacttttcttgatattccatatgacctttaaccttgatactcttaactagttcaaagcaaaataataaagtgtcatcaatgcaagaaacatgtctccttgttgatttttcaattgatttgctagttagttgtatcaacttgtatttatttatttatttatgttagtagcagcaagtaattgttagaaactgattccattttaaatttaagaagatagatattttggatgtgaatattgaatttttaatattgtatttttcgttacgttacaacatgatttgaatattgagatattaagttttcttttctttgtgtgtgtgtgtgtatttctatagtttagtatacttgtcttaatttgataataagcttattattagttgatcattgtggtagaaataattaagaaaatcatgttgtgggcacttgctgattctatgtttcagtttaaatttgccaaaagaaataattaagaaaatcattttgcttgtcgaacacatagaaatatcgaaatggcaacctatgcagctgaaagagtgaaagagtttgcttctcaaaagagtggaattcatgtactttttccaaacatatatgcatttgtggagaaagtgaggccgcattagaaggagaaagagatcaccaaagtgtccggtacaaggctaatagaagttaatggaactattcatgagttcatctctactgatgatagtcaaccaaagcaaagtcaaatttcacatatgctcgaagaataaatttcaggcctagagatgctggccatgaacctgatttggctaatgtcctgctttagaagaaacatttttactttgtaaattgttggctccattagtaaattccattgttgggtctgatatagcatatttgatttctcacagtgaaattttgcatcattttctggtgttcccttatttgattaagactttttttcttctaaatttgatagcaaaagaaaatgattatatccaaaacaaaattaatacaacaacaaagaaagggctttttacaaacagttggccatcttttaaagttcatataccatttgtcttagaaattttatcataaaacagtgttgttgatattcatatacacaaataaaataaatttacggctttgcaacacttactgatcaattcatagaatacttaactatataggtagaccaagaaaaaactcaaaaataataaccaataattgatgatgataaataacatagaggccaacaaagcatctgtatagagagaattacctacctagctggttcttaaaatgctctaatttaccatagtatatatgttgtaaagtgtattacatgtagtttacatttagtttatttggtgttagaacttgaattaggtcttttatgtagatgaggagttaacaagcaatctggaaagtttggtcaaagatgatgttcagttggatagaagtttcttcctagtttcatcacaagattcatcgactaaattgtaaaacccaagattctttttgacatatgtataatgtgaggacaatatactttatttagaccatgtatttggagcagttgggaaggacttaagctagagctatagttattacctgaaatgctcttctgtaagaacttatgataaaagagtgcaataactaaattaagcttttcttgatacagcatatgatctttaacattgatactcttaacgagttcaatgcaaaataataaagtgacattaatgcaagaaacgtgtctccttacttgttgattttgtcttgtatcaaactctataaatataagtttctctcaagacttaaattaagttttacaaagtctttagaagtttttttttttaaattgtgtcctgttaagactttgtatagataagttctcattctcatgcagtaaatgaccttcacaataaatgaccttcacagttgtattggcttgctggttcgtaggcgcacagtttcaaagttcactagtgtattttgcgaccatattcaacgtcccacaacctcaatcttgaatcaagaccagaggtaaaatcaaaatttcatgtcaattcaatgtagttgctccaataaccagtagcggatttaagatttaaaaaaaaaaataagaaagatgcaatactaaattaccatanntgagtgaaccagtgcagtatatagaacataattatcgaattgaagtg

SEQ ID NO: 115984 - DNA, 4089 bp, Cannabis sativa
gtaacgtgtcatcatagactgcacatagcacttggcaagcataacgaggctgaaatcatgtaggaggcggaatcccagaccgccttcatgcttaggctgagagagtcggctccaattcatccaaatgatgtcgttacctatactacttgtggtcttccaccaaaaacgtgccattaatttttcaatttcatcgcaagtacccaatgggagaaggaacacactcatggcataagtgggaagagattggatgaccgtttttaatagaattttttcattagcaccacataataatttactagtccaactatttattctgttaatcactttgttcatcaagaagccaaggatagatttttttatttcttccaatgatatttggcaaacccaagtaaaggctgctctcggaggcgtcattcataccaagtattgagcttagttggtcccgaagactttgttgaacatttgaactgaagaagatggaagactttgtaagatttacttgttgcctagaggcagtttcaaagcggcaaagaagagacataacactgcccgttgcaccagtattgtttggcaaaagagatagctgttatcagcaaacatcatatgagtgatggtgggagcaccgttagcaacatggcagccttgcaacaatctttcctgttcgaacttggaaatgagagcagagaacccttcagcacagataataaacaagtatgtggacaagggatcaccctgtcttataccatgggtaggaaggataggtcccatgacatggccaccatggataatagaataatgaacactggtcacacaagtcattattagattaacccatcgaggactaaaccccgtttgaagcataaccccccttaagtagccccactcgactcgatcataagccttgctcatatcaagtttaagatccatatagcctttcttaccatgaactttgcgtttcagatagtgtataacttcaaaagtgatcatgatattatcagaaattaggcaaccaggaataaaagcactctgagtgggagagattacctgatcaatcagaggtttcattctgttggcaagcacttttgcagcaattttataaacaacgttgcacaaagctatggggcggagatcacccattgtgataggagtctttttcttaggaatgagaaccaagttggtatcattgaggcttgctggaaaagagcctgaagcaaaaaaatctttcacaagtgaaataatgtctggacctacaatgtgccagtgtttttgaaaaaaactaggtcccattccgtcaggccccggaggtttatcggggtgcatttgaaacaaagcaagccgaacctcatcatcaccaatcggctgcaatagctcaatattgtgtgtatcagtgatagagcaccttatacctgctgtaacttgatcaaaattagtattcccagcagtaaaaatgtcatgaaaatactcaacaataacatctttcaacccgttgtcccaagtagtccataaaccagcaacattttgcaactgttggatgttattggttcgttttcgtgagctagccatggcatgaaaaaaatttggaatttttgtcaccattatgaagccaaaattgctttgacctttgcttctaataaagttcttgttgagcaaggatctcaaaataattattttgctcttgacaaaaatcatgtacaaaattagagtcggttttaccttttatagcagaaagtttggtcttgctttttttgattttttgcttaaagttgcaggtaatattcctccctcaatcggctaacaaggtgctgcaatactttatcttgtcttgaagcgaagcatgtcaaaattcctcccaacaagactgaacaatttagctgcaaaggggctcgagtgtccaagcattttcgaaatgaaaatgatacacagtgctggttgtgacagtcggttctagctgaaggaaaatgggcatatggtatgatgaagaaacatcacaattggttaaacttgcttgtgggaaggattcaaatcaaagttgagtcacaagagccttatcgagcctgatttcaacctagttagccgtgcctttatctctttcccaagtgtaaggatggccatgaagcttcaaatcaattaaattacaactgccaagaacattttggaagccattgatgagggaagatggataaggtctgccccctctcttttcggattggtcccaatattattgagatcaccaatgatacaccatggaaggtcagaagtagcaggaagagtttctatgagttgccaagttttgaatcgaagacttcggtttggttcaccgtataaactagtgagacgccaagggataaggttagaagatcggacaacaacatcaatatgatttctcgaataacccaagaagtgaacatcatcattgaatctccaaagaagagcaagcccccctttatgtccttgagcttcaacgcagtgagctccttaaaagccaagcttatttttaatccataccacaatgtcatttttgcaaaaagtttcacacaaaaaaataaaattgggcttcttttgaacaacaatgttctcaaggaattgacaagcccgtgggttcccaagctcacgccaattccatctaagtgtgctcatgatgattggtgggcctggacaccagagcccaccgtagacatgttttttgaatcaagagtagtctggccggtggtagcaacttgggcccctttagcagtatcagatgcaaatctcttcctctttaattctgattgagccaactcatcatcatcttcttgttgattctcataaacaacaactcccttattttttctatgtgattgagaaatatcaggggggactattccatgaatgcaacatgattggaattgacattattgtatcttgaattgctagcgttcacactagaaaagagttgtcaccagctttacccgatcagagatatggtgattcggcaaagttttggtggcgacgtggagctgctttcatgcctaggccatatggtttaatgatgagatgttcaggagtatcaaacagtcaaggacagaaccttttcgagtgccccataattccgtaaataaagcaaaaagttgggatatttttatgtcggaaagtggcgtaaaaagaaccgccatcgcacttccttaatttcgttcttcttttcaaagggagatcaagggataatgtaacacgtacccgcaagactttatgccatacgcctataaaattgttaggagcagagtcgataacttttctcacataattaccggcatctttggcaacttttatagtcaaaaaaacctgattgtaagtcattaatctgaactcatagatcgagagtgttgagttgcacgaccctaggattgtcaccttcgttgagacgggcgattatgagttgtttacgatcataagtccacggactgtctttgataacacgctaaatgtctatctcatgatagaattggaacaaaaagcgattttgatcgagttgtttggcgtacatgcctttcccgtgtttccacaagtctgccatgatgttttggaatatgcaaaaatcagagattttccctgttaatagacgcccaactagacaccatttgctgtcattatgcaggtcatcttttgcctctgcatcctcatagaacgtttcctctatttctttctcttcaagttgtatgtctttccagccatcctctatttcttgcattcgtgcactgcttgaagccattggacaaaaaggacctacgcgtgtatgagaacaggaacaggacaagaaaagcacaaaaaacacacaagaacaaacagccacaatcactcacaaaaggaggaacacgacatcacactttaaaaagagaccttttttttggattttttactataataaactaacattagagtacattttttgttaaatgagctacattttaacttttcaccacttatttatacttctatttagagatgctcttaacaattgaagctagctcaaggccctcaagtggcaacagtgacgaagcgaaatttagctgagtgaggacttgaataaatattaagtcaaaactaataaaaata

SEQ ID NO: 115985 - DNA, 2677 bp, Cannabis sativa
  modified_base (1755)..(1761): a, c, t, g, unknown or other
  modified_base (1806)..(1827): a, c, t, g, unknown or other
atattctaattgtatcaagatacaatcgaattcaataaggaaaaggcaataatcaaaatttcatttaaaaaccaactttccataagagaattgcttctcttacaagaagtttcaaaacaaagaaaggttcagctgaaaagggcatctttcctaacatagaaaagagtaataaaaaccgtatatacaagttaagacaatcgggtatgaatgcaaaaatatcttaccatagaagagaaaatattttgtcatctaacttgccaaaaaaggactttacaatgtgcaaggaggattataaggaggttgttcttaaggtgtggaatggtgtgaaagtaactgatctaaagagccttatttagtagctatttagagttaagcatgtcttaaaaaatgttttgtttctaagaaaaaaagatattaagagtcaatacagtgcgacaaaggatgagtataacagagctcaagaatttcttacaaataacccttcatgctttgctccaatccaaaatgaaaacgttctacaaattaagttcttggcgaccaaaaaatagtatgctatttacttacagcagaattcaaaaaatttcttggttgaggtttggggatgaaaacacaagttatttccatgctattattaaaaagagcaaactgataatagaatttcatcttactatatgaatgatgttattgttgatgattacgctaaaatggttgaacactttctcctccattttcaaaactttattgggaagaagagttcaactactaggagaattgaggttgattgtttggagaatggaagtaaaatgaatatagttcagcaggtccaattaactcagccttttaacgaggaagatttgaaaaaagctttatttgatattcactcttcaaagagcccgagtccatatgggtttggtgctggtttctttaaggacctttgggatgatattggggaggacttatctcaagctatttcggggttttttaaaatcgggattcttcgaacaagacaactatttctcttatccccaagactgataatcctcggaatgcaaatgactataggccgattgcatgttgcaacatgatgtacaaatgtatttcaaagatgattttgtgctagattatcaaaagttctccctagtttgattcatgacaaccagggtgctttcgtcaagaatagacatttcgcccataacatcttaaatttttaagatttgctcaaaggctactctcgcaagaacatctcttcaagatgtatgtggaaaattaatttaagcaaggcatacgatatggttcatcagatctttgtctcgaatcttttacagggcctctgctctccctccaaatttattactgggatcttgagttgcctccatggtgcatcatattccctttggatgaatgggtgacttcaaggctcttttaaaggtgagaaaggcattcgccaaggggacccaatgtctcctctcttatttgtgttgatcatggagtacttgactagactgctgatccaaagatcataggtgaagggcttcagttttcacccattttgtaagtccccaaatcttgtgaatctttattttgcggatgatttgataattttttgtaaaggtaatgagaacttggttagacttatacatgagaccttcaaaggttttaatgactctacagctctaatggctaacaaaaccaaatccttggtccattttggtggattcaatattttagtgacaatataaattttttgtgattaannnnnnnttttagtcacaacaaaaagtaacttgtgactaaaatatagtattnnnnnnnnnnnnnnnnnnnnnntagttttagtcacaacaagtattgttaaaaagagtgagattattgttaaaaaaactagcttggatgtatttgagtgagataaataaaaagaaaaaaagatagatagatagatgttcacaaaaaaagaagaaagaaaaaaaaaagaattcaagccatctttgaagattatttttccaatttgtttaccttggattgacccactgttgatgctttgataaagttattaatttagttcctagaaatattttgaggacatgaatgctcatttgattcaagaattttgtggggaagatattagagaagctttgtttcagatggacccctcttaaagtctgggagaggatggtttcacggctggtttttatcaaaaaaattagagtacggttgggcctgacattattttgatcgctcttgattttctcaatggagtctctagtttgaaaggtatcaataaaacccttatttatttgattcctaaaattgacaactttattagggttgttgactttgttcctattagtctttgtaatgtcttttacaagattattactaagactctgactaatcacatgcatgaggtgttgggtcacatcatttcggatgagcaaagtacctttctcccaggttgtcttataaccgacaatgctcttattagtttcaaatgtatcaatgctttgaataaaaaaaaaatagaggtgatggtttctgtgctcttaaacttgatagtccaaagcttatgatcgttgaataagtatcctttgataaggacagatgttacgttgaataattttaggggaggatcaacttctctaggtttggtcttcgatctggttattaccagttgaagact

SEQ ID NO: 115986 - DNA, 1224 bp, Cannabis sativa
tgtcttaatatattgaatgatggagctgatctcaattgcttgaatgagactattattgcattaattcctaaagtggagagaccttcgattgtagctgagtaccgtccgattagtttatgtaatgtcatttataaggtggtttctaagtgtttggctaatcggatgagagggacgttagatgaagtcatttcggagacgcaaagtgcttttgtgaaagggcgtcttattcatgacaatgcaattataggttatgagagtctccactgtatgaggaagaatcaatttcagaatgggaagaagttagctttaaagttggatatggcgaaagcttatgatagggttgagtggagctttattcagaagatgatgctacggttgggatatcacacggagtgggttgacaagattatgggttgtgtgacctcggtctccttttcgtttcttgttaatggagagataaaagggaaagtaaatctacaaaggggtataagacaaggggatcctttatcccctttcttgtttctcttttgtgctgaagcattttcaagtttgatacaacatgaggagttagcggggggacttcaggggattcagtttggaaggaggggtcttgcggtgtctcatttgttctttgcggatgatagcatggtgttttttgatgatactatggaggagtgccaaagatttactggattgcttgatagatattcggtagcctcggatcaggtggtcaattttaataagtcggaggtgtgttttggcaagttaattccagcagaggtgtcaagtgagttggctgagtttttgggtgttagaatagtggataatcatgggaagtaccttgggttaccatcttttgtgggaaggaacaagagtcaattgtttgatgtcattaagaatagagtttggaacaagttgcgaggttggaagagtagtatgttctccatgggtggaaaggaggtgttgattaaggcaattgttcaggctattcccacttacacaatgagttgttatcgtcttcctaagagcactctcaatagtatacataaaatggcagctagattttggtggggttcaaccgaaaaacagaggaaaacacattggtgtaaatggaagcatttatgtaaaccaaaggaggaaggtgggctggggtttcgagatctagaacttttcaaccaggcacttttggctaagcaaatttggcgttgtctccggcagccattg

SEQ ID NO: 115987 - DNA, 1600 bp, Cannabis sativa
  modified_base (1538)..(1547): a, c, t, g, unknown or other
attcatgtaatatggaacttccaaccatgggtcctgattattcaccaccacctaccgaggagcttgaaggtttgtgccgaccacgtattcgagtagcccttgatgaccctgtaaaattcattatcaagttgttaggcgagcttaacgagtatgagatcaaccaacttgcatttgaaagaagccaaagggatgttgaaatagagcgtcttcgcaagtataaccaagactgtgagaaaggcataagagagtgatgaaggaggaggaatgtcaaactgtgtttgaacgtttccaacacgggttaggaatgatgaaggaggagtgtatcaacagctacaacaactacattgacctccgtattgcacaacttctcccctctgctcccaaggattctgatttcacactaggcagtgtctgaagtacttgttgttcatctactcataacttctgattcaccatagtgctaaatattcagtgttaacaatctaaaccttgataattatggtttcttatgtaatcagctaaaaagagtatgctttcgttattcaaactgatttttaattttgagccccaagttattatgaaggcagtataaattttattcattttgctttcagcgataataatttacatttagagtcttaaggcttgaaataatgtgatataggaattatgttattctatacggcttttcaatttttttcgtaaataaatattgttaaatttatcactacaggaaaaagagctaagagcaaatggccaacgagcctttttgaagcagtagaccaaaacactatagcaataatttagaacaacacgggaagaaagcgagaataacaccaacaaagatttgaacaatcaacatagatgagcttagttttccactccatatagtctaaaagcagtccttattcaactatttcaatgaggcaacacaactatttgacatcaatttcatacaactttcccaagcaacggactatggagcaaaaaatttcatactccataatgatttcccaatgttttgagtcaaaaatacacagaaaaaatgtaaagaggagtccacatcagttgtatgtttgctattgagggtttcgatagcttagcacaatcactttgaataatcacgttcatttggaaatgttttttgatattctacttggaaatgaaattcaattgctgtaaccatgggacatcatatgtataggttttgcccaagacatcatatgaactacttcttttgaatgcactcaaacccatcatgagatacttaaaagacatcgaagcccaattaattcctcgcacattggccaaatccttcaatgctaatatttgagcctcataatccctactcgcataaactgttgtgttaggcatcaagaacacactcacaatagaaagtaagaattgatggtaaaaccccatatcagtcttactgttgcatttcaacttctcttccaagtgagtgattaatatccgccccacattacaattatcagatttagaatccaagaagtgttttgttggaattattttaccannnnnnnnnntctactcacaagtatgctgatttaacaaccaaaatatgaacttctaaaacgat

SEQ ID NO: 115988 - DNA, 3280 bp, Cannabis sativa
  modified_base (286)..(289): a, c, t, g, unknown or other
  modified_base (371)..(376): a, c, t, g, unknown or other
  modified_base (865)..(873): a, c, t, g, unknown or other
aaaaagacttaatatgagatattttgacatataatttagaaaattatcatttgtttattattttattcttaaaataataattgcataaccaaatctattttttttttaatagataaccatatctattttaaaagttcatttgattattttaatttgggcaaataccattttggaccttgtgttttgcaaagtttatcaatttgaccatttattttgttaaatgataaaatggaccttatatgttctaaaatggtacaaatatgaccctgaactgattttttgtcannnnaaaatttaataataatctgatctaaaggtgttatgacataactgtttacattttgtatatttgttcgtgttaggaattgtcnnnnnnttggttatattaaaaaaagttgtcaaaaattaagttcagggtcctagttttactattttgggaaatacatgatccattttgtcatttaacaaaacagatggtctaattggtaacttttgcaaaacatagggttcaaaatggtatttacccttttaattttattaaattataaaatcaaaaatggatatgaaaaatatctagttggttattttcatatcatttatcttattagatatttaatttaatatgataaaataatttaaatgaaacctatatattttaaaattagtttgaattttaaattataaaaggttgtttccataaccttaaattttcaaaatagttggttatttgaagaataatttaattatataataaataagtatctcactttacaatttgttacatgtattgtttgtttatttaaaactttttttttaacaaatctattatttatttgatttaagttgatatgattaacttgttgannnnnnnnntaatctgattttaatcatagtccaattatcagtagatcaaatgaacaatttgaaacatgtaaattttatttctttcatatgtgataaacctggtaacatgaaagggtccatatgtatgagcctatatgtttgcttttgggcttagatggatataggaagctcattaattgctagatgtttaaatagactaggttgctaaaaataaaatatcgtcgttgatagttttatttaggcccaattaatattgagcttattcaattaataacaattattgaggggtcgaaagagagagggggcttggagagatagggttgaattctttactttttttaattttagataaatgagataatctatgtattatctaatagcctatgataaaatcagattatattaacttaaggttaattcactaaaggacaaaagcaaatctatggcaaaagaccattttgcccttgcttacaccaaaaagtaacattgccatctaagggtattttaatcaaatctaatacctcaaatattcttgacataccaaatgtctctctaatttgccccgctactactaaaatactaaatcatatgaaaatgtggctctattggccaaacgttgcgttccactgttaccagacataaaataaaaaaacatgaaattctatatataacataaataacacacctagaattcaaataaatctccataatttcataaatcataattaaaagtctaattccaaagtaaaccctaattatctactaatttttatattaaaattaaccatcagtaggcaaggtcaaacaaagagaaccctaacactataaatataagaaaattcattcatgcaacgagttagaatctcaatcatggagtgctcaggaaaattctagggttcaaatatttgtgtaaatagtaaggcttttctagtcttatcataataatattgacttgtggactaaacgtcgttaacgccccaactacattaaaactctgatcttatttctttgtcatttatctatttctttagcttttacatattttatattggtttccaaaaaatctcagtaaatattttggtgcttttattaagaactaaagaaagcaatgaaaggttgtgtactacaaccatggtactcacccgaactaaaactggaagtggcaatggagacactcccatggacgatgtagatcctaccgcttaggtgaagacaggagtcgatggagacccatcagaagcaaatagttgtcctactataaagactcaacgtaaggagaaatatgttgatgagaatcccatcattaaagaaggtgagtcaaatgaagatgacggtactgagagtgacgatcctgaagatgatgggaaaaataaagaagaagaatattattgtgagccagacctcgaagttgctaaaatggccaaagaactcactaaaactaagcaaaaattagtagattaagaagcattctctcgctgcatgcaagaaaccttaaacagactagacgctagacttgagctagaaaatgtggttctcgatgaaaatattcttgatgatcttgttcctcgggaaaataatacaacaaaaatgaccgaccttaaagatcatggaacttttgatcccactagggacaaaggaaaaggtgtcatgagggaacctctaaaaaagtctgctccaactgctctgtaggatcacacgaatgctgccagccaacctctgcagaaaaagaaggtagtcaatgctccaaagcaaggctatcctactcatccgtgaggtagagttgtgcaaaatgataggcctagtgctcaggcacaaaagcctaccattcggggaagcaaaaactgccccaataattatgttgaccggagcgatgatgaaatagaggaaattcacccagtttcagacgatagtttctcaacaaatgaccttcaggaacttttaaatgcgaagagagaaagagctaaaggagagaaggcaatgcctcgtgataacgatcttagaaatcacactaatgaatgagttcacgaatgtgaatcccaagatgccacaactaaatgtttggaagatcaaattgttgaattaactaagttcgtagaatgtctcgcctgaaagtaaagtggggtcatatttaatttgaaagaagaatatctgaaaccatgtgtgaaaaggataatagaagcacccttgtcgaaacatttcagaatgcctcagatggaattatatgaagactggtgccaaatgtctctcttattccttaactttggcaaaatctattgaagagtgataaaaagattatctcccgaatctgtttgtagctggtaggtgttggaatattttaccaggatctagatttactaacaagtatgttgaactaacatcctaaatatgaattctctaaaacaataaaataaacaca

SEQ ID NO: 115989 - DNA, 4746 bp, Cannabis sativa
  modified_base (32)..(63): a, c, t, g, unknown or other
  modified_base (4710)..(4720): a, c, t, g, unknown or other
tttagaaagttcttatttaggatgttaataannnnnnnnnnnnnnnnnnnnnnnnnnnnnnnnaaataatttccaacacaaggtacctctcatgcagccggtgcacaagtggaaaatgattaaaaaggtgtagctactaataaaagccaagattggaacaccattgcttagactcaagatgagaacaccgagaacgttgcagaaggtcatggtgatggcaaaaatacttaggattatgaaaaggacaatgacaattactactataaagattgatattataaagatggttgctattatgagaatgaccctagtgtggtgtgagtaattgcagagttagaggctacacaggcagccctaaatgagcatcaaaggcttattgctcaaatgaaaaaaaccatggagcagcttcagagcaagtttgatggtttggctaggactgatggaaagccatctgtagatgcggtgactgaggggcaagcccgtgagcaaactaatgctgaaacttcaaaccctcacatggacaaaggtaacggccaagtaggtgaacctccacaaaagactgctcctaaacctcatcaaaaagatacacctctggttggacaaccctcgaggacgcaaaaggccactggcgctttttagcttagacacccttctaaccatcgagatagggttgcaccaaaaggaccaaccgcaaaagtccctacgcctagaagacgtgtagatccttctattcaaccaattaatatgggacgattgttgtcagccattctagagacagttggtctacggtagatctgcggtggcggttggatacaaaatacgagaggtacaagagcaaaaaggcgaggccacatggggtgacctaagaaatcatctaagtgatatgatgaggggacgtgatctcccggaaaaagttataccaagaggttggaagaacaaattgctaccttgacttagttggtaagaaagaaaagtggagcattgtcagattcagaggatgaggacccagaaccctgtgttaggagaatcacagagactccactccctgaaaaactttaagatgccccacattgaattgtatgaggggagaattgatccgtgagcacatcaggcgaaatacaacaagatgatgcaagtggcatgcgttagcgatgatgctaaatgtttatgtttttctctaactctaaccaagtctgtagaagactgatggaagcagttggatccaggatcgatcgatagctggatggatttacagtcggcattcggcaagcaatttattgccacacgtgagaaggacatggaagtcggtaccttaaccaatgtcaagcaacaacctaatgaaagtctgaaggctttcattcaaagaatgatggaggcgactgccaaaataagggttagtgacaatctaaagctgatggccctccaatgaggactagctatttattccttgttgtggggacaaatgtagagaaagagaggcgagaccctaagtgaattcatggcaaaggcccaaggtatagttaaccttgaggatgcctatagtcaagcctttagagtccctcttccatcaacgcgtactatagctgctccaagttttgcatcccaaactcctgccccatctttgtcccttccaagacctcagtactctctgactgtctacggacctactgcatccggccttgttcctacacaaacccatttttccaggtacggggcgacacagactgggtgcaaccttgctcccagaaaatccaagtttgagatgccaaattctagtgcaagacatttgtggggtaacaggggaagtaagaatcacagtcgtaatgatttagtgaagaaacaaagaaaggagtacgatccaaagtacaccgagtacacaagtctgatagatacttgggagaatgtttacaaggtgacgtgtaacatggtccattattggaagcccccatgcttgtcaaatggcaggaggaacaggcaagaccaaaacaaacaacacgaataccatggagagaagggccacacaacaaattaatatgaatatttgaaagatgagattgaaatgttggttcaagtagggcatctgaggtagtgggtctgcattctaattattcatcccaaatagagagtagttttggggcacatgatgcttcacagacaatagggtgccgtaaattccccaggagggggttgggcgccctcaagttcctgaaacatcattacttgctcttcctactctaccagctctagctggggtggctttgcttgctctaggatgaggaactctatatcctactagaattgctccgcctcttgtagacaggcaagtcacaacaattttaggtggaccccaccttgctggaagtacccataatacatagaagagatatctaaagggtgtagaggagggagaaatgtgtgtgctggtacagtctcctgcacaacgtccaaggatgatgaacctcctaattaccttcactgaggaagatgctaagaatgtgaatttccctcacaataatactttagtaattgatgcacaaatcgccaacaaccaagtttccacaattggacgacaacgaaagttcagttaacattttgtttagttcgcattccaagcgattagacttactaaagaagatttaatcccatgtcctatccagttacaaggtttcaacggtgacgttctgatgcccatgggtgaaattaaattgccaatcaacctcaagggagataaaaaagcaagtacgttcaaacattcaactcatggtaggtgattgtcccacagcctataatgccatactaggttgaccgactctagtggactttagtgtcgtgactgccaattgacacttgtctatgaagttcccatgcaacaatgggtgcattaacaccattaaaggtgatcagcggagcgcaaggaattgctataatgtgtctacatgacctgtattcatggttaggaaggaagcgcacgtggaactcgaaatggaagatcagatggacacagaggctgtttgggaagactgtgaggatgagttagatcctagagtcagaattgaaagaaatttagaactactggaagatatagaggaagtgagtatcagcgaggatgatcccacccgaacaattagggtgaaaaagagtctccctctagtcgttagagagaatattattaacacagttagagaaaatcaggacgtactggcttggagtcattccaacatgaccgggattgatcagaacactatttttcatgctttaaatatccttgaggatgcgatcctagtttgttaaaaaagaagacctttggatcctgtaagagccgatgcagtaaaggcaaaagttgaaaagttgactaccaatgatttccttcgggaatcattgtacctggttttgtggaaaatccgatgttggtcccaaagcccaatggcacatggaggatgtgcatagactttacggacctaaacaaggtctgcttgaaagattgtttccctttctcccagatcgattagagtgtaggtgccacatttttgtacaaattgctcacctttatggatcccctactctaggtataatcagatcaaaatgcacaccaccgatgaggagcacaccagttttcaaactgacaaaggcatctattgcaacaaggtaataccattcaaactcaaaaatgtaggaccaacatatcagcaaatggttaatcgaatgttcaaagtggaaaggaacatggtagtatatgtggatgacatgctggtgaagttcaaaacctctgaagagtatggtcgtgacctagaaaaggcctattcagtgataaagaagtatgagatgaagttgaatcctaaaaaatgcactttcagggtctcttttgggaagttcctaagatatattgtcagtttctagggaatcgaggctaacaaaaagaaaatgaaggccttcatcgacatgccctctcctaagaagaataaggatgtccagagtgtgacagggcccattactgctcttagtcggttcatttcaaaatcttttggaaagtgtatcccattttttaatgtgttgcgaggcaacaaaaagtttgtgtggactgaagaatgtgaggacaatttttagaagctggaagagtatctaactaaggctcctattttatcaaaacctgtggagggggaggattttttcttgtacttggcagtgtcagatcatgctatcagcgccacactcatgcgagaagaagataaagtcagtatccagtgtattatgtgagcaaaagattgctgggcgcagagtctagatatcccatgattgagaagctgagcttttgcttaatgattgcatcatgcaagctgagaccgtacttcgaagctcacgccataagagtactcatgaatcatcccctacgcctggtgcttcaaaagctagagtcatctggcaagttattaaagtgggctatggagcttagccagttcaacatccactactagccacaagtgtcgataaaagcataggtcatcactgactttgtggtagaatcacaagcttcaatgtccttctagaagagccagttcccgagttacttacttggcgatctatgttgacggcgcgtccaacgagaaaggggtcggagctagggtaattttaatcttcccacaagggcactaacttcaaagtgctctgcgctttggattttgcacctcaaataaatccttgatcttgattgtnnnnnnnnnnntagttttactgttgtagtaaataatg

SEQ ID NO: 115990 - DNA, 1410 bp, Cannabis sativa
tttagcgtcgccctgatcagcgtcggtagcgaattttgcgaaaaccgacgctgaaagggcttaaaaaccgcctctaaagggggtttttgtagtagtgtctaggttgttttttaacttgagtgtactccaatattcaagttcgtaaaagatgcttttttttcagttactttcactcatacttctttttcgataaattttcatgtctttttgggatctgaggttgtagagcatttacttgttctaaaatcttcttgcacctaaactttcttagggcacgtctattgaggtgcctttaggttgtacaaagatggtttagagcgcaatacaaataactgattcataaaaaaaaaaaatcttcttgaacctaaactttcttcgggcacgtctttcctcaactttaccatcaaagtcgaagtcccgcctcatgtcatgattatgtggcaagaatcatctatgaccaacataatatgtattcctaataacgcggatggaagatgtatctttattgcacacaggataagctttatacccctgaccactccatccagacaaactattacaagcaaggaaatcgttcactgtccacagaagggtagttctcatgttgaacatagtattcgtattgacatctcttgtttgaatcccattactccacaactctttcaacaagtctaccaatagtctaaatacatcaatattcttacctagtgatcttggcggagtaagaatactcaacttgaaattattattttccatacaaaactatatagggaaattatagtttgtcaacacaacaggccacatgttgtacaattgaaacaaattaattgggcttgttattaatgttaaaataatttcaatttatttatttgtattggttgcaatgatttattttatgtaccttcatgctatttctctttacttcaatgttaaaatacgtatatcattattcttttattaaggttattgtattttaagatcattcatattaaatttctattttaatattttaaatacactacaaagtttttatttttttctattaacatgaatgataaatattacagaaactttaaaatttctccatatataaataaaataagaagtcagtgaaaagtactataacaataaatcatttccaaatcctaaaatttagctagcaaatgagccaataaaactaatcaatgaaatgttatttatctatttatatcaaagtcacaaacctcttattaattacaattctatcaacaactttacaatagacgctaagtacaaacatatttttctccattcttaaaacaaaataatagtgctttaatgtatgcatttcataataataataataacaacaacaacaacaataataataataatcataatatgcaaaacgaaatttctggggaggtaagt

SEQ ID NO: 115991 - DNA, 2997 bp, Cannabis sativa
cattgaatagtcacccataaattaatatataatcttaattttttatcttttaataattttaattatagaattataatattcagtattatatttaagttttataattatcattttaacttgataaattcatatcttaataataaaggctcatcctccatcaccatcttcttctgaatttgagcccgaagaagaagaatctgagtccgaaactgatgagtctgatgaatcttttcttgctcctgcagatcctgaatcagaatctggtgaaacggagtctgaagatattactgcccctggtccagaaacagtgtctgcccctgcaccagtcacttcaccattgtcctcaaagggtaaaggcaagaaactagtcactgatcctatttcttcttggaggatgaaaagtgtacactttaaaactcattctcttttattttgctacaatgataacgcttttttgctgaaaacctgtttacgcaacatgtaggctgactacactatttcaacatacacaaaaatggagttttgtaactcctctcgacctctattcaatttctaacatttccaactcaatttaatcacttaattaaacgagtattgtaacatcatctaacaattatatgataatatctttggatatcataacgtatttactcactctattatacttgaaattaatgtgattaaccaaaaaagttacaaatgagttagagttactaatttgtaactccacttccatgttacaatctttggtattaaataaattataagttatctaatttatttacgaaacaccttaatctatatttgttacattttaatattttttatataattaaataataaaactagaagaactattatcaaggaaaaagaggaaaagagagaaaaatattcgacgaaatattggacacttgatattctgagtagtattcatcttatcaacactttaagtcattgtcaaccttgtaaaccctgctggatattaaagttataaagaaagaacaaaaagcatgttgggaccatttttacataattattttatcaactgtcattattctaccaagtaaaatctctatcatcatttaaatttgtattcgttggcttatattaattagttgctacagttttaaagtacatataaacttgatagtaaaaacattataatgtaatgttatgtattgctcgttatatcttataaaagcatatatatagctcggacgggagagtacactactactagttcccatatttttgggggaaaacctgagagtaataaggacattgttaactagtctagctgattcatccttaacaaaatataagtataaacatttgagcataaaaaaaagatacaagtataaacttggaccgacaagaaatggtggacaagttagagtgacaataacagttgatccaagttcagtaatatgtcacttccacgtgagttctaactcacatatacattggacctagctaactaaattgaattgaatctatctatctagctatgtgcacaccaataaattaagcttttttttttttttttttaccttttctctttttcatttatgaagaaagacagtagtcactgggcacaaccacaacacaccacaccaccgatttttctatcccttttgtcaaatggtcctatgtgtacggtcaaggacaggtgaaattgtacctttttgcagtaacttggaataaaaccagtgcccacctcaaccccacttctgttcttccactgtgtaccactcaatgtaactaaatatattagttggagataaacatcaaagtattatgacaagagatattgaaaagggataatgattgttgtggcaccggctatttcgatcgttgtgttggagtaattagctacgcagatttaatgggcgctcttctatattatttgtacttatattaatcatataaatatttgttcttttcatattaattattctgtcatctctattaattaacagcttaccatcctgctataaaaaatactaaaaggaagagacaagaaatgggtgaattaccttgctaggaatttttatttttaatgaacactgacttagctatgaaaattgttcagtagaaacactagttttgtttttgcggtagagacgtttctattttcagtacagtgaaattatgactcatttttgtttatatgactatgtatagcaaatattctatctgttttcagaaaacatataataatttaaagtactaacttggtttaaaaaaatgaaaattgagaacaaaccaacttgcgaacaaccttatccaaaaataagatttcactactataaaatggaattctcgtcgatcaaaaaattaaattttttcaaggactgatgaaaataaaattgagctacactacaataatagactttagaggctatcattactaaaaattaaaaaaaggaacgacattaagttgttaatatgctgaaggattgtaaccgatgccataaggggtttataaccctccccaacccttcgttttcctcatttgatgagccaatccaaaaacccccaaatgggagaaactcaaaacactttccgccaaccaccagattaaacacctcgatcccataatttacaattttttcaccattttaactcatttttttttttttaaatcttctattttttagacccaaaactatatatacccgaaaagatcaaatttttttctcattttaagtgtaatctgaagatagaggtagtggttgtggtggttatacctccaaccaccaattttagtggaaaaaccgttgaatatcaacgtccattaaagtataaatctaatttttactaattttagcaatgtacattgttttatttttgattttgtaaattttttgatgacttttctatattattaagattgtacatgttattgtggttgtgtgtggtggccgaattttggtcggtattggtggtcggattgcggttataagataaaaatttaaactttaatagtatatatgt

SEQ ID NO: 115992 - DNA, 1157 bp, Cannabis sativa
accatgtcaatatagacaagacagcagcttccaatgtttttttattcttacttaagtgttttttaatatttctcatttgattttgattttaaacaataataaattctaaagaaacatttgtactctactataactgtatataagagattaaaatatcctctcattattttgtccaatcaatcaaagaaaacatgtcaatttcttttctttttttaataattaagcgtgtgtagggtgaatatgtgattgaattatgtattttgttaaataataattccaatttaatattttggaatgtacgctaagttaatattttaaactcaatttcggtctaataattttttaaaaaattaatgctcgaccttaatttcctttagtagtaactttagatttagggcagatggaaacttctgatttcattatacaatagaaaaattatttgactaatttttcgtcaatacaaatcgctaatgagacctattttcattgtgattacttgtattgatgaagaaaaacttacaaaccaaaaaatagtattaactgttattttaataaaattaatttataattaaataaatcatttaatatttgtgttctataaatactcttcatttttcattcttctttcacaccatctttgacatttttctacaaaatcatgttactatcacaaattttctcttatttctcctctcacaaatttaatttattttccaaattatttttttacattttcttttattcatccatggatttccaaaattctctatgtttacctagattttcagaaactaaaataaaaaagagcttaagaaattaaataagtagttaaataataaagatgaagatttttatatgatttaagtgttaataaaccttagtctacaagttaatgtattagtcactacggaatatctccaaaaatatgggtttattgccaatcaccaaagcatcgagccctacagtaactgtgacagttgtcgcgatccttcggcagtcaaggaggagatcgctgatatggttgttgaggagatgcgaaaggtagtgaagctaggtgttacgtgcagtctatgatggcacgttacaagctaagtgatgcccacaagttggccaagtggtggtcaagtggtggggcatgttgtggtgcatgcaggtgg

SEQ ID NO: 115993 - DNA, 3519 bp, Cannabis sativa
ttttttttttttttcatttgaatatattttgaatgataggtatcaatgtgggtgatgaccttgtaattgatggtggaatggcatgctttgaagtcattgaaaagattggaaatgaccttagttgcaggtgctcagaccctggcttaattcttccaagagccagaattagcttttggagaaatggaaagcttgtggagaagaatcataagctcccaactctatcagcaaaggttttttattttttcccattctctttttcaggttctgtaatattgtctagtttgtagtttaagactgacattttcttaatctgaaggattgggaaaacatagattttggtatttctgaagggattgattttgttgccatgtcttatgtgaatgatgctgaatctgttaggcatttaaaacaatatctctcagccaaatcatccaagtaaggcaaacgtgttatatttacttgtgccataataagcaatatttgcattttagaatggggaagagtactacatataatataacatctaatctaagtagttatttcaacagatccataagcgttttggccaaaattgagagatgggaatgtcttcagaaacttgaagagattgtagagagttctgatggtgtcataattggccggggtgatctcggagatgaaataccactcgaacagattccaacagttcaagaacagattgtgtatgtttgtaggcaactaaacaagccagtaataatagcagctcaacttcttgaatccatggtcgaatatcctactcccactcgtgctgaggtaccatacaacaaactctctattatcatacacacctagctcatatctgtttaggcatttcactgtcttttatacctgtctttcttttgttaatgcaaaggttgcagatgtttctgaagctgtgagacagtatgtcgatgcactaatgttgtctagcgaatcagcaattggaatgtatggtaacaaggctctttctgtcctgaagatgacctgcaacagaatggagctatggagtcgtactgaaaaccagcaacctcccatcaagcttcaccaactcggtgtctcattgcctgatcgctttgctgagcaaatatgcaattctgctgctgaaattggtacttcaaacaacactcggaaacaaaaacaagaacaaactatttctttattatctgtgtactgtttatttgtgaaaacatagcagcctttactagaatagtttcatactaatgaagggagtctctgtcacaatgtcacatttgtaaaacttaaatgtgaaatatgatatctttgtagtaaagggagtcagtgactatcacattataacaactggatgtgctttgtttgcagccaacaaccttgctgtggatgccatctttgtctacacaagccatgggcatatggcatctttgctgtcaagaaatcggccgaaccctcccatattcgcgttcacgaacaatgaaagcactcgtagggctttgaatttgcaatggggagtgacttctttacttgttgagttgtcagatgacatggaagctaacatctcatctacaataagtcttataaaatctcaaggattattgaaagaaaaagatactgttttggttgtctcagatgtcattcctacactcactactccagtcccaatattccaatcaatccaggtaaagaccattggtgacacttgacccgaatcaaaccaaatagaaaggctaagttaaagagataacataaacatcagaaagtatattgtaacatatatttgatcatttgaattgtattattaggtgatatgtatggaatcacgtgtcttgcacgtgcttatttttgtgagaataacttggctaatctagctagcaatttagcaacaaacaagttttttcttttctaaatcaataataataaacaggcttttctttctaatcacaaatatcacactggtttagtactgtttcccttaaattctatttactagaaaactctcttaaaatgtatatattaaggtgcaataaattcctttttttaaaaagaaaaaagttgcaataaattcaacccacatttactgtataaaataaatgttttcttggcctttttgtaaccttacatgtagcagtgggccatatggtagaataagatataattaagccaagtcacatgagtacaagtgtccaagagggcagatatgatttagacttgttggaactttatgaaatcttacaaaaataaatattgaagttgtgagtaattggagtcctacgtacgggatagaaacactttattagaagtgtataaatagtgcaagtttgatatatgggtatggccccaagaggtacccaattttgtgcgcatgggcgaggactcacacatcggacaacaatatgtgcgccgtcgttcgaccgtctcgagctgggttggcgggtgtgttgtcactttatttttttagagaaaatttatttatttgtttatttaaaacagtttcttttaaaaatgtgtttgattaattggtaaacagaggcttcctgatttttagtatcgttcccacgatcacatattctaacgttcccttcaagtaacgtctttattcccgttactaccctcagtgcattgcctatgtaatgtgtttgaaccaacaagagaaatacatcttttttttcactctgaaaaacatatacgatatatacatacgattatattacatatttatatttcgagcagtactcagtttatgggtgtagtatttcgacggtactttatcgtgcaataaagttctgatacagtgtgttcgactggactattttaccctgaggacgacgaggctgatagtctgcttgcacaaatctgggcaatgctgcgaatgtcttaaagagagagacctagtctgcaactcaacccatattctaattcggtaacttttttccttttattttctacaacaactattttataacaattttaagacgttgagtttctagcatgactgccgatgagaattcttgtcttattaatataaacaaaccttttcgttttaaagggaaattattttataagatggaaatagaaaattttatttttcctcactacgaaaaaggttgcttatgttctgacgattgataaacctgttgtttctaatactgcaaaggatgatgaaaagcataagaaaactgttgatttaacaagttgggtcgagaatgattttctgtgcaaaaattatattctcaatggtttatctcacgatttatatgactactataattttgacaaaactgccaaggaaatatggaatgcacttcaaaagaaatacgacactgaggaggctggaactaagaagtacactgtcagccgctacctcaaattctagatgactgacgattagtcagtggaggtatacacatgataagtatcgggataggtacgggctcatctgattaggcgatgcgatatatggtgtcaggctatggcacgggcttgcctgattaggcaacgcagtacaagattattagattaaagcat

SEQ ID NO: 115994 - DNA, 1579 bp, Cannabis sativa
tttttttttttttttttatgttatcaatagtatacatgtgtaatggttgtggtttttaaaaagtatccggtaaagattttttgattttcatgactctgccacatgtgaccttttatgatgtttgaaagtattaggttattatttgttattttctttgttatgtatgtaactgttttatgttactttaataatgctaaaataagtactaggttaccttttattaatatctctcttatatttataattgttctaggttgcttttatgatatctaaaaaatattagggtatattttgttatttttttttctcgtttgttattaattttgttaattttccaagttacatttatggtttaaaaaacattagtattactctcttattatctatgtatatattataaattaccaggttatttagaataagtagctaaaaatatatattagttcacttatgcattgaactagaaactcaaaatccaaattttaaaaatataataagaaaaagttgagattagtggaaaaacatcatacacgttgtgtagtattttgaaggctaataatgatcaaaagctttaaaaaattattattgggtgttaaattaagaattaaacaattactaatcttttcctttcaatcaaaaagaatttaattgttgcaagaaaaaaaaaatcaattaagtgagcgaaacacactacactttaaaaaatggaggttctcaacttcttcaaagtcatcatatttgggagaaaaataatgagcagtgattttaactattcctaatttatttaggtttttaaaagatctggagattctatatgttccaaattaattattttcatatttttaactttttattattttttcaatttctataaaattcctttatttctccaaaatttgtctaaacaacttataaaaaaatcgaaatagccccaaatattatgagcattaacccaattacagtacatgcctcagcacccaaatcacagcccaacaacacaagatgaatttttcttctttgagaatcttttgaaaggtaaccagttattgatatgccaaaatatttatatattatataatttaatcacccttactagttttttcaattttatagtggtaacaaattaactatttacaaattctattaatgtaagcatacaccatggtaaatggttacttcattttctttattcatagctagaattgttcattagtatcgcaaaatcttaaaaacgcaatacagaattttgttagtgataaataatagatagatatatggatgtttaattttttatttctattaattgtaattattattactattcttaattttttaatctactattcacatatttatataaataggagatatctcataaaaataaaatactaagaaaattatatttttaactttgtcttatccctttttctattttttttttctctattctattatttataatacattatcagcagaactctcttacaaagataaatattatttctcaaaattcttaagttatctcaaaatcatgatacactttatatatatatatatattatatatatatatatatata

SEQ ID NO: 115995 - DNA, 3336 bp, Cannabis sativa
  modified_base (2233)..(2248): a, c, t, g, unknown or other
  modified_base (2326)..(2333): a, c, t, g, unknown or other
  modified_base (3100)..(3102): a, c, t, g, unknown or other
  modified_base (3248)..(3252): a, c, t, g, unknown or other
ttttagggtgtgagaaaaggagaagaaataggtggacatgtgggaaatagaaaagaagtaggtgggcatgtgggaaatgtggcgagaagtaggtgacggtttatacccgatgatttaggaccgtcggctagtcctctttttgtagtatataaaaaaattaaatggggtatacccaatggttttaaactgtcgggtatatgggttaaatatgtttctaaaaaaaatcccattttcaataataatcgtcgcctattttttagctaccgttaaaaaccgtcgggaatactcattttttccgatagttttaaacagctacttaatttttttagcaacagcccccgaaaaaaattattctcaaaactgtcgcaaattcaaatatttgtagtagtgacttcttcttcctcatcctttgtcctctccttcttcttcttcttcttcctcctgaaccccaaaatcataacttactttacccctttgaagatttcaagcaacatcaccgagttcaaatacaggaactcaccgttccgcgatcgctccacgattcaaatctcgagaataatatttaagaccttgcaacttggggaaacagaaagggtgaggtggttcatgatgggggacgcctccctctctctttctttcttctccaccattttagctagttactaaccaagagaatcacattatttcagccaacgatggtctaaatagaccacagatttgagatcctcaccctcgcaaacatgaagatcggcccctctcttttctccatgtcgattcttggtgtttctctctctctctctctctctctctcattcttattttctgttgatttattaatttttgtttgtgatattaggtttagattttgtttgtagttttaatttttttgtgatattggtttagattttgtttgtggtttgatgtttagaatttatgatggatgtttgaatccggtctgatctaatttgtggtaatggtgatctaatttagggggtggtggtggttgtggagatttttttttattctatgattcaagtggtgtggtggtgatggttgttgttgtgtgtaatctttttcaagtggtggttgtggtagtgtgttgtgatggtggtgtttatgtggtggctagttatgaagaacaggaaggaagaaagattaaaaataaaacgaaatataaaaaaaagatgaggaagaagtgggtgggtgttggagtcttgtttagttcagaagatgaagaaaagaaagagaagaaaatgatttttttttttttttttataatttatttatttttcatattttaaattattttttgtagtatttttacaattaaaattacgtgaatcactaaaagcgtgacacgtgtacatttttgtatatgtgagcagcccactgtatacttaactgaaaattttagatggaagtgtaatgaggaacatagaatctagattcagtaattttaaaatttcaatttttgtgattaagtgctaaaaaatataaaattcagctaatatccctaataattaatatgaaaaactaattttaaatatattataatttctctatggcaataatagtaatcaaatttgttgaatttcataaggtagatctaatgaatatgctatcccattaacaagttcaaattttcttttgttttgtttattaggttataaaaacaactttttcaattttctgttttttttttgaacaattttttatcactgtttaagtaaataattaatcaattgacttgtcatatggaaacaaattaaagagtttagtcaaataaatgtttatgaattgtttttattttttatttttaaggaatcatgtctcttttagcccaatgtttgaaaaagaacgtcggcacaagtaagtgggagaacgtcggcagagttacgtaatatagtatgatttgatcactatgatgtatagattgaaaacttcaacttataaaagttgggccatatccatgtggctgtgaatttgtcgatctcttctcgattattaataataaggataattagtaatttttttcccgacatcatgctctttgaattttttttggaaaacttacaaaaatattaaaatttgggttaacttttacaaaaatactgtcacatggaaatcttttcaaaaatactgtacttttataaaacaccagtaaaacacaaagtagaataactcaaaacaacagttaaacaccaataaaataccagtagaacaccagtgaaannnnnnnnnnnnnnnntgcagtatgaaacttataaaaaatacagtaaaaatgtaaaaaataccgccgggaagtatttttgtaaaaaaatagcannnnnnnntataccatgtaaatttccttatttttttcatagacatttacaaagtttaccagttaacataaataaaatctatttctttaacacaaacccactatcaggtataacattataaagaaaatagcgattgataaataaaatatggatataaatgtatttaagtctctaatactcttttatctttaaactttatagaaggcttaatgtcccattagtcacactcaaattgatttaaataagtttgtgttggcctatatttttttttttgtgctttttaaaatataggttgtaccatattatgtaaaaaaataaaataaaaatatgaatagtgcagtatcgtgccaacaattttgaaaggtaagctcgatataacttgtaagctttactcgtgctggttcattttttctaaataagtcagcccatttttttacacgggtttaaattcgtgctctacttattcacattttttttttatataattaatgagataactactaaactatatgtgtttgttatagttttaattatttttatatagttttttaataatattttacaatcatataaaaaaaattattaaaattttaatatttactgataaatacttaaatttttaagttataccctacaaatatattaatatataattttagttttatattatctaatagttttaattacagaattataatattttgtgttatatttgagttttatcatcattttaatttatttataattgatcaacacaaattattattattattatnnntattattattattattataaggtttttaactgtatttttagactagtttattcagtacttatcgtgttttttgaatttgtcgtgtcgtgtccatatttttttttatgttaagtcgtgttcgtactgttggaatatattttaccagnnnnnagatttactaataagtatgtttttaacatctttaacatgaacttctaaaacgatataaagtaaacacataaaaggtatgagaaa

SEQ ID NO: 115996 - DNA, 2670 bp, Cannabis sativa
cctcccaagccggcgtcaaccctcctggcggcgtttggcaagacagcgaaagcggtcacacagccggaagatccatctacgccacacacaaaattcctttctatgtcttcctcatatcaaacactttggctctctcctcatccattttggtcattatttgcctcacttataggtaaaaccacacaaaccccacctcataaaaattctcttatttcaactcaattcagtactttaccattaaattatatatttatttgtttattgttttattttaacaggtttccttttcattttgaggtgtggctagccacaatctcgatgctggtcacatatggctcggcggtatttgcagtgacgcctaatgagtcagtgaagtttcgttatattctgttcgcggctgctgtgcctgttctcataaggtttttgtgggaggccatcaacagatggggacgtaaatttctcggcttgtttcgttgattattgtgaccactttcaggttatcttattttcagagagaataatgaatgaagtggaaacatttatttttcttttgggtcaacatttttttgtactctaccatttgcatttgagaagtagtatggtttggacatctgtgactaatataattaaattattaattagagtatattttaagcaaaaacggtttttctgtctgagttggattatttttgttaaatttttgtaattttttttttataaacaacatcagttcattaaaactaagaacgatgagaattattgaaaaaattccttccccttgatacaaattagcatccaagctagagattctacctcgaccaaacaagagccaaacgaatagcaagagtcttagcttccaaagcagaagaagcagtagtagaaagagaaaaatgagcccgagaaccatcagcaaagttggtcatgacagctgcaataccagcagctcaagcagaccaagatgcattagttaaaataactatatcaataccctccctactaggacataccaatcgctccatcttctctgtcatagaaaaagaatgttgatacaaagaagaaaatttagcaaaaaggccattgattattcgagaagttgttaacagattagcagatccccaaacaacctgatggaattcctctgctgccaaatttctacagcaacatagccaaaataaagcagggcctggaatcgcaaattggaagggacaacaagcaaaaaggattttactacctgagacaaagaatcgtcaggatcatgtctatatgacttggaaaagcaccaataaaccaaatagctttcacaaaacaacaatctttgaataaatggagacaattctcctctgaattaccaaacaaaaagcattctttgtcaaccaaaaagggaagtcttgccttgttagggagatcctcattcaagattcttgttaaaccagttagccattgatgagaacaaaagctaaacaaaagagaagaaaggaagaaaagagtaatggagaagaaaagagaatctcaatcttattacagaaccaatagagtttatacacaaatgatctaagcaacaaaacagaaaaggaaagaactaactaacaactaacaataacaaccaaaaacagaaatcagttacaccactaactaactttatgttctaacacccccttcaaactcataattgaatggtcttcaattttgagtttggttctaaaatcaatgaacctttgacttgatatagctttagttagtcaatctgcaagttgatcatatgctgaaacatgtttgatctctatggttttgttcaagactttctctcttacaaagtacaaatcgagttcaatgtgctttgttctggcatgcagaacagggttctgtgtaagcatgattgtactgagattatcacaccagactgtaggtggttgtggcattcgaatgttcagctcagaaaataggtaattcatccaagtaagctcagttgttacattagcaacactcctgtactcggcttcagtgctggaacgagaaatagtctactggttcttgcttttccaggcaactaaattagagccaaaaaaaaagatagcaaagccagaggtggactttctatcatctggatcagatgcccaatcggcatcgcagaatgctgttaactcaaatgaccgaggattggttaggtgaagaccaaagttagtagtgccaccaatgtatctaagaattcttttaacagcttgtcaatgtgtcaacaaaggtttctgcatgaattgatagaccttgttgacactaaaagaaaactcaggtcttgtaattgtaaggtactgcagtgccccaacagtcgacctatacaattgaacatctggcatagggtccccttggtgagcagacaatcgaaggccactagtcatgggagtagaaaacggtttggccccagacatttgagctttgaggaggaggtctttaatatacctggcttgacaaagatgaatgccatctggtgtgtatcgaacctcaattcccaagaaatatcttaaagtccctaaatctttaagagaaagttgagtgtgcagggcagcaatgaggttgctaacagcctgggaatcactccctgtcactaaaatgtcatccacatatactaatacaagtgtagttgagttggccgtgtgattgatgaagagagaatga

SEQ ID NO: 115997 - DNA, 3986 bp, Cannabis sativa
cattgttttagaattcatatcaggatgttaatgaaacatacatggtagaaagtctagatcctggtaaaatatttcaaacaataatgatacttggtcatggaagcatgagccatcgggagactacacagtaaaaagtgcatatagagtacataggacaattaaggaggatcggtctactaataattctactagtttttggaggaaattttggaaattgggcattcctcctacagtgaagaactttgtttggcacgctatttcgggtcgtttacccacacgaattcaattgcagaaataacatgtccctgcggaagcaacctgtccaatttgtgaatctcaatttgagactatctttcatactttagttggttgtcaatttataagagcttgctagaacagataagtagtgaacataggtagttggtttgaagttgatttcggggacacattgctattccaaattttgtacacttgacgtggcatatccacatagtgaagactaaggacacgtggaatacaacttgtcaataacaggataaagtcaccttacatggcatgccaactgtgaagggttctaaaataatcaagaaaaattgtcaagcaagaataagcaaaaggagttaagcagatcatcaagaccttggctgaccatgtcaggtcggtcaaggaaagcttgtaggcgggctaggccttgagaacaagctggctatccaaaagtggttgtcaaactaaagaggcttgttcaaccaaggaggtctgacctttacaaggaaagttgctaaacaacaaagctatgtgaaaaaggttgtcaggaacatacctggtcggcccatagaaggccctaggctggtcattccctaaaaatagggttgggtagccaacttatgcaaacaactctgaacagactgaacgaattgcaggacaaatccaacagtctacgaagatagggatattctcttgagatattagtcctatactctaaggatttagtgattctttttgtaatttaaataatatataaaaaagattttaatgtccctattttagagggatatcttaacctatttgaattatgatcttatgtaagccctacactatataaagggcattagatcactctcttaagagataagtcattccacaagcactaaagggtctctacaagtcctctctcatgctccatgaagcttctcacacatgtgaagcctctctctcaaacctcatactccatttatgcctcctagacactaagttaagtttttttcataaaatctcacccgttctttatctgtaacacattgctctcacaattgtaatactgaagagagccaaagctagaattacaaggtctagccctataatctgcatggtattatctcaggagtgaatataactaaaaggagagtaatcattacctgctaaacaagggggttgaacctctataaatgtctacgttacttttactatttattattctcatttacacgtggtgataatcagaaattaataaggctctgcagtcagttgaccaaattttgagtcaacatacaaaattcttacttgtagtccattgatataatcattataagtagttcatcctccaattattagttcataattagagttggtccaagttactaatttacccttctaattatctcttgattcctaatgtatcattaattcaatgtgaactgttaatctataatctaattatagatttggattcaactcttagtactcccagaaataacactataagggaattaatatttgatcctttcagaaagcttagattctattattgtataacatgttcccaggctcccaactactcatattattagaaattgtaagaatcatcttctttgagaaactttaatgagtgaatcaaagaactcaatgaacacaaatagaagtttatgtatacttaggattcagactgatctactaatgatcatcattatgatattaataactcatggtaaatggcatgttaataaaagatgttattcacatatcggtccagtcatgtataatcaaataatacacaacacctttactacataattatccatatatgtgattcgaatcaaaatcacacacactagagtatagtgtatagtaaattgtacttagtagttccatattaaagatcccttactttaatacactaccaacttgttttattcatattgtataattttaattctcttgcacgattttaattcatttatcttataatttcatttcatataatctatccattaaatacttaattttaaggcataaatcccaacaagaaagttctaagaggactaggcatttattgtctcacatagagagaggtgttcattaagaaatgcccaacttgccactaatcctagtgcaactgtaaaccctttagttacattcattttttccctgatttaggaaggatcgaatttgctcaaatgaatgttaagcatgaataccccttgttcatggtgggtctatagagttaagtactctatgtcccatgtttcaaattggtgtcaaggaatacagtttggtctgacatcatgaaaatgtataagactgagaaagaaagacaggatttgggagaaaaaaataagagcagaatagtcgtaactagtgatatatggactccaaatcatcagaagatggagtatatgactgtaacagactattttattgatgattcttgaaaattacacagtcagattttaaattttaaatatgtttcgtgtcctcatgatgctccaacactacttgaggcactatgatcttgtcttaatgaataataataataaaaaaaatcagtacaatgtctctagataattgtactgcaaatgatgccataattgagcttttgaaatgacaatttgagtctgacagttttattttgaagggaaagttgcatgtgcaatgttgtgcatatattttgaatctaattgtcaaagatgacttgtccattattgatgatagtattgacaagatttgagatagtgttgcctattggtcaggcacaccaaaaaagacatgaaaactttaaggacgctactcgttaacttagagtaccatacactaaaaagttatcactagattatgtaacaaggtggagttctacatttttgatgctatgcacaattttatcgtacaagacagtgtttgaatgtgtaagactatgtgagctgcgattgaggtctgctccttcaagaattgattgcaaaatgctcaacaattatgtgaaaagttagagtgttttatatgaagtgacagattattttatcgagcaaagtatcctactatgctgatattttttttccaaaaatatgtcaaattaagaaaaatattaaatcatgaatgtcatcaaatttgtcttttattaaggacgtggcaatttaaatgatatctaagttcaaaataatattaaggaaagattcatttctattattttcaataattatatatattcattttattattggtactgatttttattttattttcctttatagcaacaataatgaaaatattagggaaaaattatttgtgctttcatttaaattgaattggagtccaattcaatttaaatcaaagcacaaatcatttttcttttaagtttatgaattggagttgggagttttctcatgtttgcatcattcttcttttaatttagtatttaattgaaattttgattctgatcccagaaacaaataataatgtaggaatgtatgatgtgagattaaaaggaacaaataataatgaaactttagattctgcgttttgtaaaagttaccaattgaaccatctgtttagttatatgataaaatggaccctatattttctaaaatggtacaaataagaccttggactgattttttttatcaaaatgaaacttaataataatctgatctaaaagtgttatgacaaaactgtttatattttttgtatctgttcgtgttaagaattgtcttcaagtt

SEQ ID NO: 115998 - DNA, 1506 bp, Cannabis sativa
  modified_base (40)..(46): a, c, t, g, unknown or other
tatattaataagtaaatccgattatattgaaatgagtttnnnnnnnggcataaaacccaacaggatgtagattcttgatcaatccaacaaaaaggacacaccataaggacccgaactctcttaatagctaattgagatcgggttggaaggctttttgtacatgccctccaaactgtgttagtaactttagcttgagcctttaagttccaaagctttctccaaagccttgagatgttcaaaccaatccaacaaccatggaactgctacaacaacttgtaagcactcctaacaatgtagtcaccattaggttccaaataccaataccaggaatcatctttatggaactcacttaacgcaatagatagaattagctcttgttgtttattgtcatacagtgtaatttataattatttttatgaccataaaatattattttactagtaaaaatatttaaaaatttattttactaataaaagttttcataaaaattattttaaaaattcactctatctattctcaaccattgtcataggcatagcctagtaaatgttggaaaaaaaaaaaaaaacaaatctcacccttaaccaactaataatatcttattgagttaattatggtaaaactttcaaaagtttgatcacgctagcaattaattttcaaaatctaatttttaacgttaaaactctcaaaactcgtagtgccatagtatgtacatgtagcacaactttattagttcacataatctaattattttttaaaaaataaaaataaaaataaattaatttataattaaaaataatttaaaaaatttaaaaacaaaccatattttaataaataattatgaaagaataaaaataaaactaaagaaaacccaaattccctatacctaaaaaccaaattacctcactctctctcgcttcagcttactgcaaacccctctgcaaaatgatagtgccttgaaactcagttggaacatgtcgtatgtccacaccgaccagaggtcccaaaacgacaatatttacccataaactaaccctatgatgtggacatcaatgtttgacacgtgacaagaaaaaaatatcctaaagtttaatagtttcgagtcgtagtagtcccaagtcctgcgcccagattgattacgggaacttcagaatggatgttaagattccgctaagttgtttccaactcaccatctttcagtattatgtaccatgaacacaagaagaatccaaattcaaggcttgaaagctgaaaaatacatgaaacaacacccataaagtcaacccaggtgcccaacacccatgtaacgccctcttccatagggatgtcatgtctgtgactttataaactagattaatactaatatattaattaattattaaacatcgataactcatattgtattcacatataccatataaatctctgtaattcataaattacacttatttatctacttatagcaaatttaaaatttatgttgaactagattagtaggatcataat

SEQ ID NO: 115999 - DNA, 2706 bp, Cannabis sativa
tcgggtcctatataatttaatgtaatagcttttaggaagtatcgctagccaatcacaacgcgacatgtcgagaaggtactaggcactagtgcctaaaatgctcaataaaataatatatttcacactgttaaaagtaatactattggagatgcttaagcctatgagcattaatgatgttgggaacttgagagttcacagagtgggaaaatgaaatatctgtttctcttcttcaagtaataataaataataataatagtaaacatcttatctcaatactccaatcttttcatattcatgtcattaaattactccaataacctctttagtatttctccaacaatatactctttttttaaagaaaaatggtaaatagtaattatggtggctaataatggtaatattttaaaaaatacttaattaggtagttagcataagtagcaaaatatagaaatgttatactattaaagataaaaaaattctattattgaaatttatattaatgtcatacaatggatgctatattttttttatacaataaaaaaattaaatgtgcaatatatataattgtttaataaagaacaaattatatgtataataataataattatagtatttttaaaaattattatactatttgaatgtttttaaaaataaaggtaccaaaaataatgtaaaaatatttgaataatatgtaaataaagcatcttcaaagaatgttattaacattaaaagacgcttaaataaacaactaagattttcaatattaatactcagtagttaatgtaaataaaattacaataacatttctttcccattttatttggttcaaaacccaaaggaaaatgcaatcaatgagggtattatggtaaatttagtgatcatgaacatttagattttctattaaagttgtaacaatatgcaaggcatgcaggagccttactccacttcattctttcttttctttctttctctgtctatataacttcagagaaaacattagtttaattacttgacaacaaaggtatgcaactaactcacattctttgttttcttagaaattaaccacacaacattaatttataggtttcgtatttatgcattttgattctgtttttgagttttttgagtattttttttttttttaaaaaaagttaatttttgtgattctgcaaggtatagtaaaatcaataggttgaggctgtttttctttttattgattttactttctctatatgactctgtatccaaacataaatgttggccttctttgttctcatgccatacatccatataatatataaatatggtggtaggaatatttttgttggtatcttcttttgttaggagttagaaaatagtgttcatatgtagtaaatcttttagttttggtttaaaaggaaatgagttttgtatgtttttttatttttgtgattatgctacattataaagattctccacattgggttgggtggtttaagcttttatttattttctctgtatccaaatatgttagtttaagcttttattgggttaaagtgttatgcatttatgtgtatatgtttgttcttgttggatttgtatacacttactatgtaaaaccttgtttttaaatacctttagggaatgaatgtgtaaaacaaatacttaacatccttttattttaccaagttagaagatactgttaattttttttattattatttttaatactgttattgtctctataaaatgttttatacatatacatacacatatatattagacaaaatatatatatctttattttcagataaccatgtctcggttgcgaaaagcaaattgtgaaggttagctttgtttgaaattggcctaaataacatgtgtaaatatcatatgaacatgaaagaagaagatgggagttgtgttcttgtattttcatatttttcttttcattctccaatatatattttttgttgtgtttgttttttaataattaataataatcagataaggatgaggtggaacaagttgttgcagaagaaaatgcagagtttatgaggcagcaaattgttggtgaagttgcaaatgatcttagtgtgagctttcatcactactaataatcaataactttttctttttctaaatagtgtttgtgccaaaatagtattgattgaagcttttatgtgttttctttgagaggaaatgaagggaattaagagcaagtctgagttgatggttagtgaaatcagaagcttggaaccaccatcatcatccaagacaactgatcaggaagctgggaagaaactgaagatggatgatatgatcactcgtaaccattttgttgaggctgcaaaagtccatgaaaggctcaagctttctattaatccaagctacattagggcgctcaaagctagcaacgagctaggttatgaaccaccaatatccgcaagagtcatgggatgtcgatattatgaaatacaggtatccaacattcgcgacgctatgacttttgtgcttgagtactacctcaagtataaatatctagctcaggatcaattgacaacacatcaaatcgaccaagatcttaaggttgtagttccaatcactgttgacgcatgcagggccggccctgaaacaaagtgggccataagggaaaaaaaattttgggcccttatgttagaaaagatgtggtatttttcaaaattagtaaaaaaaatgtataatttt

SEQ ID NO: 116000 - DNA, 3611 bp, Cannabis sativa
  modified_base (99)..(99): a, c, t, g, unknown or other
gtaaatctgattatattgtaatgaatttatttagggcacaaaacccaacagtttgtaatgttgagattgttctcacaactctctctctctatatatatntatataaatatatatgtgtgtatatgaatactactactattagtactttatattgtatttttatttgttgtttattgtaatcttttcttcatctcattagtctgttttatgtgtataattttgtcaagatttgtaacattatttaattccttattttgtaattgttttattttgcattgactgtacgtttgtttgttattctattgaagcgctaatgttttcaacaattaaaagtttaaccttcctacctagcttcaatggaaggtgagaccatcaaaatgatgaatcaagacccagtaaggttggataggtttgatgaatccaactttactaggtggcaagataaaataaggcttctcttgaccacactcaagatagcttatagacttgagtcaaccttggagcctctacccgcttcaaacgagaaagacactcctgagatggtagagaagagagaggaggacaatctcttatgtagaggtcatattcttagtgtcttatctaataggctataagatctctacactaataccaaatccgcgaagaagatttggaagcaaaatacaaggcaaaggaggaaggtacaagaaattttttattttctcaatgttttgaattttcttttagtgatgttaaagatcttcttcctcaaacccataagttacaatcattgtgaaaaagttagagattctcaagattgagcttctgaaggaatttcaagttggtgcaattgaggcaaagttaccaccatcttggaagggctatatgaaaagaatcctccataaaaatgagaattattctttaaaagagatctaaaagcatatctaaatcgaagaagaattgagattgagagattaaagaaatgtgaatgaacttaaagatgacgtttttaaggccatagcggtctcaaacaagcattacaaaggcagcaaccatagtaaaagtggtggaaaatatttgagtctaagaaaagacaatagtcaatttaaagaagtgtgtgggaagtgattatggcataatacttatgttgtttttgtgagatgagtgtttatgtattgcatatttaaataaagcttgtgtagttataactaaataaagtttatttcactttatttttgtgtgtttggtgcattactttgagaataaaaattttacaaagtttcaaataacttttgttaattgagtacggttaatgtgtgaaataattttattaattttgagtaatattttgagtttgacattggttttgatgagaagaaaaagatgtcaaattagtgtttaaaaattgatctcaaaatcattttagaaaaatatacaaagtggtcaaatatttatgagataatatttttttgaggaaattactgcacgcacctaaatgtgtaatctacctagagttagcaaattaaaagcttttctctctctagagccttctagtaagtatgcagtccctctccttgtctttgtcatgtttggttcctctcatggaggattttgtccaccctaactggtatagtggtgggttgactttgggtaaatatccttttttgcctatttctcctccctccctatgtaataaatgctctaggtgttattatgtttccatttcacatctcattaaatttgatcagagcattaattgctctaaatccttccttctgccctccctaattaatttttcccatcattctattttgtcttctcgccatttactccagatttcccatatctatactcagaaaaacccccttgattattttaaattggaggcggacgatcggtttcccagagtctttcaggctcttctcattattacagcttcaatggatgcgacttcggacgtgactagggcggttctcaggtgtatcatccaagctttttggttttatatatataattccaaactcaggtattttgttcctcatcaccttctttttgccttgcttatttatgttcatattgttgtgttttctctctttcttgaaatggatgagtttttcaataatgtgtctaataccctggttcttccctctgatgagtccactgtcttcacctatgatactggttcttccagttctgatcctgccccaattagtctccttcttaagttgcacattattcgtccttacaataggccttctctgatgaagaccctatctggtatttggtcatcgcagtgtaggtttcctgttactgtttttgagcatgcggatggcatgtttcttgtatcatttggctgtgagggggataagtgtagaattctagagggtcaaccatggcattttgcctagtgtcttaccatatttgctgccccagatagttccttcccacttacttctgataatcttcattatgtccccttttggattcaagtgtatggtatcccatttatgtgtaagtcctatgaccttgctagatttatagctatggagattggtgaccttattgaggttgataaggacactattaaggaaggcactggtccttatttgcgtctgagagttcttttggatgtaaatctgcctattaggaggggtatgaatattaagtttattaggatggggcgtgagtttgttaaatggattgactttaagtatgaaagattgccaaacttctgtttcttttgtgggaagttagatcatacaaaaaaaattttgtgtggctttcttacaaagatgtgatgaactcctcactgaacctttgtgcccctataatattcttcttagaggcaaagaaaagatcactgataagtctcagccttttcaatatccccatcctccagccattactatggttaactaccatcatgtgaacttgaatctgccaccccaacccttttctaatcagacaattaccttcccctcctttctcagccttaatgatcactttactggtcctttttcctctcccccagccactaaggttcttatgatgccaactcctttgaatcccaacttcgctgatgtaacttcactatctatccgtcccaactttgacatttccttgaggccatctgcttttacctcctattccactgattccttgattgtggctgacaagcctgttgatcaactgcgtgcttcctctactggtcctgctgtttctgtttcattttctggtggtgagtctactctgggtgctagctcttcttagggccttcctgatcctgctgttcgtgggaagggcttagcctctgcctctggagttaagaggccttccttccaaccacatcatgtggtggttggaagctctgtcaggtcccaactgaagcgtgttcgtgctggtgatagagaagaggactcttctcctactgctgacaatttggaacaggcgggtgttgctatgcacacccgcccagaaaaatgagtgtgctaagttggaatgcacgtggtttggggagtacacgtgcattcaggaggctctccctacttgtcaaggaccactgccctgatatagtttttttgatggaaactagactgcctgttatggctgtagatcgtgttagagtagcttta

SEQ ID NO: 116001 - DNA, 2544 bp, Cannabis sativa
actcaaaaaaaaaaaaaaggttaatataaatgttttgttgtacgaatagaggtctctagttcattatttagtgaaaacaatttttttttgaaaaaaaaatcattaaataaagcatgtgatggagtgtcattttaaggttccatagccaatttacagtttacagatttagctattttatacatgagtgctctaagcagaaaataaacgatattataacttcatataattaagtggtaataaatgaatattaatatatagatatgagtatatataaataaattagatcatagaattatgagcattaatccgtggaatactggtcttgtggatttaagaaaaagctcaattagtttctcctcgtgaaatcattcatttttgagaaatgatatgtgcacataatttttatttatctaaaaaatttagcttgatgacataaataatatttttgacacgtgactcgaaggaaataatctcaagtcctgtatcctaagataggatagtggtacattcacactggaggcactaaaataagcaccaagatccaacgaaatcgtttctgagtgctatccttcaataaactagtcgccatgaccctaaacgaagaatcatgaagttgagaatgtcacgtggacatcccagggctcaacctgggatcaacattagtgttgggcacttaggttgacatcatgtacgccgtctcacattagttttgggcgatatgctcaatcattgtcctgagatacatgagagacatgccccaaccaagtttcagaatttggtgatgagtctgcatgaaacgacacctgggcacccggaacccctaatgggcatccatgttgacatatagtcaatctaggcgcaccatggctagggtttaggtttcaggggacatacttggacctcgaatcctcaaatctatcaaggaacaatgcaaggacataatatttcatcaacagcatcccaaggagcccatacataacttgggcgccctcgttgacatttcaacttgggcatcaattttgtttcaccaagtccagcccatgaaaatttgatgaaactaaaatttgtggagcacttttcattgaaaagaagatttaacatcaatgaaaacaattttgagatttggacccccacttgggcgcccagtgcatgcccccaggccatcttgggtgcccaagttgacatatttcaactcggggcaccccgtgacatcactccaaagaagtctctcaagaatttcccttttttttgcccataagcaagatatatacaagtacttttgggaagcaaatgaagccatcaaggcccaaaatgaagagatgggtgctcaagttgacatctccctaatcactggacgcccaagtagacgtagccttacttctggtggttctgttaatccgattgcaattctatcccaagcattcttcttttttttttttgctccaaaaacaagatatgagacttggaattagaagaaaaaattgttcgagtaatgagttagctcctaggcatcactagacgcccaggttgacactgtcttggggctcattgttatgtccttcaaacaacagttttgctttgggcatcgatcttattttgcctccaaattaagatttgaatgcttctgcaagttaatatctcatgtacatgtgtcacacgcaagtctaccgacatccatgtgtaataatgaccgcccgggtatcacttagtcgtcactagtgattcattgggcatcacctgtgcatattaagtgaaatttccaagagaactttccctaggtcaaagaatgaactaaggatagctatcacatcattcaaatatcttaaaatatgcttaaagcccaagaaaccaagttatgggcccccaggttgacgtttatatcaacctaggtgcccaaaagttaggttgatcttgcagtcactttcaactatgtacaacactcaatgaccataactctctcaggttcaagtggccaattaaagatcttttcaagacggatataagtgtgtctcacacccccactgcaattctgatgattcgagcctcaaaattaactagcgagatagtgctggatttcataatgaatttttctattattttattgtaatttaattggacctccttccttataaaatgagagctctcttgctcattatatacattttccattctctctataatgtcatagcttctctctcttcacactttctctttctagaaattgtgaagtgaagctagattgagtcattttctcttgacttctcttgtaaggcaattagctttttgtgataataaaagttgcaagtagacgtagctaggggtgttcatccaattcaatctgtattattttgctcataatgcatccgctccccactaagtttgaatttcaaattttggatccaatccaatccgcaaaagtgtgaattagatcgattattttgatttggttactttttaatattaaattatttaatatttatgaaaaaattatttttttcacataactaacacaaaaaaaaaaaaatattgttattttatgtctcc

SEQ ID NO: 116002 - DNA, 2191 bp, Cannabis sativa
  modified_base (2013)..(2013): a, c, t, g, unknown or other
gtctcagaatcatcccacttgactatccccaggcggtgtgggattgcacaacttacctggtatttccccttacggatcacggactactgactgtcacagtttcataatttaaaatctaaattttatatgtattttgtttaagaaattataaaaatggatgaaaattaaaattttaataaatgataacattaagaattaacattttttaaaaaattattaaatttatgtaagttacaaattacctgcaaatgtcttaatatataaatttttataaaattaaaattattttatatactatttttttattttttttaaatgattttgcttgttcaggtaattttatgtaggttactataattatgatttaaattattttatagatttttaattttttatgtaaattttcgtgaaaataaaaaaaaaatactattttaaaatatgaaataatttgaattaaaggccgacatgtaataattctaagcagccattttaagcatgtttctttttaatcttagtatattccaatagtactgaactcatttgtccatttcttttattattattaattatctcaaagttatttaaatattattaaaaagaaagaaaaaaagaaagtttggccatttgttagattatgaaaaaaatcattacagttggatagtgggtgccgacttaggcacgtgtttatttatatatattaaagaaaagaaaaagtatactatgaaatagtagttaaagtactcaagatgtgaacctcaaaaagaaaagaaacaaaaatatttaaaacaagtattttgatgatcaatataaagtatactaacactcattttgtaataatcttttacaattcaaatcattttttttattcttgtaaaaagttatagaaaatatttttttatttgtattccttgtatttaaattatataaattttaataaattatttttcaattattttttttattttttttaaattagtccccaaatatataaattttataaggataaacaataaaatgttgttaaggactatgttccatatatataggattcgtttggtacgttgtataagggtcgtatagtattaaataataaataacaatatgtttgaataaaataatgtattgtattaattattacaactaaaatttttaatacaatgtaagttgtattatttaatacataacaaatagtctgtattagcttatatattataatatttacaaagaatttgggtcaccccaatctcccacccaaactcgaacccaggacccaaacttgaaaccagacccgaacccaaacccaaacccaaactcgcggcctgagacctaggcctggacttgagacctgacccgggacccacctggacctgaaccacgagcccagacatggacccaaaccaatagcccagacctggacctggaccaagagcccagacctggacccacgacccaagatccggacctgcacactgacctgggaattgggatctagactcaaatccaggactcgaatccccaccctaaccttggacctggacctgggcgttggcctaaaattagacccgaatcttggacctggaccccaacccggacctcgaccctgacttggactcgaaccttggacctgaagtcggaccccgaacctgagacttgagacccaaacctgtagcttggactcgaccccagggtcgaaattggggtcaagtttatggtaaagatagtataattttacataattaataaagtcagtaccaaacatagtatattatattaatttatcaataataataaaatataatacaatacaacacggtgtactaatactaaaaaatcttacttttagtcacaacttaaaaagaaaaaagttgtgactagttatatataaattatcatttctatacgttgtgattaaaatgtccgtgattaaaagtattagtcacaaaaattacaatttgttaaactaagtatagtgactaaaatgaaattaataacaacttgtatttaaatactatnttttagtcacaaataatttttattgtgattaaaattcatatttaataccataaaaaaatatattatgacaaaaagtattatcactaactaaaagtaaattcttttttaatgcaaacaagccatagccttttttttaggaggaaattacactttataccctttttatattgtcctattt

SEQ ID NO: 116003 - DNA, 1888 bp, Cannabis sativa
  modified_base (1862)..(1863): a, c, t, g, unknown or other
aaaaatagattccatgaatgctttgggtttcctaatgctagatttacctcttgtccacatagaatgttggttagtcacaacagggatagaggcactgctacaggaggaaacagcaggctcaggtgcagtagaattgtgttgatgatgggagatagatgtgggagatggtgatgtgtttgaaggactgacatgtaaactggagataggataattagggaagaggatattgatagaggaggaaaaagatggaggaatagatgatgaaggtggaaaaaggggaggagtgggggtaggggatgatataaccagtggagaggctgaagtaaactagtgtagtgcttctgttgaagaagatgacggtgaagtaggagatgtcttgtaaggaaacattgtttcattgaacaagaaatatctagacatatagattcgatcatcttgagagaggcatttgtagcctttttgtgtgagactataaccaataaaggtgcagggaacagacctgtaattcatttttttttttattatagggccttaggttttgaaaatacaaacaaccaagtgttttgagggctgagtagttagttttggtgtgaaataatttttcatgtggagtgatatggtttaacaccttagtgggtaacctgttgataagaaagacagcagccctataggtttcatcccagaactttaagggtaatgaagagtgaacaagcaatgttaatccactttcaacaatgtgtctatgcttcctctccacaaccccattatgttcatgagaatgaagacataaaactctatgaacaatgtcactggattctaatagatttgtgaatgctctatattccccaccccaatcggattgaatgacttttatttttagattaagttgcagctttatttgtgttttaaactttgggaatgtgggtaaagcttcatccttagttctaaggagataaagccatgtgtgtctagaataggcatcaaaaaaagcttatgtagtacctatatccattagaagattctataggggcaggaccccattaatctgtgtgtaacaactgcaatggagtagtagacacagttttagagttaggataaggtagcttatgatgcttaccaagacaacaagcattaaaaaaatcaaattcactcttattactgttgggaatattacaattgttcataacagtttgcacagtatttttggtagggtggcccaatctattgtgccacaaattgaaattggataaaggtacattagagctaacttgaaaacactgagaattgggaggggatgaagatgacacagatgcataaactttgtgctctacagaggtaggacttgaagtgtataggcattgatcaaacttgtatagacccttctcaactttcccaaccaataaagtcttcatactgacctgatctttcacaagacaatggtcaggataaaatacaaagaagacattattatcctagcaaatttagagacactaatcaagtttttggtgatagcagggacatggagcaaattattcaagtgaagagatttggaagtaaaaggagaagtaagagtggaatgaccaatgtgatgaatgtgcaaacctgatccatttcccatgtatatctgatcagtagcctggaattcttgggaagaaattaggttgtttgcatcatttgtaagatggtttgttgcacctgaatcaagataccagctggaatttgcaactgttgaaggagtggcagtcatagcttgcatatcagtaagattagcagttctaaggaaggattgaaatgattttgtccctgtaaacaatttatcaaattgataaaaacactgtgtaactgttggaattattttaccnngatctatttactatcatgtatgttg

SEQ ID NO: 116004 - DNA, 3316 bp, Cannabis sativa
catttcttgtagtgactatggccttacatatatatttggacacctctctattaaaaaaaaaaaataagatgtagcaattaagatagaattctattccaccaatatatgtaaaagaaaaataaaattgaatggttgtcataactttgtttttgctattaatatatattcttttttaaagaattaatttgtttaattaatttttatattgcaagctagtagacatgtcctgattatattacgaattattacatagaaaatataaattaatactttatatataaaaatatcttaacacaacatttatacctattatgtgattttaattactaaaatatcactaacactatcatttacacaatcaaagaatagttgcagagtgcttagtgcgtggttgcaatggttgcgcagttgaaaaaagcccaatttattaaaaaaatatttgttaatcaaatagttttaattagaaataaatctaatcaattaattgacagattaagacacaattataaagtaattagaacctctaattagttaaccaaaataaaattgtcggcagatcatgaaaactcgcctgattatttgaacaaggaaaaatgcatatatatatataaaaaatgcatatatatatatataaatatatatatatatatataaaattgatgcatatattcctatttaacaaaaacaattagggtttggtagaaaagagagagacattttaacaattttcttttttctatcacttatggtgtgggctgcatgataatattgagagaaagtagtaggaaattaaggatttattataaataaaaataaacattactataatctaattattttgtctcttccaattaagggaatacgtgtgcgttacaattaaatatgatataagtgtaaacatgttattttcagagtaggattgtagggctagaaaataagattactaatcataagggttgttacaaatgaattataataatatcaaccactctcagacctaatcaaaattccattgcacctataattgtatatttgactgaattttattctttcatatgtgtgttttacataaaagttgtagtaatatttatagcatctcctatgaagtaacatttatagtttccataattgctacacatattatcataaaatactattttttattttatttctcattcacataaaatttgacacattttactactaaaattactctaatgattggcaactccaaaaattgtctaatcccatctgccatctcttaaagaattaaattttacaattatatatattcttataatatatatcctataccataaattaatacaatatagattttatataacattaaaaataaaccaaatagagatgcagtactgcaacaaattacattgtgataattaattaatatatcataagtataaaaaaactaatctaatactttttaaaatttggcccatatgtgctccgctgagtcggcttacagattgcgatgtgtgtgtctgtcaaaaaatttcagcatttctttgaagcatcgtcaggaaagaggaaataggtccaagtgttacttcaactctcagggtttcaaatgggccttcattataactaaaatcaaaataacctacatatgcggttctttggtcctgaacaatcatattgtgtaatatgatgcaatcatacacaatgtctttcataaatattttgtccaaaaccgactcaatcctcgtgcaatgggaaaacaagattgaagtattctgaatgcttgctcaacatctttgcacaccgcttcttggcattaggcaaataattttttttcttcctttgacgtagtgcaatagttttaacaaatgtactacattctggataaattccatcttccaatagtaccttattttattgtttaacatttaccgtgaaatcgactctgagatcgtgtccttacaagatgtcaatgaacaatggagattcatttaacacattgaggtcattattcgatcctggaacaccaaaaaatgtgtgccaacttcacaaatgttgtgacgctctctaacatgattgttggcgtgccatgatcaccacaattgaattgaccttttcatgcaactggaaaatttttcaattacctatgcatataatcaatgcttccttacattattcctaagaaagccgaaacctcacccatgtgaagtaagcgacgaatttcttcgccattcggtcatattaaatacttgttctcaaaaatctcattcgctccacaaacaaagttgactacacattcaatagcaatattgttgtcaaagaaatttggacacagatatctagccacacacgctcactggactggaaagaatgtaatgagtgttaagtataagtaagagagacgcaacaaatttatagtagctcacttcccgtgatgcgacagtattggagctacgtctacttcgagtttttatttctcatgacacttacaaagaattggctaagtgtgaggctcaaaattctggagacagaaagtagagagagatgctctgaccttatggggacttagcagaatgtgaaaaataagctagaggagctttccttttatagggagggaggtcctataaaaataataattaaaaaatacaaaaaatatgaaaaagtactttgggttgatcttggcaattgatgatgattcatgatgatccaatggtaaaaattgactcttggtgaaaatcgttaatttttggactttgaatctcgttcattagatcgttttcgtgttatttgctcgaaaaattgcaactttattggggacgaattttagactcaaaatcattagaattatgatgttagtatgagacatgaattgatacatctttgaaatagctttgaaagttgtttagtaacctgcggctaggttgacagttgagcgttcagcttgacacccagcccccaagttgacattctgacctcaacctagatgccaggtaagtgctaaagcatcccagacttgtatcttttgatgcaaaagtaatgttttgacaacacatagtcagttttagtgttttgatgaagttgttcaccagttctcgaagatgtcactatttgttaaattgtgaagactcgaaactctttgattttgtcgatattccaccttgttgaaagggtgaaatatcaaactgtgaattgggcctgtcacaagttataacacacttttactatgaaaacatagttgaatggtcgaaacgtaatcacattctaaagagcagaacccatcgagccaggttaggtgtcaaccttgttgggttttgtgccctaaataaaaccctttaca

SEQ ID NO: 116005 - DNA, 1981 bp, Cannabis sativa
cacactctaatcgagcccccctctgactattctttgctccatagctgtaaatacgtgcgtgtcatgctaatttgacccatatttttgtgctttttaaaatatgggttgtgccatgccggaccataaaaaaaatataaaacatgtgtcgtgtcgtgtcgtgccataagaagatatgggtcatgctgtgctatgctataaaaaaatatgggtcgtactgtgccgtgcaacaattttatagttaggcccgacacgactcacaagtccagtaattcatgccatgctcagatttatgtcgtgttttatacatgtcatctcatttttcttaaatggaccaacctgttttcttatacgggcttaaattcgtgtcttatatttttgcatttttattataattgatgagctaaatactaaaatatgtgtattttataattttaattacttttatgtattttttcaataatagttacacacaatcatataaaaaaataattataattattataatttgaatactattaccattttaattgacaattaaatatttatcattgttattattatcaaattattgaactttttaatgtgtcatgctttcgacctaatctattcgtgctttcgggcttgtcgtgtcgtgccaaaattcatattttctcatgtcgtgttgtgtctgagcacatatttttcaatgtcggctcgtgccgtgttaaaaagtccggcccatatttacagcactactacgctcttatcaatttcattccctgatcaggtctagaaaagacaattcctcaagtcctttccacttaaataaccatgtagccaccaagaattaatcttaccacatcatacttcttcagcctcattttcgactcgttcggaccttcatttcactcagttgctttgttttccttgagaaggcttgaatcaccaatcaacaagtttcttcttttcgaaacaatctaacaatatctagctgcatcgaaataaacttatgcataattcataggaaatccagaatgaaattcttaacacacttgatgaatatgattatgatggaatctatgctgttattttgtgacatatattttgtttattacaatagtttggatgagctccaagaagggttaaatgcccttcatgatgttctaaaactggatttaccggacatgaaaaagacaaagccaaagccgaaagatacctcttcgaatgcttcttcgaacacatgcgaccgttgtggaagagacttgtatgcttctcaagacaaagaatgagctcttgagttaatgagtgagcaaaatttcatttctagttttaaaacattttacatatataatacaatagtatattaggctaataatatggaaactctgtctctgtagtaacttcatatattattgttattattatatgtttagataagcttaagacatggatcttacttagtctaataatgttaagaaacttcatcactgatgattggagaatctatagaatcaatttaagatcattttcacaccttactcttgagtttgaatcaattccattttatgttttgttagagttaataatgctcttttgattttcttcattattttttcaaataaatataataatcaaaataaaaacaatttggtaatttaaatggcattttcttttacttaatcttttttctcaatttcagggtaacattttctagaatttctcttagatttgagcccatagccgatgatagaactagaatagatattttctggttttttagtcacacaacaagcctatatccttgctcttttattaatttctaattctaattttctttcccaatctaatattgctgatattttctgtatatttcatttactataaaagtaggtgattcgaatttgtgattatttgtttatcattatttataggctaattaggatttttgtcctctgaactttgacatgtaccgaatcatgctccctgaacttttaagatcgtt

SEQ ID NO: 116006 - DNA, 1597 bp, Cannabis sativa
  modified_base (59)..(59): a, c, t, g, unknown or other
taccgccaaaaatacgacttaggtatttatctgctactcggcataaaacttaggtattnatgccgcaaattactctttattaattatttttcttaattattattttagtttatttaataaagaatttattaatgattttgtaagaaaaacaattaataagttcttaattaaataaattaaaataataattaaaaaaattaataagttcttacaaaacaagctaagccaagggtaagtacatcccattaaaaaacacacaaaataaacaaataaacttgtatcaaaattaccccaagcgaatgaattcctcctcttcaaaagttaaaaaatatatacgttaaatatatatatatatatatataagagtttatattattgtaataatatataataaatttatactttttcataaatattgaataaaattctcaattttccataaattattgctacaataattcctccaaaaataatgaaggtaaaaaaacaataaattcttctataaacaaatttaaaatattttttcttaatattacgcatcctacacacttggatgatcataacttcatccataatgattataacagtaagatcacaaaataattgcttaattttaatacgaagagtattccaaataatactcccataccaaatttctctaacaacactaaaacactcaatatagatattactataatataatgtattgaataatgacattaacaagaccatatctacattctattgagaatggtttaaaattaagaagagtaaatagaaattcttcaataatcatgacgattttgaagattttcgcgaattgagtttcacactccttcattttagtaaattcaacatcttttagttttagtaactcattaacctatcacagtaaattaatataagagttaataaaatgtactttttaaaaaataaaaataaaaataataaagtgattatagaaaatatatattttacgagtttaccctctattattgttgttgttagttcattctctatcgttgtagcagtaataagattggtgggaggagttaaggtgatcgcagttggtgttagtgataatatagaaagagttatttgtggtgtggttggagtgatataagtagtgtcataaaaaagaaacacaaattaaatagagtttgaaaacctcttcatctctactactctggttaattagttatcctatcatgaaagtctatattattgtatatttattaattagttatttagaatatttactctttaaattatgatttgtaatttgtgtctttaaattttatagtcatttaattaaaaagtcacatcattgaaaaaaaaaattaacaaaatagtttctagaggaaattctaaataatctaagtaatttataaatatattttagtagtgattgtataatacacttgcattatgtataatactatataattttttttttattaaatgggctatatatatacgaataactagctagctacacattatttgaattacgagctatataaggctcttagtacacatgtatatatgtgatcatctttacctctgctttttttttttttttttttgtccctttttt

SEQ ID NO: 116007 - DNA, 1407 bp, Cannabis sativa
atatatatacatatttatatagatgatatcctttttccttgctgcaaatttgttttgtttgtataacaaaacaaatagtttctgcaggaaggatcctttgttgagtttgaaaatgagagcctagtgagtcccgagtcactttctataaagaaacaatcttttcatgatcctgtttgtagatctttgtcttcttgcggttcagaaaattgttctactacatacatggtcatggggaatagtgtggctgaaagcatcaaaattgtggtcttttctgccaaaatcaacttactaataccctttggtcctttggcaattgtggttgataaattttcaggccataatgtaagttttatacatatgtatataatatacatacacacatatatgtcttcttctggggtaataaaaatagttatatgggcccttttcatttgtgtatttttgtgtttcagggatgggtttttatcttaagcttattaggcataatacctctggctgagcgtttggggtatactacagagtaagctttctctaattagtatccaacaccatgtttgaaaaaaaaataagacaaactttaaattgcaaatatgtccttaatgagtatctaatgctggtttgactttcctttgatccagacaactcgcttgctatacaggacctacaggtaattttactctccatagttctacgttttaacaacactgacttttaaggagacgacacaccaactctgatgacagattattgtaaattagcctttgaattttttggttgagaattataaatgaatttttcatgagactaacatacttattttacttcatccttgcagttggagggctcctaaatgctacttttggaaatgcaactgagttgataatttgtgtttatgccttgaggaatggcatgattcgtgttgttcaacagtctttgttgggttcaattttgtcaaatatgttgctagtgcttggatgtgctttttttgccggaggacttgtaaattctaagagggaacaagtctttaataaggcatgtatgtttgaatgtttctaataaattgaagcacaatcgatccatcaaactagtttgatttaactcaaattgtagtatatttttcccagggagcagcaacaatgagctctggcttgctattgatggcagtcatgggcctgttgttcccggctgtcctccattctacacacacagaattacattttgggagatctgagttgtccctatcaagatttactagctgcattatgcttgtggcatatgctggttatcttgtttttcagttgaaaagccagagtaatttatatcattcagttaatgaggttagtaccaaaactatttatttaaaatgtttacttttgtacactataccctcttaaggttttcactgtt

SEQ ID NO: 116008 - DNA, 4363 bp, Cannabis sativa
  modified_base (297)..(318): a, c, t, g, unknown or other
  modified_base (3375)..(3378): a, c, t, g, unknown or other
aaaaaaaaaaaaaacccctctaaaagtataaattgtatatagatattaaaccactaagtacatatttttttttatttggactcttacatatcagatcagtattacatcagctaaattattttttttaaaaaaacaataaaaaaaataaaaccaaaaggatgtatgcaattagttttatagttcaaaggaatttattccaaaataaattaaaacaaaaatgaggcttaaacaaaaaaaaggtcataataatagagtaataatcacatatttacacaaacaaataataataataataannnnnnnnnnnnnnnnnnnnnnaataataataataataacatatagaataaggatgagatttaagatcaaatgatgtgtagctaattataggattatactattatctaggtgaccaaaataccattaaaacttaataattcacagactaagtccactactctaatagctagctagttatagtagctactataatatggagtctttttaattgtattatatataaatatatagtattatttagtgaaatgcagttaaagattagacgttgtttcaaatttagtctataatcatttgttggaattcaagaaatatgttcagcggagtgttcatttggggttaagctttgaaacctagttgaaagatgacctagatggatgctacctccttctaattgttttgctctagcgactgatacttcggtgattctggggagggactttgttgggggggtgatacaggatgctgcaggtgtagtttggctggcttggtcatttggtgtgttaggtgattaatctgttaatgtgtggtagagttgcttgcaattagattgagcctgactcttgtgcatcaatttagtttcactatttctattattaatagttattctattgtggtaattggttggattatattttattacatataaattatttattaactgttgttggtgtggtggttcttgcagcattattttgtattctgcgatcaataaatggtgttgcttataaattaacaacttctattactaacttaggagagtgtatatagataaatgcttgtctataatttaaaattcttttataatagcatatttatcaaaataattatattttgaaaaaaaaattatttcttcaagactatgcatgcaaaaagtaatagtagtaataataataatgataaatatgattaaatgatcaataattcaataaaatgataagtaaaaagatatttatttttataggtggctttggctagatgtaataatgaattaaaagtgtgaataattaattcccacgtagtagaatatgaaaggactagagttgggataggaataaatttcctgttacgctgctacagtctcaacaaataaaagctcctgttaccatcacatatattatatatataaatataaataatttattattattattatatttatttttgtatgttatatatattttacaaaacaaaaatacatatatatatatatttataaacaaattgtacaaaattaagactcatctcctttcgttcttctaagagacagcatccaccttctcacaccacccaccacactcatttgattctcttttcactctttatattacgatggaatatttacccaaagaaaaaaaaacctaaaattaataataattatacaaaaacaaaagggttcatcaggtttattatttgatttctcgctatgtatgtggtaacataaaatataatagtcctttatatgtttgtaatttcgggaggatagcatatataatatgtattatataatttttatttttttttgaacataaagtcttcattaaaacaaatcaatacaaaggattaggcaagtcttgcaaaaccgcaagtctcgcacaagggggaataaccccaatccacatagctctcactttgttaatcaaagcgtaattggctaaaacatgtgctacctcattggcctcccgatagacaaaggagataccaacaacagaactattacacatcaaatttcgaatacagtttagtatgccatcaacgtccctacagccgtcctccttagcatggattaaacggaccgttgcttgacagtcagattcaatactaaatcgttgtagtcctcgttgtatcccagtttgcaggccattgtgaatagccaacaactccacatgaagtggtgtaaactccttcggcacaacagaagccgaggcaaataggcactgcccctccgcatcccgaacaacacagctgaaacttgaatgcccctcaccttgcttcacaccagcaaattatgatgatttttatctcgtaaattatgatgatttttcaatttatgaaaaatagttcatgaaaaattatagttataaattagtttttctgtcaagttttatcacaaatgacaatcaaaaagatgatgtgcttagataattgacatgtcagtgtcatgtcaacatcacatgtgtaacaacagttgattagagctccagtgttagcactactatcgaataaagaaaagtttgtggtttactgctgttatcgcaaattttcgttaacgaataataagcatctttcgtaataaattaaacacgaatatctatataaaaaaattaataagtataataattataataataacaccaagtattttgcgtggttttgcatactccacgagtctatcttattcaagatatttctgagtatttgatacaatattacaagtagtgatctttttctttcaaagattttttgtctctttttctttagaatctgtctctatttataggaatataagttggcaattatttacatttaaatttgaattacataaccgtgtcatgaaacgtgagatttgatcacgtttcatttaaacacgtgtagataacactagataaccgtataatcgcttatcattcttatcttcaaagcggttgacgctgacgtgggtagaggcatctcgccaataataatttggttcgacccaaacccgagcaacctgcccgaacccgaaccgatgaacccacagtttttttttttaaaaatgttcgggcgggtcgggttcacgggttgagtttttaggagtatcgggttttgggttgaacctgaacccgcgcgccaacaacatatttagtatattatatatattttttattttttattacattttatatatattaattaaaaataaaaagaattaaaaataaaaactgttatattatatatgtttaatttaataaataaaagaaataattatttgaataaaaaattcattcttttaaagagttgaccgggtcaacccgccaacccgatcaaccaaaacccgccaacccgccaactcgtgccctattcgggtccgggttcggtttnnnntttttgaactcgaaacccgtgaacccaaaacctgcgaacctgaaatccggtgaacccacccgatgttcagccctacttccagcaatggcatgagtctcagtatactgagcaaacttgagaactgcactttgaccataaggcgtcgcagactggacaatcatgtccttcatgtttccaagttgttacacttagtcattcataatatacatgcctgaataatgcgagtcgttagatattcagccttgcctgtagctttatgttgttttatgagttaatctcatttacaattgctacttcaattttcctttctgaatagtaaggttcagtttttgactttatattgtccatagacaattttaatcaattatccttattagttggattttttttttaaatggagtgggtttgcaatatatcatgtatttctagataaattccagttaatatacacatatatatgcccctcaagtaattttaaaaaaataatactttgcaattacttgaacaatgcttcaactttattaataataaactttacattacaaagagaaaatacaacatttacattataagtttactggtaatagggtcgcaaatgttcaacattcaagtagttttttattagcgagccgttaagctgagccaatttataaactctagttccaactattgtctcgataacataaggaccttcacagtttgggttaaacactctagcagatgtatctctagtattttcaaatactcgtcttaacaccaaatctccgacattaaagagccttttcttcactcttttattgaagtatctcataattcgatgttgatatgctgcattagtaatttgcgattgagtatgcctttcttcaagtagatccaaggataatttaaggagttcttggttttcttcttgattatagaaatctcatctgtgagttgcaatattaacttttactggcagcattgcttctgagccaaatgccaatga

SEQ ID NO: 116009 - DNA, 6147 bp, Cannabis sativa
ggatcatcttccagtttcgaccatcgtaggtgaatcttaacaatattattaagttttgtaatccaattgggcaacttcctcaaaggtccaactaaagtgaggcgttgaagatattgaggaggggaagaaatagattccaaatcaattatctcattttcacttattgaacttacataaagactttcaagatgactcatcttctgaatacagtcacacaattctttattatcttcacttctcaacatagtgatgcctaaagttctcaactctgtcaactttttcatctcttcaaatatgttaaatcccacaacattcacctcaataatatataacttttgcaaagcttttagctctccaattcctttcattacttttgctcctcttactgaatcaaaacatagaaggccatcagttctattgtactgaagtttataaacataaagatgtcgcaactttttaagcttcttaatctcaattggtagttcaatcactagtgattcacttagatccaaagtctctaaatgttctaactttccaattgattttggtaactctgcaacctttgtctcacgaatgcttaagtatttcaagtggaagaggcttccgatattcttcggaagataatctaagtttggcgcatcttcaaagtcaaggacttttaggagcttaaaattgatggagatagcacttacaacattaggaggcaatcctttttcctcgaaaataaaaagagatcgtacttgggcaagttctgcagcactgctttgaatagattcataagatcctccattgacaactgacatgcgtcgacttaatatcctgcaattccaatcatttttagcaaaaatttgacaaaagtctaattctgccatattttttaggataatgtctcgcaaaagatcatgaacatgacaagtcttagcttttccagtactatatgtctctgacacttgaataagatttctatttattagttctaccaagtattcttcagctgttacctccaatgttttatccctctttgatttcacgaagccttcagctatccattgtagaatgatcctttcgcttctaaaagagtagtcctctgggaaatagccaacatacaagaagcaacatttgagataataaggtagatcattgtagctaagagacaagattttttctatgcttgtgagatgttcattactttccaactccgaacttaggcttgtaagtagtttcctccattcatcagcaaccttgggtttagttgataaaagacctgctatgactaccactgcaagaggcaatcctttgcatctatcaacgatctcgcgagacaacttctccaaatgacgtggacaatttccagcaagctcatttcgaaaagccttgttgcaaaagagtttccatgcattctctggtggaaggggttgtaaattatggatatgaacattcgatgatgttttgcaaaaattagcaacttccacatttcttgttgtaataaccactctcccatttctttcattatcatcagataaagcattttgcatgtcaccccaaaaaagagtattccaaacatcatcaaagacgactagataacttttgccttgtaagtaatctcttaattttctggtcatagtagttttatccgctgcatcaattccatcaggacatgcttcttttctactctcacaaaatttcttcattaacttttgtagtagctccaccttcttgtatgacggcgacacctcaatccatgcatggcaatcaaagctatctttcgaacgaatatatacttggtatgcaagagtggtcttaccaagtccccccatgccaaccacagagatcacactgcgccctgatgaaccagctttgaccttttgaatcaattcatctcttgagtcttcaatacccacaatctctgtttctttgaggaagcaagaatgtctacgaggatcataccacacattatctgatgtagattcttctctgactgtagacataaaaccaaattctttacttttttcattaatactacgaattttttgttttataccttgtattttagaggcaatgtcatggcgttctttaagttttataaccaaataagcatttcttctcagaaatccaataaatttatgcttgtgacgaccttgctgttgtgccacgagttgtgtgtactcgtcaataacatcttccacttcaaatgctgctctccttagttttccaacccacactttaacaccattgctattgtccatgctttgatgtgtttaggcttttacatcagcgtctttgaggaaagccataatgtagtctagatcacatttgatttcttctacgtcattatgcacaccactcaacaagtatgcttcttcagctagtaatggaatcaagttatctatgaccaacccaactgcggtttctgccatctttatttagttatcttgtaatgcactcgacttcttagctctgtttttgatgagcaatcatcaatttattgcacatttataaattattcataattgcatatgtttttttgccataagataatactactagtatattaattatatcaataatcgccatacatgaaaatttgttggtcgttgatttttcctaagtgaaatgacaaagtcgaagtgattgtcaattattaggacatctccaatgtggacaacattttttttcttaattcggccaccccgactaacttttaaagttttagctaatcaaaatttattttgtttttttattattaaaagaataagaggaataatcggcacatatagaccacactattttttctctcctgccacattatatagggtggactaataaatattttggcaagagatgggtttggattttgtaagaagaatctttggtagatgatcaagaagattattgggtaagagtgagacttgaaacactttgagaaaactcaatagagaatctttctcagctgtattatacctcttcttgctcaattaataaagaggatttggtagtgttccagaaataggggttgagccatagatcacatcgatctatcatacttgaactaatacaaatcttggtgttgattttattattttactactttaattatttcttattttccatactctgttcatccctgttttcttcctaatattgttcgtaatttgttaatctcgtcattgttaattgtttgattgtttaaagtttagttcatttgattccgcacctttagttgtaatttttctacaaatatcctatttgatagcaactaaggatgagtgtttggaacagtttagaatttggaaaactcaggtggaaaaccaaacaaatcttaaaattaagaaccttaggaccaataatgggttggagtttattaattttaaatttgacaagttgtatcaagaatttagaatcattagacatagaatcgtagtgaagactccagagcaaaatggtgttgctgaaaggatgaacccaaccctgttaaacaaagttagatgtttactgctcagttctgaattagaaaaatctttttgggggaagctctagcaacttcaacctaccttataaatagaagctcaaaaagaatgatagacttacaaataccttatgaaaaatggtacaatagaacccccaacctaatgaatttaagaactttcgggtgacagcatatgtacatcaatctgatcgcaattccactgtaaactcaactaatttggagaatatatattcctcttcaatcgcggccgctagacaactcaactaacaattaccaggagaatattcctcttctatcgcggcccctaagtacactttctcagccttcttcccttgttaatttgtgcccctaaacaacaattatccgtcgagacaaagaaatacaccttccgtgcatcctccactgaaccaaatcttccgtacatggatatgatattgttgtacaagaaaggtgattgccagacgactgacatggtggtgagcagcagaggtggagctgacatgcttatttcagcgaggaaacggttgtgcattttcgcactagagtagctaaagaagatacttcgtacagcataagccagtcgaacacttaaaaaacaatcgtcgatttgatatcgtaaaaggcgaaatctttgaactaattattgaaaattgaactaagcataaatatcagaaaatgttctcttcccgcctaaagcgcagcgtttaatgcgaccctcatctctttccttccttgaattctcagaccgaaaaatatctaagtggcgttgcttcatatattggtgttacaagtatgcatgtttttttgatttatttaatttgacttttctaaagaaaaaaaattattgacattgttgtggattaaattaattcattatatatatatataagtaaaacatgatatatgtgaatttatcaatatagtatattgggatgatgattaagtgtatcaatatagtgtatttgttgagtgtatcaatatgaacgatgcctaagcattgatacaaatattaactattcactattattgatatatgtttaactattcactattatttattttagtacattttactaacatttccaattcaatttttattttttgaaactttactcaaaatattacttcgtaaaactaacatacctgacttgtcacgtaacatctatctagtatataaaaaatatcagtaacacccttataaaaatataattagataattttgatttcagaatgagtattcattttatataaacagcataaacttaagaaaaaaaataataaattctgttaaattaatattttcccattctataaatttatttatttataagaagataataatcttacctacataaatatctgtcaatgaacatgtagctgagatatatgaaagaccctttgaaggtaataatatgcttgaaaatattaatttaggcacctgcaaaaaaaaaaaataattgaaaattcaagaataataagaaaaaagaagtggagaaagttaattaaatgagattaaagctctgatatatactttcttacatattcagtttctgatgatactttaacgagttgacgatggaagtagctctgagattaaattcacacaaaagaatacaccaataatatatatatatttatatatatatatatataatatgtagaaaattgtgaaagaaacaattctaatatttattggtttgagaatatataaagagagatatctttaaaataatctgtggaggaaattaaatgcaagtggccagattaagactgatcgaccaagaagaatattaattattccacttttgtgacacattaatttgtttatatgcacctccatataggcggacctaggggtgttgagggagggctaaagctcatcctgagatttaaaaatatattaatatactattgttatttttatatatacatagtaattaaatcgaacaattggttaagatactttaaatttatacgctttcctaataataagtaaaactagacacaacacaataatttgttatgatttattaattaataattgaacgttatattaattttaaattaattaattttgtaaaattttctacatttgagtaggtcacgttggaaattacaaaaataataataagctaaatattaattttatttattattattttttcttttgttttattttttttataaataaaaagggtttgaattattgaagtgtgtagtatatacatgagctgtcctgaattattaaagtacttttttttcgtttttatgacatgacctaaaaagtatatatatgtttgcttttcttttgttgggtatagattttgctttttgagatataatattcttcaatttatgaatggcatttttgtaatagtacagctgatcaataagaatgatgatcatattttcttttaaattttaaaagttaattaatccatagctaaacgaactttacgttttgttggtggtaggtatgcagaaagtcatcagatctaatctcaaccaattgaatcacaaccgatccaatagaatcagatatccaattataattggattggatccgatgaaaatttttaaaatttaattagatcggatcggatgttggatgagacatccgatcgaatggataaccaaatcgatccaatccaatatcatcc

SEQ ID NO: 116010 - DNA, 3801 bp, Cannabis sativa
  modified_base (32)..(61): a, c, t, g, unknown or other
tttagaaagttcttatttaggatgttaataannnnnnnnnnnnnnnnnnnnnnnnnnnnnntaaaataaattccaacatttactagggctaccaccttatagggagattgaattttgcattgatttgatttccaaagctcaaccagttattattgcgccatatcgcatggcccttgcagagttggccgaattaagaaagcaaataggagagttaattgataagagttacattagacatagtacttctccatggggagcttcagtcttgtttgctaagaaagctgatggaactttatcactttctgtcgattatagaaagttgaattagatagcaattaaaaataagtatcctttgccgaggattgatgaattatttgatcaacttggtggttgaaagttcttttaaagattgacttgaggtcaggctaccatcaacataggattagggaagaaaatatccctaaggctactttcaagacatgctatgaacactttgagtttttggtgatgccatttgaactaacgaatgaactagctgtatttatggatcttatgaaaagaatctttagactttacttggataagcttgtggtggtattcattgatgatatcttagtgtattctaagacacattaggattatgttcgcacttgacaatagtattatagaccttcagggatcatcaattatatgctaagaaagagaagtgtgacttctagatgactgaggtcaaattcttagggcatgtaatttctcaagatggtatcaccatggaccttgtgaaaatagactttatcatacaataggaaagaccaaagagtgttattgaaattcgttggtgttgaggaataaatatctaaaaagataatctttctgggattgtaattatcgaaacacagatttgtgtttttggaagagtgttgttaaagcaaaagacatcctttggaagggggcatgtagaaccataggatcagggaactccgtaaacttttggaaggatccttgaattccttatggtggtaacttctgtcctcctccgtgtggtgagccaagggaggggtacgaaactatgggtgatttgcttggcacaaatagtgagtgggacatccaaaaactaaaataactctatgatgatgatactactgctcaaatttcgaaacttagaaggatttcaggcataggtagtgatgggtggatgtgggtgaaagatccaagtggtaaactccttataaaatccacttatctcactcaagctttggaaagattagggagttgtgaggtggccccaacgctttggaataagttatggaattctaagattcaagattggtggtgtatcttatcaaatgcacttcttgtgaggaaaatcgttgtcaaaagacttgggtttgaggacttaatttgtcctatgtgtggtagtcaaggtaagtatggaacatctttttttgtattgtaactttgctggcctcctacatttggagatcttctccttggggacttatcctagttcaggaaagtggggcaagtattaggaatggctgaaattcctgtggagtctttacaagcgaggcatcaatgtaagggaggtttttatttttgcatccattatggtgtattttatttggaaggcaaggaatgaaaaggtacgtgataaccataatattgattttacttctcattgatatatcatgtttacttttgtagaatatgagtctattattctacctcgacaaatccatcctcaacctgatggatggaatccccctcctaatagactgtcgaaaagttaattgtgatgtggcggtgggtctaccttcaatgacgattgcaactgctatgaatgatcaatctaaaattttttgggtggctactaaaaaattgagttttaaggaccccctcattggaggttgtagcctacgaatctgctatgttgaacgcaataattaatgataattgtttcattattcttgggaacgattttaaagtggtgatcaatgctctaaaaagtatcaatattatatgggagattaatcattatgttaataattgtaagaacatttctaaggggctaatcgggtgtaattttttttactgttgggtggaattttttttaaaaatactgttttttttttttcaaaaatactgtataagttttatattgtgtattgtgtattgtttcactgttgtttcacgactgttttttagttgttttactattgtttttttttttttgaatagaaggtgaacttcattaacttataatagccaaatcggccattatagaagaatgtacagcactagggatattgatgacattaaagatgcaatcagaccaataacaagaaccgcgagcaagacaatgagcggttttgttagcagatcgcgacacaaaagtaacagaaacatcacacaaacaatttaacaaacgtttacaatcggaaattaacaaaccaaaaacagaaggcataaaaactaagctagaaagtgcttggactgacacaagggaatcggtttcaacaaccacattagaccagtctttgtccttgatccagctcaacgcttccttgatcccaaaagcttcaatagtggccgattgaacattccctaaccttagagtagtagtagcttcgatcaagtgaccattgctatttcgagctacaattccaactccatacgatccaatactttgaaaaattgcaccatccacattcaccttgattttatttgcttcaggtttagaccaatgctcctccttgtgatgctgattttcgggcaccaacaagggttcaaaccgattagactgagcataactccattggtcaaggactgaacgcgcatgagaaacaacttcagcagcagtacggctcttgttcttccaaagtaactcgtttctagctttccaaatggaccaagcgaccattgaaccttcctcaatcattcctgcccgtcctctatgcagtagggattcgaaccaaagtgaaaagtcgaatccgacagcagtagcagcagtgctcacagcagcccgattccagcaactttgagcaaattggcactcgagtagaacatggctgatggactcaacactcgtgtgacagaaaatgcaagaagcagggacatccacatgcttcttttggagctgcattcgagtaggtaagcattgagtgagagccttccacataaagtgcagaactttaggtggaatcttaattttccaaagctttttccacactaagtcctccatttcatgaccccaatttcctttattaagttgaataactttgtatgcgctcttcactgtgtaaaatcctgagtgctcatgtttccaataataattatcactccttccaacattaataggagtattcataataacagaagcatctctatgattaaacagatcactcaccaactcaacatcccaacactgaccatttggactcattaattgccgcaccttgctttgatcaagagctgggtgagaagatgtaacaaaagggttaatgtcatcacctaaccatggaagattcagcacctcaatatctcccactcccactctgatttttgcaccatcaagtattaaactctgagactcatgtatgctacgccatatgtaactcgggttggcaccaagagaagcatttaacattgagtcatgaggatagtaacgagccttatacactcgattgaccagagtatcagccccctgtaacagccgccatgcttgttttccaagaagtgacaaattgtaatcccgaaggttgcgaaaaccaaggcctccaatgctcttgtgacgactcaatc

SEQ ID NO: 116011 - DNA, 764 bp, Cannabis sativa
atatattaaaatacgaaatttcaagtctgcttgcacaattttaagcaatgccaaacatctaaatgaatgtaattattttaagtttgttgagtgttataaaatagtttaatttttttgtttctttgaattgtacaatactaaaaattatataggaaatgttcggtttgtaaagaaatttatggttttttgcttcaaagctgtaggatacacacaaacgtaataattatcaatttatattgatcaatgatcataataaacatgttgtttgtactccaacttcaactttaataatccaaagaataataaaagatcattacattctaaagttcttcaagaaaataaaacctaagaaaaatttgtattttaaacaaatacatcaattcgggataatagaatttgtgtgacccattacaaactataagttaacacaaatttttaaatatttaattttctgagatgaacaaggaagcataagattttgtcacgtgactatttctctataatacaaccaatttctaataatgtactccatgtaataaagaaataagtttttgacggcgaaacatttttaattattgttttacttacacttaatcgttcaaatccaaattttattagtaaaactctctaaactactaaacttttaacaaatttaaagtatcattcggttaactgttactatgaacggcttatgtgtacacatttttacatatattatgtttattggtacacctaatattattatttaaaattattttaaaatt

SEQ ID NO: 116012 - DNA, 2696 bp, Cannabis sativa
aatgaaagagagagaaagagaaatgcagagagagtttgagggaagaagagagaaagggtttgagttatgagaggggctggtgcacggagagaggggggctgggtcgtgcatggtcggtggtgggtggtcctcggtggtcgtcggaggtgggatggtttgggtggggcggttgtggaatggtttgggtggggcggcgaagagatgccgagatagagagatgcagagagagtttgagggaaggagagagaaagggtttgagttatgagaggggtattttttggattttgaaaaaagtgtcatattttttttagtttaaaatgtattggtttaagaataaaatattaaaattttttaagtataaaaaatcaaatttccttatattattatggtacaaaactatacacaaacaaaacactaaattaaaggtacaaaataattttcaatagatatcataataaaattaaatatcaattaaagattctttaatacaccataaaattaataaattataacgttgttaagtaatctaatcaaaagaattaaaataaattttttaaaaaataaagaaataacaaattataattgatttgacacataaatatatataaaaccactccaaaaagcatcacaatcacccaaaacaatatcaatggaacaataactaaaataataattaaattaagtaatttgcagcataaatacttaagtttaattctaagttgtaaataaatatataagttttattttttacggtaataatatttaagttataattgatccatgtcattaaatttttattttttataacttaagtattaaaactatcagaaattaaacttaagtatttatttaagaattaaatatttacgctataaattaaattaaaaaaatactaatagttggtaatattaatataattaaattcaaacaatatataaaaataaaaatatatggtaagaataaataagattaaatttaataaaaatatataataattaaaaatatatatgatagatattaaaaattgatataaaatatcacgaaaaagtatcgatagtgtctagcaccgctttatatgtcatatcgttattggtataatttaattccataaaaaattttgaatttgattataatttaattagtaaatttttgttttgttcaacaaaattccgtactctcattcctacaatttagctcactttttacttaattaattttaaaatttctatatggcggctatataaatatacaaatacatacaattactgtgttgcagattgcagtagtcgaaattaattaacatgaaatctgaggaaattaataattataataataataataacgctaattattattcaaacagagaaggcgatgaagaattatatagcgtacctataaatttcaaacaactaatttcttctccgctgccgaatccaaatccgagttttgaaatttttgatagtatcgtaccaaatgcgtttccgttaccgaatatcgtaccaaatctgttttcgatgaattgtatagagccgattagtgttgatcagtcggaggagaagaatctaacggcggaaatgatgatgatagattcaacgaacaacaacacgaagatgatgatgacgaagagaaggagatcgtcttcgtcgtcgtcgttgggggaatcgattgagaagaggcaaattagaatgagtaagaatcgagaatcggctgcaaggtccagagccagaaaacaggtttttatttttctttgaatttgaatttgaattttttaatagggaaactgttttttttttattttattattattattattattattattttatgaaggcttatatgaatgagttggagcagaaagttgaaaagttgagccacatgaatgaaaagttgagcaacatgaatgccattcttctacaaggggtaagtaagtatttaattacaatcttttactataattttgtacgtttgaaatcccatcaaaatattttttgttaaatttcttttacaataatatttgttataattatatttgttataatatttgttatcatttcagtttatcacaaaaaatattctaactataataaaaggttaatgttaagtaattatgtataatatatgatttgcttaattttatatatattaaagatgtttattactaattattagtgtaaatgaattattaagaaataataattagctaacaatttgataattataaaagttggattaattatttattaggagaaggaggcagagagagaggaagattggtcggtggggaggattacaaagctttctgctccatacactaatttccaaccaataccattacttaccaataccaagtattcggggttttttttttttttgttaaaaattcttctttaatatttgtaccaaatataatatgtttggctcacaagagagctagtggccaacacaatgtaaaactataaaataatatatattcttttttttttttaatttattttacatgtaatttttttaaaaaattaaattattaagaaggaggtgcatggcaccatccgcctccattaccccatatactggttttttaacttttacggtataggtttttaaagtggttgcagccctagttgcaataagggtttctataagattttttgttgcaatttaggttgcagcccgttgcaataagagtttctatgtaa

SEQ ID NO: 116013 - DNA, 1352 bp, Cannabis sativa
agaataagcgagcaaatggaactggtagccacaaacaaaaataagtgagcaaatgacaataattatgataaggtgattcaagattggtgagtaaaaaatatctatccaaacaaagatagaccagcctaaaaaaataagcccaataacataaaactaattcattctaatacacaagaagcatgaatatatgtatgaacattttgatatcttcaactgtctatgccacattgggaagtagaaatttttagttttatgacataggttaggctaattaagatttttcccattcaaattttgacaaatatcaaattccgctcgtgaaatttttaagccgttaaaatttttttttcgaactattgagattgttggatttaagaactttcatccagttcctttcaattttactattgggcgccagacgtggacagatgttcgagaaatattttagtacatggacaatcgtcatgttagatgttcactagtaaaattgaatagacaatttagtacatgtcaaactttaagaaaagaaaaccctaattaacatttccattatgaacttaatggttattttacattgattctctttattataattaataacattttgccaaatttctttttgggtgcagattgctgttttgggaggttcgttattaggttcattcttatcagagaaggtatgagtcaattcaagcatttggccttcaactattgaagacatttttttctttctaaacatatttaacttatttacttttttatcttctaatgtcactcttcaaacactattggctagccataccaaaaccgattaacttcaaaacatatcaaatacaaatgtgttgtcatgttctataatccagaaaagtttctatccaatgcaacttttagcaggttgtattttttgcgtagtacactttataggttagaatttgtaatgagttactcttacccttttgatttcataacattttgaaattgaatgaatatgtattttagcttaaattccacttacccttttaatgattgtcattctgtttttgtacaggcaatcgcctacgttggaggtgttctttttctagtctttgcaggtataacattaattgagatattgaactgaaacccctttgaggtatttccaccataacatttagcattagtgttgtatttatggttatcattttcagatgtatgggctatctttatgcagtgactatgatcttctaaatatatagtgaaatttatatatttatttattttgaaacaaataaataataatgggtgattctacaatacacccccttaaaagggatgtacagatgcactctctacttatttcggcatccaaaaaa

SEQ ID NO: 116014 - DNA, 2552 bp, Cannabis sativa
aaaaatgtaaatattttacaaaatgtggtgtcttatgtaattattcctaattattttacatattttttacctcaatgcagggtaggcttaagggtagaaacagtaagggccacgatgaagccctcactcaggcccaaaaaaatcttttaacaaaaagactctaaatttattttttaaaaataccatattttgtaattttactattatttatttaaaaaaattataatgattttctaaaacaaatacttaacttatttaatattttattaagaaaaaagttcaattatatttttaaaatactatattttagatttttatcaatatatatacaaaaaaaaaaaaaatgtataaattttttcatataaaaaaagctcgattagatttttttggcttaagattctcaattggcttgagacggacatgtctcaataaatagtgtttagctaaatataaaaataactattcattgaggtaaaattattttattattatttgtttaaatgatgtagagaaaaaatagaaaaattaatatgtgttgtgatgtaaaaatttaagataaaataaataaagtagaattttgataatttattttaaaaaataaagtaaaaaaattattgggagggctcttaaatattcttgaagctaatttgcatcatcctaagaatacttgccatcatccttaatgttttttttttattataattgtaaaagagtggttacaaagttattctttacaaaatataaaatttctctaagttattctctagaaaatataaaatttctctaagttattctttagaaaatataaaatttgcaaatagggatatagagaaagagaagtattaatgaaaagagtaagatatatgagtgtccaatatatccttattaccaaaactcatatcacactttttctagaaagggaggcattaatagtttcccactaacaacagtgctttattttactgttttgagtaatagctctgtcttgtttcaagtgtggtgacacaagtcatgatgaagatgtttactattgtgacaaaatgacaatcaaataagttagtatgaaaaagaagtgactttgcttaaagaattcactattcaggaatgatgaggacaactctctctgaggatttctgttgaaccactaattttcaggccattaatgataacattttaatcttcccaaagtcctaaaacttcagcaacaaaaattgttacttgtttgctatactaacaattggaattttgttcatgaactactaacgtggctttttactttctgctaagcatgcttttctttcaaattattattacctttttggaaaattattatctgattttagttcaaatttgttttttttttcttaaataaaatattaatttcattaaaatagcttagtattctgagtacgtaagattttgtaattctactgaaataggaaaattagaagtgatacaaccaagttgaaatcgagatagtatagtaagttgtccacaatatagtaaattgtcttagttagattataaatcatgtcaatttgataaacattattgccgtagtttaagtcttagagtcaataaacgtgttagtgttccttttgaattaatgcatttggatgtttggggtccttctcccatcctatttaaacataattttcgttattttgttacttttgtggatggttattctcgtgtcacttagtttttttgaagaagaatcattctgaattgttctttattttttgtgtcttttctgttgaaattcaaaattaatttaatgtttctattcgtactttgagaagtgataatgccaaagagtacaaatttagtgtatttcaatcttatatggctcaaaacgacatgtttcatgaaacttctcatgttgatattccatctcaaagttgtgtagcagaacaaaaaaatagacatctccttaaaataatttgagctctcttattttaaacgcatgttcctaaactattttggactgatgcggtttctattgcatattttttgattaaccgcatgccatattctattctttatggtgaaatccctttcaaaattttttttcccaataagccattatttcgtattgagctaagaatttaatgaaatgactcaatcgaatgacctttagcagctttcaaggagggtaatacctactatctactatacccaaagaggaggataatacctttgactaattatacttaaaatattttttatttttagtttattagtaatgttgagctagtgaaatgtattatgtgttaaattctaagtttgtatattaatttttattaggggtgtacatcaaatcgctcaaaccgccggcaccgcaaaaaaaaatgcggtttgaaattcttcgcggtgcggttgcggtttgaattttttccaaaccgcgcggtgcggtgcggtttgcagttttgaattatcaatccgcgattcaaaccgaaccgcactgcatgttttaaaatttcaatttttatatttatttaattaagcccatacatatgagcccaactcaagcccataaatcttagggcaaa

SEQ ID NO: 116015 - DNA, 2246 bp, Cannabis sativa
  modified_base (2195)..(2211): a, c, t, g, unknown or other
ttgtcatttaacaaaacacagggtccaattaataactttcgtaaaacagagggtctaaaatggtatttacccttatttacaccgaacggaaggaatgagggctattctcgaatatcaaattttcattgagtactcctacgagcttcactacttcattaatttttttttttaattttatttcacacatttatattctatacatcaagggtttgttttgtttcgtacgtcggataagggtcgtattgtattaaataataaatatcactatgtttaaataaagcaatgtattgtattaattattacgactaaattttttaatacaatgtatgttgtataaattaatacataacaaatggtatgtattatcttgtactataatatttacaaaagatttggggtcaacaccaatctccgatccgaacccaaacccaagacccagacctagacccggaaccggaccccgaactctgaacacggacccagacccgacacttggacctaaacccaaacctgaacccaaacctcggacccagaccccagactcggactccaaaccaggacctagaccccagacttggactcggacccgaactggcaaccgggacccaagtgctgaacccaaacccgggacgtggacccgggacccaggacccaaacctgagactcgggacccagacacaagacccggacccgcactccggacccgaaccaggaccctgaatccagactgggactcagggcccagattcagacccagacttagacgtggacccgcaacccgaacccgagactcgagactcgaacccggacctgggactcggactcggactcgaacccagaatcggaccgggactcggacccgtgacctggcacggacccgcgacccacgacccgaacccaaaactcgagactcggacttggactcggacccaaatccggacttgggacccgaactccaaacctggacccgcgacccgaacccgagacctgagagcgcggcccggactcgggactcggacccgacccgtgattggtgttgggatcaagtgtattgaaaatacattataactttacacaaactattaatacagattaataccaattatagtattgtattaaataatactaatataatacaatataatctaacactatacaatacaatacgacgtactaaacgaactccaattttttatatatttcactacatcacgattgatataatatatctataatacataaataataaaatactatatattatatactatatttttaattaaacactcaaaagtaccatataaaaataataaaatattataagtatgtactaaaacttaaaagttttttaactacatttagctacacaatatttgtgaggtaaataattaactattagccatgtttttagctttatagctataatatttttatacataagctattatgagtgctcttagtgagaacacattaatgagcttccaattaagaattaatcgtacaagtaagtcatatcattgaggattcttttacatgattttaaatattttttttgaatatttaaatattaaaattatctaactaaatacaaattttgcataacctatgccgtttatgcttataaataaattcaaaggatattagaggcaaaactatataaaatagttacatttaatttcataaatttatttttcgacagtaaatttttttaactatttactattccattgaaaaacttctgttaaattttacggaagacttctcacatgtatacaatattgtacacacgataaatttttaataattcatataatattaattattaaaatcttatcaaaaataatttaaacatattataaattcatttataaaataaattaaattaaaatctaaaataaataaataaattatttctttttcttcttcttgtgtacacatcaacagtacacattagcatttaacagcagcactttaacaaaaatgtaaaaacaaaatagaatgggggttttgaatgttttaccatcaaaaatagatttatgagattaaatgtaataaattgtatatagttcatgggattttgatgctaatatacctaaagtcaattataaacgaaggccataaatttgctaatagaaactaaattctaacaactaaaggtaccgtttgataatacttttgttttctaattttttaannnnnnnnnnnnnnnnnaatttttgtttttaaaaaattttgtttttgaaaaa

SEQ ID NO: 116016 - DNA, 1952 bp, Cannabis sativa
agatccaaactcgagaatcttcaagcaatccaaacattggcttttgctcaagtaccggaagaagaacgaataggcttaacctttgtgtcttgcaggtttcttcagtagattctatccaaagttggaagctgacactcatgtagcctcggccaccatttccttgacacttgtagtacttgtagtagacactattgccaaatttagaaacaagttcataagagctttcattcctaccatatgtcctcccaaatctgatcctctcactattaccaatttttacgagaaccatttttaggaagtcatcatataaagcaacaatactttaccatgggcctatagatgacaatctttcaccttccttagtgtcccaaagattctcgagcaccccatatttgattttgataactttatgccacaaaaacttatgtttcattgaaaaccttgataaccatttcataaggaatgttatgtttctcagctccaagttacctattccaaggtccccttgaagccttggcttacatacggtatcccaagccaccaggtgatctaaccccaccatgtcgcctccctcccagaagaagtctcacatcaacttctcaagggtgtttacaaccaatttgggtgctttaaaaagtgatagacagtcagtaggcaatgaaagaggactgattgtattaatatcaatcatcctcctcgagacaagtaagtgctcttccatccatcaagtcgagaaacaaatttggccactaatggctcccaaaacccttgtttcataggatttccacccgacaggaggccaagatacttcagggggcattggcccactccacaacctaagttgagagccaaagattctacttattcccctgtcatattcaacccaagtagctggcttttgttcgtcttcactttcatcctccaacgagcactgaagacttgtacaatattcaataacactcagactgagcttttcacgaagaagaccatgtcatctgcgaactagagatagctcacttcaactttttccttttcaacatggagtccttcaaaggaatttgtttcactaagacgtgtctactaccctccctagcacatccaccacaaaggatataaagagtctccatgtctaagacccctgcacccaaggaacttaactaaacgtctcccatttataaaaacaaagtgagatacaaacaacccttgatcaatttttattaagattttttaaaaaggacaaggtcaaatgtcatagacaaaccattatccataactttattaaaaccttagtaaggcagaggaaaaccaagattacatgtgcaatgtatacttaataacaatgtttaaaattacgcaaataagccttgaggcgtttttgttttgtgaggcgaggcgtaagcctcaaaaattaaattgaaagaatacttttagaagacctaaagatgaatgaaatgtcacaaggcagcagcaaagaaagttttttttttctctattttctttttcattgctccgtggaagagagaagaagagcagccatgctactgataaggagatgtgtttaagaagagagaattatgttttttaaattttatttgggctttattcaattatttttacaagttttattgggcttttaagtgttttaagttgtagcagcagaaataaacaatgaaatgagttgggcctgtttttagggctcaaatagacccaagtttaaatcagtggtttgtacgcctcttctccctaaacgcctcagagcaaacaagaccgcctcaatggttgaggtgtacgcactgaggcttttttcacacgcctcaagttgaggcgcgcctcaaaaatgcctttttaaacattgctaaaaaaaataccatactatttcattatttctttttcttcccgagttaaatgcttttactattttttttttgaaaaagagaaagaggcctttgtct

SEQ ID NO: 116017 - DNA, 1524 bp, Cannabis sativa
gggtttgaactagatgggccctaaacacaagtctaattcacctatgtctagagttgggcctgtagctacgtatgatcgattgaaattaatagaagagacataattcaataacaaatatagtttgggtaattttttactaatacgtgaaagttttagtagtacaaattgaatgtaataatagtttggcgaaaaaaaatctatttactcgaaatatggtgtattgttttttgtattatagtgcaagtttaaagaaggaataagagatttacgaaagaaagtgagtagtgtcacgtccaattttaaaattgggtggaccttagaaaataaaaattattgaattctttatttaaaatatatgtaatatttttttaaaaaaaaatctaaattatatatctttaaaggaaaaatattattttttaacccagataagctctaagcgtggacttaatttacctaagctcaaccccgaccaaaagtaacatttttattgattgagttgtttgacaagtccaaaataaataaataagaaatttcaattattattattattaagtatataatataaggtaattttgttcaaaaaaaaaaagtatataatataaggtcatatgatatggtattgtagtttagacaataaaataattaatctaataaaaaaatcatttaatatgataataaaaaggaaacaaatttggtgggcagcaaacgtggattaattgattaaataagtagatgagaaatttcctctcctttgataccttttttttttcattgggtcacatataaatccttcaacattggctgttttgttcttatggtccattccatataagactaaattgaccccaaattcattagtctatcttagtatctttctcctaaaagcagaaaagaaatcaattacaacacaaaaagttgagttattaattgctctttttctttttattattattataaaatataggaatgaaatttatcatttattagtgagtgcaagctaacttgttctagttctaagttccttctatcattaccataatcatttgaaggcaaatcaatccaattccacacaactaggcaataattaatcacttaccatttgccaaatgtcctgaattcatgaatacatgcaaatgatatgggcacctataaattatgccaaaatataattcataaggacaagataatttttattttatttttattttcttagaaaaaaccaatcacatttttattttatttttaaaaatactaatcataattatctaaattatcattaactatttttttttatcatatattcttatcgatataattaagtacgtgtaatttatgagtataagtaatgttaaaactacatatatcatatatattatatgttattgatataatttagtacgagtgaatttttattgagataaaatataatactaactattcaattactaataatccataaccacttgaggctagctcaagtggcctagggagtgtgtgtgttggaggtcttgggttcgagtccca

SEQ ID NO: 116018 - DNA, 6818 bp, Cannabis sativa
  modified_base (179)..(183): a, c, t, g, unknown or other
aggtcggggtcgaggtcaggggtcgaggtcggggtcggggttcgattgaggggtccgtggtcctagttcaaatttttgtttggggtcaaggaatgggtctagttctggggctgggttcaaggttcgggtctggggtccaagcttggggtatgagttcgggtccaggtttgggtccgagnnnnnggttcgggtctgggtctaggttcgtgtctgggtccaagttcagattaaggtttggggtccggggtctagggctggggtcaaggccgagtttggcccagaccttttgtaaatattataataaaagctaatacgcgccatttgttatgtattaaataatacgactcacgttgtattaaaatttataatcataataattaatacaatacaatattttatccaaatacgatgttatttgttatttaatacaataccactcttatatgctctaccaaattaacctttatgtatgatttattgttttgctcacactttttactcagatttaaaatagttgtttggtatatttaaatgtgttttattatattacagtgaataattgtactatatgtaatatttttatataatacgtttgatattgacgtgtttatacatatgtatgaataatatttccatataaattaaaatttaacgtaatattatataaaagtataatataaaatacttaatatacaatataatacgatttaatgtagcgtatcaatttaactttcaaaatttgtagaatttgaaacttggagatgactaacgatggtagcacataaaagcttattgtttcttttaaaaaaaaaaaaaacagtgaacatgacttttttttagccaaaaataattattttgcctttacttttgaaataaaatatgataaaattttgatgatatattacttttaacttgaatgttagttgaagggatttatatattttctttcgaaatctaacactatgtttggtaggagggggagacgggtagatggagaggggtggagggagagtgatggaaggaaagactaaatcacttgtttggcaagagggagataagaagggagaggagagatgaagggagaatgtctccctccaaaccttcaaaatttaatcccaaatttagtaggattgtagaaaaagacaaaatacattttataaaatacaataactacccttaaaaaaataataattttatttttaaaaggataattttataattttactaatcaggtttttctccatccttcccacctcatatctaataccaaacaatacagaatgtgaagaacttcaaatttgggatgtaaaacaacaaatttcaagatattcatttgaggccgtaatgatttcaagatttaaataattaaattgtgtatgctatacactctaaatgaaaggttctacaattctaaacatgcagatttttgttttttacaaaaaagaaataccaaaattaaagattatatatattatatctccacttgatatcgggatgcataattatgcttcaaccaagttttaatcaaactttattgcaaaaccattgtgaagcatcattttaacaatattttggcgaaaaatcaaatttttattatgtcattgttaagaaatgttaatcatcattttttaaaactataaatttacatgctaaaatcataaaggtatggttaagcaacgcaaaaatatatttaagtgtcacaaaagcatcgtcaagtatcgcaaaagtattgctaagttgatttttttttacaattaaaaaaataatgtaataaaagcaaagggaggaaaagtatagttaaatttttacataaatatttttgtgatgcttaatcatatatttttttttctcatttacacttttcgttaactcatttgttttcatatgcgtttattttttattttttattgaatttttaaaaatagaaaaatttacataattgaccacaagttttgaaaaaaaaattacaacatgaacttttcttttatttttatgttttgaatgttttttatttacaaaaatatcttcagtaaaaacaataaataatttcttttggttgttttatagttcatttatatttgtcatgatgttatttttctgattgtttaatagtttatttataattgtggtaaggttgattttttattattttttagttattttttcactttttgctgagcaaagtatatttttgtaattttaaaattttacaattgtatttttataaataaaaactttaggctgtaaaattgtacataaacataaaaaaaaaaaaggtatttatgaaaattcccctaaaaaatatttatagcttattatcctcctctaacccttaagattctactataattttttttattaaataaaatttggattttttattttgtaaaagttactgattggactctctattttgttaaatgacaattcatgccctgtatttttcaaaatagaacataataataccccgagttggaagtgttatgacaagattagttatatttttgacatctcttttgtactagaaactggatttagattgattatatattttttagtcatttaaaaaaaatgaataaaattaagcttagggtattctatataccatttcataaaatataaggtccgaattgtcatttaacagaataatgagaataattattgataatttttacatagcatagggtataaagtgatagcctatattttaatataaaaaaaaagtcaattcagcattcttctcttctacatggtaaaattatttttgaaatatatataatgtgatcaatagtaaatttcattatttttaatgttgacgcgactttttgtcaactgatctaagaagatcataaaaataagaggactgtgataaattaatttagctaaataaaaccacgataaataaaaaggacatcagggatttatagtagttcacccccatacgcgatggtaatgggactacatctactttatttttattaattggattcgacacactagaattatgttctcaagaatgtgtagataattgcacaaaagagatctccatgtgaaatttatattgagacttatgaacacgagactcatgggagatccaacattcataaatctaataaggatgggggttgtagtgttcttgggaacaataatccaatgagaacaagaaatagagaatggtctatcttccttggtaaatgtgtttgagataatggtatttgtcaaaggtataataatggaagcttggtgtcgtgaagaacacaaagaagaagatgcagaaggaaaatacatcctccaatggtatcaaagtctaggaagctcttagaatgagatcaaggatttcaatctcaagtcgtctcatcccttaaaccctagcctatcactatctttatataggcttgggatttgttagtgatcccccacatgtccgggtgtctcactttcaaatttcaaatgttattctaaacaatgaataaaaaataggaataaacaaatatctacgaaaagatcccttattcattgtaaaatatcccacaaacattaggattgttgttgaagttggttatttcccttgtcttaaacttgcttgtgtggcattgtgctctggaaatgcaaaattggagaggagtgatagaggatgtcacctctcacctagaaattctctcaatggaatagaagtgttggagaaaagtattttggggtggtacttctcggtcatggtgccagatgggctgtggcatagctctcccaacatcccattatagttcatacttaatataaccaattaatttccgagtaaaatgtgtcagcctatcttgtgagctaattttgagcctgataactttagaattgagctatgaccatgagacataattagatctgtcatgaaaagatatttccaatgaaatttgaaccaagtcatttggataaacagtgagagagttatgcatgttttaccgaagggaagtatgtacttttcagctccaaatctgacatgtgccatgtcatcatgatttgtaacaccccattagcgcaagtcagacctgcgccatcttttggcactaaaagatggcagtggtcggctggggcatatgggaagccattgatggtgtttcatacttattttagtcatataaatgctataaaaatactttggccacattagttctttgccaattggtagaatagagcactgccatcatttggggcacaaagttggttgtggtcgcctatgagggttacacactcttttctgaattttctcacttttatttgataccttaatgttggaaatatgctttggccaaagaaattccccaccatttgtggtggctgaccactgccactctttgggccacaaagatgacaatggttggccaagtggtttctataccacttggtggccttcctcacttggttttgatatgttgatgatgaaaagtactttggccaagaaatctccttcccatttggtgtggtcgacctgtgccttttatttgtgctcaaagatggcacaagtcgtctagggtgattccttgttgaaaaatggtttctttcacttgtgttgtactccttggtgttgagggaacacattttgacaagtctcctttggtgtttagagagtacagacaagtgccatcttcatgtgccatcttttggcacaggtcggccatgcatcatgggatggctttcttgtgcattcttgactttaatttcaagtgttggctattttatgcctaaataagtccttgatggtttccttgtcggattgaggtctctaaggtgaaaatgctggcgcgggcccataaaccctaggttaggcacacttgggtgtgtgggtcccaacaccaaatggttggttaatgttttcatgagtcttctagaggtgctttgggatcctcaagtaggatatcttaacttattttgcctttgtaagtcttggtcaaagttgtagggttgacttttttaatttcttgaaaatcatgtataacatttgcccctaaaagtgtttgtcaaaaaccttcgggatagacttgatattgtacccctctcatctcgaatgtaataaggtgtcgcctttcgcttatttcgtcgtctcttggagtacccgaatgagacttttttcggcatgagtcaattttgtcttctaatgacttcttttggaatttatgaaatttaaatttaattctatgataagaattttaatttgtctatgaatgaaaaattttaatctttcacataaataaatcttgtgacaagtggcaaatggagagaagtgactttgggcttttagtgaagactatgtggcaattgtgccaaaggtatttttggaaatccttggccaattgtaggccacgaccaaaaggccttttcaatctttaaataattccttcattcacttcacatccaatatctcattctcaaaacactttcaaaaaacttaaaaactttcaactctctccttctccttccctcatctcggtacaacatccacataccaattcaaggtatctttttttttcttcattcttttcctcatccatcgattgcctttgaaagaaacctaacccaaggaaaatctttctcctagttgtggcctattcttggtggggagaagaggaattcttcaagacctttcgatgttcgagcaaatcttgaggtaaatttctactttcttgttttcttggtagtttgtaattggttgttaattgcatgagttaaatggaattgatttaggaaattcggtataacatggcttttcttgaatgtgtttgaggtacgtgatgtttgaatgtaatttgagtagaatttggaattattttgagttgattttgatgttgtggttaaatttgaatgatttaaaattaatgttgttagttttgagcaagatttacaaaatttaagtgtaaatgtggatgttaaaaaattagatcaccaagtgtttgttgaaattctcaagagagaaaaataagtgttttttgttactttacttgtatgggcttgtgcgaattcttcaaatatgtagatttgaatgtttgtatcgtttaattattttttttctagattgaataaatgacacgtcaccatgtgggcattctcttggccgagaaccccaatcgttagcaatcattggaacactttgtcatcacttgaattctacggattttcatgatggactgtgccacgtcaccattagtgtcaatagttatttccatgaatgtgccatagtgccacatgagtggaagttgaatgttgttgagcataaaatcgcatgcacaattctgtcttttttccatagctttaagatcacacatgggctccactaaatgtaattatttaccaatatttttggaagactaattataagagattagaataaataattcatagagaaggaacaggacaatacttagagtttttataatgccatagaccctagggacgccatgtgtttatttttgaaacatagtttgctaatagtaaattaactatttaatcaaatctgtgataatagtagaaatttcactaaaataaattcatggcaataaacaagatgacatcgctaaaaatttgttttgggaatctcctattataaaagttttgcaaaaagggctatataaaaaagtaagtcaaaatacacatcaggtacaacccaaaacaactcctgacaacttgaccacataagtcagatatgtcgatatgtacatttgccggagaagactgtcatctcatggctgtcctagataatccttgcccttacttgcaccacaaagcacccatgagtcacaaagattcagcaagaataaccttgactctcgcct

SEQ ID NO: 116019 - DNA, 1929 bp, Cannabis sativa
aacaaaagtgttaccaaacggaatgtgtgttgttttttttaatagaattgtaattttattaactcaaattattcaaatgaatattacataaactacttgaaattataaaatttgaataggtacaaccattacttaatcacgaaattctagtcaaatgatgaacaattcgattagtaaattgtttgataaaaattttaaaaaacattattcaaactagaatgaattcgtctacactctaaaatgcaaaatccaaaaacagaaatcatatctaacaaacttcaaataacttagatcgtgaccaaactgttcgactctaccaccatatcttgtcgtcgtgtttctttcaaccaattcaacatttctttaaccacgataacttcagcaagaacaagatcaaccaccctcatctagcttactatccgagccataataatctgaccataagaattatgcgccacccaaccatactcatacttattatgtacgaagaaatcctacaaaattttaagaaatttaaaaacaaaataacatgtgaaaataaggttcaaatagtttattgcacgcgtgactcttttattttatactcgtgtgaaataaattatttgaacacttccaaattttttaaattttacatgatatcttaaataacaaaaacttacacaaaaaaaatttccaaaatgcatcactacacccttttcttaaaagatgcattataaaggcacccaataagttgtggaagaattccatccaaacaaataatttaattttttatttgtagcacatatcttgctaacttgtttccattaagcatcacatcttgaagacatgcactagaaaagacattacaataatctaaaggatacaacctcattgaaaaacaacctcaacataggaaactataaaatttacaaccatttatgtatcattctccacaaaagaaataaagaaaccaagttgcagagaccattgcaaagtaaaagaaagagccaaagcttctcccttccttaaaagacaaaagacaggtaaatgttttacaaaacaactcactcgaaaaacttccaagtcatgaacaatagcacccgtaccaataatggcattgttgttgttcgggaattctagctgaacatttaataatataaatatatgttactctaaatatatacatatatcatatatatactgctttaaataaaaataagacacaaatttacgtagttcaacaaattgtatttgcctacgtctacgatagcaaacagtcagttgtgcatctttattaatgtgaaatttataaggatcaagagcaaatgatgtttatatttttacaaaaatgatcaatcttgggcatatgtggtgacctagattaacctattttgtatataagggaggtgtattagaccatataactgtgtttgtaagaagaaagaaatgactgtgaatagaataacttatgattcgtagaagaaccttggtgagctgatgtgttggaaggtagtgtgaacagtttggttttcataaaggttatgaaataagcaacgtggtttttataggatcttgctaaataggcagcctagtttatataggagcttgctaaataggcagcctagtttatataggagcttgctaaataggcagtctggtttttataggagcttgctaaataggcaacctggtttttataggagcttgctaaatagacagcatgatttttggtagagttgtgattaattagggagagttattaagaatgagatagatgtgtatgaaagaatttttatgagatggaatggttgtgtgtatgaagagaattgatgagacatgatggtggttgtgtgtaagggaagagaattgatgagatgggatggttgtgtgtaagggaagagaatagggagcaatgatgaaaactgagatttttagagagaaactcttctt

SEQ ID NO: 116020 - DNA, 1236 bp, Cannabis sativa
gtaaacctaaaattctgttatatagacatacttcatatagaatagatacttgagttgttgggctttgaacccataatattattttactcatgttatcattttaataaaacatataataatttcatgtatatttttctgtatactggtgtctttaataaatgaaaacaagataaattaattcatttcaaaaacaaaaaaacaagacagattaattaaaacgatatttcatgagtgtgttctacaattattatctaggtatatttttattttttaatattttaattaaaaagtatttttaaaaataaatactaaaactgtatttattcttttactatttgaaataagaataaaaatttgagaaaaagaattgagaacaaaaataaattactttcaaaatttatttaaacactttttttctaactgtaatctattttgtaacatcaaaccctaattctagttcctagcctaaactcaaatcgggacacaaatcccaacctcacctccctactcgactcggctctagctcacactctccttacttaaattaaaaacaaacggaaaattttgaagagctttttttttaaaaaaaaaaataataataaaaaaaattgtatttttcatttatttagtttaaacaattcaaaaaaaattaagaaacgaattgattaataattatcatatacattttaatttcaatattttattttctcaacatataaaaatgaaaaatattaaaagtcaccaatagtatttagtgttagaatttgagataaactaaataaggtactatctcaaaactaattagcaatgggaggactaactcattctctgatatattctattatctttccacacattagcgatgtgagactctttaacatctagtataatcttatgtgtcaatatcactattgatctaattaagtatcgagtctaaatagtttaatataataacttttaaggagtgtcgatagtaaattgtaaaacgataaaaagtgttaggcaccactaatactcaatagcaatgatctataaaaataagacatggatttaagtccatcacaagtagcataagtattattcaatatcactcattgtaggtacatcagtaatcagtgacggatctaaaaaaaaattttgtgggggctttttattattaaaaaatatttatacatatattataatcatttttactagatttttttaattttttggggggtttttctactattttag

SEQ ID NO: 116021 - DNA, 1197 bp, Cannabis sativa
tgagaaaattagacacgagtcaaaaagcgggtcaacacacctgacacgaaatatagaagtgggtcacataaaatatgacacgaatacgatataacagtacgttttgccacccctagcagcatttggaaatgagactgcaacatgtgagcaatcaagagcaaagaaaacaacagcaggtgacatatttagcatggtaatatcagatgacacaatgtcaaatggtacattttgaagagtgacatcaggtatagttgagttgtgagactcgtgtggaaaaagaagctccatattatatctaagtggagctagaggaatcttagttgatgtgtttgactctagtataagaaaattaaatttcatcaaaaattacatctctagaaatctaaagtcttctatttgcataaagatatttataacccttatgattaagactataactcaagaggtgaggatttaaactcaaatttgtgcttgttatatggcctaatattagggtaacaatgatagccaaaagccttgaggctagtataattaggcttaatattgaagagaagtttaatgggagaaattttttttaacacatgagtaggtaacctgttgtgaagatagatagcaaacctacaggtttcatcccaaaatttcaaaggcatagatactttagtaagtaaacttaagccatgttctaaaatttgcctatattttctctcagctaatccattatgttcatgggttgtagggcaatgatacctatgaagtatcctagcttttttaagaggttcaaaaaagttctatatgttggtttttatgatttatatcatcatcgcaccagaagtgaataatatcttatttattaaaaaatttactgaatccatctaaacacaatcatacatagcacaacacttactactggttcaaagatttttacctcatgttgcctatcaggattttctcgctatctttttgtattaatgaagcaatcatccactccagtgagacttgttaaagatttcacaccaggatcttccaactcaacctcaacactctaagaataaagtgagctattaggtttaatttgaatgaaaataaattttttatttcagtgtgtactcaacttatgagacactgtgattgagattgggaaaacacacaatcaccctcaagaaggagttatgcatgagcaaaggtagagagagagag

SEQ ID NO: 116022 - DNA, 1946 bp, Cannabis sativa
  modified_base (1900)..(1907): a, c, t, g, unknown or other
ttttttttttgtcagtcttggggcctatctcgaagggcccaacttggaccgtcgagattgggtacacatgtacccaatatcggcagtccaagctaggcccgtcgatatagggtccaaaatttaaaatttttttcaaaaaattatattcttgtgatcaattatggcagttttttaagagcccgtcgagatagagaacaatctcggcacacacacggaggcccgccgagattggtgtgtcgaaattgtccatttttcttgtagtgaacatatccagtgcaattggagcttctaatgctaagaaatttaaaaatatggagtagcacctcaacatgagaattcaatgtcatggcgctaaaaggcaaaaatttggtagcaacctcgactttgctccaacaaaaagctgaaagtttcgttcaacaatttcttccactccctatcctcttgagagattggaaaaatctcttataacttcttattttgttttgacaaagttggaagcatcctcgattctccacctacaaaagagggatacgaatatattagaaacaaataaatcatacacaaatacaagatacaagatgctaaaaaaactaatacaatgatttagtgtgtgacacccgcctaacaccctccaactaataggaaacctataagctcgaggtgtgaacatctcctctctatggaaaaaacaataaaaaaaatttcattcccagtcattggattttgttttccaaaccaagctctgatcctcatttcgactcacaaaactatacctccttttttctttggcatgttcctttatagtgtagagagcacgtaactctactaagtcaacacttatcccaaataccttagaaaatctctcaatggttaaaagtaatcttcaagaaatatgcatcaattagcaatttgatactaattgaagattgaggtggaaaaagaaacatgaagccttgaaaaaaaaaaaaaagtatatgaatacatgccacaccaataagaaacatcccagtctatctgttccttattccaaagtaacctcatttttatattacataagccaatttcatttgagatagaagtgggatcgacaatttagatatggaattaatatgtaaaataatctgtgatttacataagaaacttggtccatcctcacttactaattgtgctaaggcataacccattactggaactttctctccatccaccgctaacccaattacatcattgccatctacatgctgactataatactcctcctcgatggtgacagggttgagagacgaagcatctaaaagctcttgatcgaaataccatccatgtccataaggaccataacctgtcgaccaccactatcaatatcgaaataatctagcaatcatatactagggacaaagcatgaggggtactccttttttactactcaatataagtaaaaatactattagaaaatatagtatttactagggatatcgacacagagataacctccttcgccattccataatcctgagatggatacatagcatggggtctactcttttttctactcaacaatcctatagaacagatggggaacccaaggtgtacactctttcctactcaacaatcctagaacaaatggggaacccaaggtctacactcttttctactcaacgatcctacaatggatgaagaaaacaatatggacactctttgttactcaacaattcaagcatggatgcaagcattcaaaaagacatttctcaatatcttaccaaatgtccaatccaaaagttcttgtgaaagcccaagcccacaaacacaaataaacttttcactatcacattttatagatcgaaaagctacttttcaaaacataaaagataaagttcatccttatacatataaatatatatannnnnnnnagcaaaaaactacgtgcgaggcacgtatattaaatttta

SEQ ID NO: 116023 - DNA, 1209 bp, Cannabis sativa
  modified_base (27)..(30): a, c, t, g, unknown or other
  modified_base (575)..(580): a, c, t, g, unknown or other
ttatgatattaaaaaaattaaaaactnnnntaaaattaacatacgtgacttgacacgtaacatctatctagtatataatatatatttatgcaagttcatggatccttaattgtattaaaattttactcaaaaattaaaataataataataataatgataaaaactacaacatctaataaattaatgtttacactcgaagaagaaaataacatataataaggtgaaaaaacagtgatgattaagttatctatttaaataaaattaccctttatatatatatatatataatatagctatatatataaggcagctaaataatagctggcttgtttttgtaatttctacatgaagatatttatttattaattattataggttttagctgttcatgaattcaaatggtcgatcgtgaaataaattttctgttattattaattcatttttcagcttatttatttatttatttatttattatgtaaaaagagatcagaccaattggagtacatgttgtctctacatgcctttctttaatgagacctaaatgcatatatataaatataaaatatatatatatnnnnnnatatatatatatatatactgaaaaatggtccaggatatatatgaacaacccttgttttttagttttgttgatcagtcattgttaaaaaataaagaaacaaaaggtgtaaatttttgtgaaatgctttccttgtttcatatatataaaatatttaaccttacttttactatactcaacacaagatttatatcaagtcaagtaattggtctaaaataaagacatggctttcataagagaattctaacatgaaactgatttcaaggtaataattatattcatgtaattccaaaatggaccaaatgtaatgagtaaatattgttttttgttttgtttttttaaatcgacataaagctatacatatatacaactaattaattaacaagttaagtgattaataaaaaatcataataataattaataaatttatatatactattttgtactcctaattaattttattttgttttcttaatttttgcattttcattattctgatgtagcagttttgacttttcttctgagttttgtttgtgcccgttgttgtaacaaattatgttcttcaatatataaagtggcaatctcatcttagtcgaatgagccatttttatttcactctctctctctctctc

SEQ ID NO: 116024 - DNA, 678 bp, Cannabis sativa
taaattcttctggatgtcgatataggtagagaatacattattacattctttttagggagtgcatggtaaaaataccccaaaacttatattcatatatgttcctgttttcaaaattgcaagtgcatgaaaatgaagctatttcaccatgaaaaagaatagagaaaagacaaaaatacctgttgctgaacttctcaacagcatcagaagcataaagaagtgtttcactagctttctccagtaccatatatagctccttacctcttgtaaccctggcaataacccaagcactgtttcttgctctgatgctaatttccaattctttttcatggccagatttatcccattttgatcttgatttttccaaatcaacctcttctctaagcttattcaaagcaagtaaagattcctgcaatgaaggaaaaaagaaccccacaaaagagattgtataatgatgtttgaatacatttagaaagaaaaaggttggatcacaagagatatgtgccttttagtacctttgttaatgtggtaacttttccgggaggagaagcccttgatatgtttctatcgccatccaacaataaataacggtatccgccaacatgatatgcattctcaccaccccaaccttttgatagtttttcttcaacttttactatctttaccaaagcctggtaaata

SEQ ID NO: 116025 - DNA, 3323 bp, Cannabis sativa
  modified_base (3256)..(3260): a, c, t, g, unknown or other
tgtatttagtagtttcctattttgtttcctattttttagtctcctagctttgtatataaatatgtactattctatgaaatatatacacagttcgattcattattttctacaatgttgaagagaaaattagatgatctgaaggacttctacgagagggccaactgatatatattctagtagaagatgggcacaagaacttgggcgtgggaaggagccacctacccaagaaggggcacaatcaggaatcgcgaaggaaaagggggtctaggcatagagatgatggatgaagcaagaatgtcaagataaaggtggagctaataccccgcgtgtactcccattgtacggagttaattcacttgagagggcatatctttttggcaaatgaacatcgagtgcccttcaagaagccccctccattgaggaaagaaagggccaaaagagatccaagtaagtattgccggttccacaaggatgttggacatctcatagaagagtgtaagtacctaaaggtcaagatcgacgagttgatacaatgggagtacctagaggatacaaaaaagagaaccaaaggctggatggaggacactagcaagataagcttgaggatgcccctgaagtgctgagagacataagaacgttcatcggaggacccggggtaggaggagacacctataaggggagagagaagtatgcccgtaaagccatgcgtgaagcctaagtcttgagcctagagctgaggccaccaaagaatttcaaaggtgaaaacgatttgatcaccttcccggaggaggacgcaggggtgtgcactttcctcacaaaaaaagatggaattaggaatcaaagatcagaagccttgtgcgataccaatatatgggttcaccagcgattcagtccaaccccttggaacaagacctggccctcaccattggagaacaacctagatactccatagtgatgacaaccttcttggtagtggattgcccgacagccttcaacgcgctaatacaaagatcttcactcaaatggctaaaggaaattacattggtatatcatttggtcatgaagttttcgaccccatgaagggttgcaaccctaaaaggagagcaaaaagaggaaagggaatgttataacatcttactgcggatggccaccaaggctaaggaactcgtggctacgacgatgcatggaaggcccaatcagggtggaaaggccgcaggggagacaagttaccaagtaggggagaggacatgggaaaagtcttggaagaaataccatccatgtgaaagaaagtggtaatatcctttagttgtttgcatcagtaagaatcaaggaggggcattttcgggcaactctattataattgtttatgttgttttcagttccctaaagattccaaatgtaatattttgagaggtcacttagaagacttttggactcacatgaatgaatattggaatagtttaatcatgcctaattacttctccagatcaattttctttttcttgttagaagtagagaaggaattcaagtgtacaacaccataaataacattatacacttaggggcaaggaagtaggagagaaagaaaatttctagttcagcaagggttagctacccttgatggacaaaggaaacacactcctctttgcagaagccactggcggcatcaagagtgacaaagtcactcgaccttaagggtggcaaagtcactcagccttaagggtggcaaagtcactcggcctcaagagtgatagaatttactcagcctcaagagtgatagaagtcactcagcgccagggtgatgaagtcactcaacctcaggagtgacagaggtcactcgacctcaagagcgacgaaagtcactcagccaaaagagatcttgaaagaaactcatgtccaaacacttaactaagagggacgcttcttagacatacaaaaacatttacaaatcaaaaggttgtagcacagtcaagtacaataagctcccttacatttaattaaaaggatgaaattgaacatttaagaggttgtagcactgtcaagtataataaactccctccaatttagataaaggatgaagaaagaaataagaggacgagaccgctcaaaaagcattactcccttaaataaaaacctacttatcacggcgggaaaagtcatctagctaaagagtaacccttagtgtcactcggccaacaacagttacaaatattgaagatgcagaaaataaaaatagagacttgtaatcacacgaaaagaaagcataagggtcactctaacaaatcctaaagaccccaaaaaaagaaggaaaactactggtcatggctggtgcgagcaccctggcggtgcttagccttacgttctgcctgttgctcttcacgatcttgtttgaactcctcaaccatctagagtgcagtggagccaagaacattgaaatccacatgaggattagtaacccagaaagagtacaacatgcattccaccttgtcaacttcatgtacatttctgttcttctttatagtcttgatgcgcttttccaaccattatagaagcattgagtttgtcttgctcttgttggctctcctccttgagcctttgctaagatctaaggaagactggagttgttgggaaagttcctcaatttgggatgttttttggttctgataactctataaaaatagagttatttatatctttttggacattaaagtagctttgttctcaagtatttttagcttattttagtgacttttaattagttttgtttagttttaaataaatattaattttaacatttttagattagttttggttaaattttgtaatattttatcaatttaatttagttttctattttataagtgttaatcttaaggttgtgtatttttataaaaagattaaatgtatattttgaacttattgtcaaaattgagagaaatgatgttaaaatccatggatttactaaaagcccatttaatttattgagaattattatcatgactttaattgggctattgtacaaaagaatgagaattgggctcactaaaagaaataaacaaaaaacaaagaatgaatggaaaaaatgggtcaggtgacattgccaagttattacccagatgatctacatatatatatatatataacatcaataggtgagtgtgaggagtcagcgtgatacaaaattgaagcaggcggcggctggattttttggagctcctgacaccaaacagcaaaaatgaagaaaaagaagaaaaannnnnaaaaaaaaaaaaaaagagagtgagtttatttagggtttcaatttagcatttttatttagagat

SEQ ID NO: 116026 - DNA, 2379 bp, Cannabis sativa
tttccgcattagcattacacattacatattacatatcgtttatttatatgctgtattttatatactatattatagtctaacagctaagccatattcgtctctgctcccaccctcgccccctaaactcaactcccgtaccgaccccattaggggcgggtatccgcgagtactcgaacccgcgagtataattgccatccttacatggcttagtctcaaatctcaaatatatcatctacatgcaaattattgttcaaattttttatcggagctcccacgattttctcatccaccggccgcattgcttctccctacgattaccttttggactgcgtcgttagatccacctcctccagttgccaagggtgggaagatcagtgataaatttttttctaaggtgctaattagtttccaatctttattactctattcgttaaattctcacttttgcaaaaagacaatacttcaatggagagctgattgtgagaagaaaaattttatttttccgggtggagagttcatctaaaaaactttaatgttaggttataagaaaaattaaagaactaatgttgtcgcaaaactttaatgtggtgaagtttgcaaagatgaaatagatttgtgatatgagttcccagtaaaaaaaaattatgaaaaacactcatgatatatttttttttggtgaaggaagaacccaaaatgaaataccaagtattaaattttttattgtgtttcatttaaattcagtgatcttacaaaaaaaaaaattgagcatgtgtgcccttaaaaagctttgtggcagttgtattttcttttcattttaacagtcttcaatcgtcttttaacttcctaaattttcaccttctttgcgtttctttctcaactgctcctccttccatcttctatgtcctttctacagttactcctcctaccccctatcttgacttctaccctctcatcttttcaatggatcatctattagcaaacatgaattctactatgaccctaactgatgccgaaaaggaaatttatgtactttcaaatcttcctcccattggagttttatcttctccaaataatactctttatgctcttgtcctctcttcttgtgacattaaccccaaaatctttagaatagaaatgagtgattgttgctattactgataattgtgttgggttatttacaattacttttggatgtttaggagataaacggaagattttgttgttggaaccatggcatttttagaattaccacattgtattaggcacaccatctattctgcaaaatgtgactatagaatccctgcacttctctcccatttgagttcaactccatcaacttccctttctcagcaaatccaaagagttagccatttgggcaggcagtatttagatgtttatgaagactagctcagtgagtaatggggtcctttttcacaattctaagcaatgattgatgtgtctaaaccattgttaaggggaaaaatggcaagacttaaagattctcgtgatgaattctggcttaagttttgttacgaaagactcccagagtttttctttgagtgtggcataattggctacccttttgataattgtccaactttcttggataaaatttataatggtttagaactacccttgaatatggcccatctataattggtgctccccttcctacttcgggctatgatcgatatagaatcgattttcacaaaggaaatgtttggcctctcatgaccagattagccaagaaatcattcactgctgttatccgtggccttgccacaaaaccattaccacagctgtagacattaactgacatagaattttcctctgctccttttgttcggactaacacttcgaatcgatccttccctattttctctaacggctttggctctaccactaaccatcctcaaagtgtccccgagatgccttttccaccatattttccatttccaatgacatcttcaggcttaatcccctccagcacttactttgccacttacccgccaagtcctgcaacttctactgtctttggccctacaagtttaccaactctgatctccacacctattatttcacttgtaattaaactcactatccctaatgaacaagaactacatactgcggatcctcaacgtataatatcggatatggatgtccatggtgatttagactaggacaaagaaaatgacagcccaaacataatgccaaagcaccatattgcctctgagtcccttcgcagtgtcctgaagcgttgtcaatctaatatgtaaagaccgcttagatttaatttggaattagtagataattagggtttaattatgaaactagattattaattatgatttatgattttgtggagatttatttaaattt

SEQ ID NO: 116027 - DNA, 2583 bp, Cannabis sativa
aatccgaatttataaggtaagaaatcgaatatgaatgcacaccaatcttaccataaatgggaaaattattttgtcaactaacttgccaaaaaaagactttacaagtttgattgtttggtagcaatctaagctattccaaatttattacttatgcttttttcttttggggttattatagatgattgttgtaaactttttgcatcttcaaacaatgtttttttattttttattaaacgatttgctaacatagttactcatagtcttctcttttgactcatttaacaaattaataaaaattctatgtttactttcaacaacaaaaaaaaaaaaaaaaaaacattccatatatgttaaagttgatttttctcttctcttttgaaaattcaaaagcttatccttaatacggcctaagtacgacaaggacccatgttcaacacacaaataccaatagtgttcacttcacttcacattatattttcaaacatatttagatctcaattgaacgtaggctctactcaaatattttctttctttgagaaggaacagagtataggtaacttacaaaaacataaattggaaaaatgcgtttaatttaagtgcaattggtaatataattttgtgtatgataatgatatagacctctccattgttgtcccataaagcaattccaaaagcctttagtttggccccatttttaaagacagacaaaattgtgtgtactaatgctttttgtggttgacttgcaaagtttttttcttttataacaaaaaaatgtatagtgctttctcaattgttattagtgattccgtcattaagggccacaacctaggcagactacagaagaaattataatttcaaaaacgccttaccagcggtggtagttgtaaaacataggtaggttatagtaagaagaacgaatcaagtgaacactctcactaacaattagaaaatcataatcaataaagtatccgaacacttaggccaattagtgtctcacactcatcactataattgaatattgttgctagtaatatactacgtgtccttatacaattagcaccgtacatttgagtccttaatgtatttatacatacccaaattgaattactgctctacctttattcttttcaaaattaatgtttgaatcaaatgatgttttgcctcttccattttgagataacttcatttgtcaattactttctcagtaagtatatatatagcttaacttgagacaaaattcactatttcttgtcactttaatacctaatatcatatcaacctctctgaaagtcctttatttacaaagtgaaagattaaaaaaatatatatatattttctttaacattttgcctcttatccactgatacttaaaattagtataccatcaacataaagaaacactaatattacaccaaatgcaacctacaatgctacttttttgcatggatcaaggttgtagatataatagagatgaaggtgctggttatgaacgaatacaaagtttggtaaacaattaccaacaacctgaaccaacgtacaatattcaatcaaaaacatgtcatttcactaacttcattagtactggttctcagctttgttgttgttagcaccagttctctattgatgccaaaataaaggctcaaattcacaattatggctcatttattcattgattaatgatatttaaatacataaatcacatgcctttgccgcaagtcactttggatatcttaaataaagatgattgattgaaattattatgtgcgaattgtgtgtccacatgtcattactcttcataactatgtccgcaagcaagcccctgcactccattgagcccgaaaatgcgtcctctgcctctccgccaagaaccccctagcacgtagtcctctggagctctagctagttcgtgacaattaatttgtagtctctagcatgtactaggtactaacagcattttcaaggagatacaaattgatgatccattgctaaaatatagtttatattgtaaaaattttgctttttattaaaaattaatctaaatttgtcacggtaaaaattcatttaaattttaaatcaaaatataacatgatacaaaatttgtattataataaatacactatttatatatttaatttagtgtcatttttaaaattttattattaaacttagttattgtatgaaattataatttttttatattattttatataataaaattaatgataaagttttatttttatatatataattttaataaaaatattaaataaactttaaattttgtatcaaattttataattatttattggagtataatattaaaaattaatgtaaatactaaaatattttttatacagcataggttttatattttttgaggatggtctaaaaaaattatcttatgttcatattcatatttaccaaattggataaaaataatattactttgagaactaattaagtacatatgggtacaaaaacatttaattcattattatgttaaaatattaggggtaagttgaaaaatatcacttttattaatcaattaatcaaatttacctttaattttatatttaattgaaa

SEQ ID NO: 116028 - DNA, 2488 bp, Cannabis sativa
ataaataattttccataattaaacttgattaactgctaattttcaaattaaactaagcggtctttacactcgggctacggagaaggaagaatatggaaacttggccattgagaccttatacaagttctagaaataaaaccctggggtgattacaaattcatgaagcctgagttggtcaaatccctagtagctcgaggtgaggaattagaggcatctaaatcccgtaaggagaatacctctattcatgatgttgcctcttccgagcagcctactgatgctaccagctagcctattgatctagtggaccctcttatcgagccatcttttgaacctatcgcccaagaccaagctaatgataatatgaacccaattactccatttgacattccaaagctttgaagctcttattttgcttatctttttattttctgcacgaccataaaggccagtaaatttatgacatacagtctgtaatatcccgaaaaataatatggtacttaattggacatattttattaattataaaattattttggtaatgagataagattatgatcatacttaggttaattagtgtaaatttattaaatgattacataaagcttaatttattaattccggagattatatcagaatatgtgggtatcgtggataccatttatggaataaaataatttcgggttcggcgactatggaactcgatgcagtagttagaaatgtcacggtggttgaaattgtgttatattggagttataccggactaggtttaaaggttgtgaagttggtttaatcgggaaaattagaaaatgaccaaaataccctttgggttttatcttgatttttgtgcttaagaggggcaaagtagtaatttagtgggatttggtttttgtcctttatggtattttgtttggttggaataggaagttaatattagatttatatatatgttattagttaaataattaagttgggaaacttagaaaattaggaaaagacctacacttatccaagcctctctctctcttccccttcgacagccctaaacccaaacaagaagccagaattctccttgcatttcaaccagtttttaagcaggattaataaaggataggggtcttctaagtggtgaggtaagttctctatcttttcttgtcttgatttctatgttttggttgagttttagttagtgttttgcttggtttcaggattatagggtcagttagattcaaagcatattttctaagttatactaaagttgcttggtgtgtgaattgtatgttttggtggctgctaggtttgaatttgggaaagttgagtttaagaactcaaaattcactcaagtatggtgattttgttattttaatgtatttctgagttttggatgttgggatatatttttttatggtatgagactattctggaaggtttgaacaggtttagaagagttttggttgggttttggagcaacaaaccagagttttccatttttgcagcagggaaaatcggttaaccggtttcacaagcatagtgaaactggtcaactggttttggcagcaggggaaaccctagtttaaggcttcgaaactggttttgttcgtggtgtttcccagagcttagtatagggtattttaatgatgtttgagttattctgaactagttgagagttagatatgtccggttacgaagttaggattattccaaagtttggaataagttgtttattgagctttgttatcgtgacataggacccgggatcgtcgagcgtagttccactcaagttggcccgcatacttgactattggactaaggtaataaaagtgttaagcaccattttatggttaatgatatgatttttatagtctcgattatgatcgagatcccgctatgtttttgttgtgactcgattttgattgaggtaatgttgaggaacgattattatcgtttgtgactcgattatgatcgaggtaatgataaggaaagattattatcatttgtgactcgattatgatcgaggtaatgataaggaacgattattatcgtttgtgactcgattatgatcgagtaaaagatacggtcattaccgttatgagtaattactcattgaaactgcggataggtttcttacttatcgttcgctttatcgggcatcgatagtgacatacatagcttgtagataacaagtggtaaaggtactttatgaagcattgagattatgtgattatggtaatgtgtgattagggtactttatgaagcactggaattgtgtgtttatggtaatatatgacttgagtgctttacgaagcactgggattatgtagccatggattggatgtatgtttatttagtgaaaaggtgaaatttttaattatgagatgctatgattattcttattacactactacaaatattagaatttgcgacggtcctaaaaacgatttttcttccaatgtatcatttctgggtccaatgaaattcataggtataggaa

SEQ ID NO: 116029 - DNA, 3305 bp, Cannabis sativa
  modified_base (2196)..(2197): a, c, t, g, unknown or other
agagcaaaatccaagttggaatctgtaactgtagctgagagaaaggctaataaaattgcagcaaatctatctatcactcttgaaaagctcaaggcagaagctgaggctgcaaaggaagaaaagtatgttattgatgaagaggttgcaaccatgaaggaagaagtccaaaaaatggaatcaaatatagacatcaccgaggagaaattgcaagctactttggtagagctggaagcagtgaaatcatcagaggctttggctcttgagaatctgaaatctctaattgaaagtgcaatgggagctagaagttcttcagtggagcacaattcctcaattaccatctccaagtttgaatatgaatatttaactggacgtgccgttggagctgaagaacttgctgataaaaaggttgcagctgcaaaggcatggactgaagctattaaagctagtgagaaagaaattctaatgaagacagagttagttcaaagagaaatcagagagatgaagatggatgaaaagagagagtcttatggaatggagagatcaatttcagcgaaagatatggttgagaaagagttgaacaactggaaaaacaaaagagaaaaaaatgagacaccagagaatttacaactagcaatgcataaaagatccattagaagcagtaacattgggactaatttgactccatctagacgacctagttatcgaaaatctgcttcaccagggactcgaaattctttccttgttaaaaagaaaagacaagcaatcccagaccttgccaagttcttcaagactaaagcaaacaagaatatttgaaccgctacaagttttcttggccaagtaaataatacaattccttttatgtttcaatattgggatatcatcaaataactataggttagagtatgtgaatgtgaggtttcattatttaagtgatgtattgatgatgtacataattgttgttgtatatttttaaggcaatcaacaaattatatgctcctcacactatggttgttatatttaagatcctcctcttggttgtcacttccaatatttcctgagttacttccattgtctggtgtatacaacttctttgtttgtttgtgctattattcattttgatacaaatatgttaaccaataaatacaattctgttattagtttaattaaattggttttttctgttaaattaactgtcaaaattatttaatttaattcctgctaatcagttttactgtaaactaactctataaataataaataactctctaattgagaagttaagattgcatttacaaactttctctttctctattttttttcttttcttggttcctaccattactggtctttaccatttcaactttgtttcttcatggtatcaaatttttgctaatagagttgtctatacacacctccacttccgatcctacaggcctcaatggccaaactcctattacgtgccaaggttcagacccaatatctttaatgttgaatccattttccagctcccttacctcctctttctctcaaattcgattgacaaaattttctagtttggaaatcataggttgtgccaactatgattggtcatgaattggatgaaatcttgttcagtggtgttccccttcccttcactcttgttactggtgaagccaatccgatctttgctcaatgtaaaaagagggataaactgattctttcttggcttcggttgtccatgactaagggtgttcttgcttcggttgtgaagcacaccacatcttttgcagtttggcctgccttagagaaaaaaattcatgagtcaatctcgcacccgacttctccaactcaagggtcaattctcgcacattcagaagggcaatctttcaatttctaactatgtggacaacgtttgatcgttggatgatgctctcactattgctggctctacaatctttaatcatgatttggttttacaattcctgaatggcctttggccatattacgattctaccgttttaggcattacttctcgtagtgattctttgattcttgaagaaatacaggccttgctcatgtcccatgaatgtcgcttggagcatcatagtgctatgcccaatctttccttgaagatgcaagcaaatattgcacttggttcagtacgaaatggtagcttcagaggaaatgtaacgccctaatactaaggcacgctacagnnctttttcaattacagtgctatccttgcaagtcaaagatatttcttgaaaaacgtgtcaaattaaaactttttataataaatattaagctttagaatttacataattattaacaaactccgggatcccgaatctaaactttttatacaaaatatgcaaaaatataatatccaggtcgcacagcgactataaaataaaatccccatatgtcccgagaccgaacacttcaagtcacgctgccacgacatgtacaatcccacccaagctaggctcactcctgttcagctttcgccctccctttacctacacatggtagtaaaattgtatgagtctacagactcagtaagaaaatcatacaacatattatataataccgacttgtatctaggtgcccatacacctatatacaaggctcaacagatgagtaggaacgttccatactagggtacaaccactataccacatacactacgtaccttgttgtacgagtgttggtagggtttgtttcgtagcactgatggatataccacaacaccctgtactttcccgtacttgtgctggtatcactgtaaagtactcttaaacaatattcactacgccaatgcactctgtaccataactgtacaagtgttggtagtgcaactaaaccataagcatgcatatacacttaacacatatatacaatcagattttcatattacacattatacacagttctcacattctttccaaattcaagtgtgctggtcgacctaaacggaaagtctcgtgctagatggatgccgtaatcacataatgaaaccgggtaaatcacatgatcgaaaccctactcccaggaaacccaaacctacaaccctaggttctgttatatcatccagggattacactaactcaataaatagggaaacacccaactacgacactgaaatggacgagaattgagaaaatagagcattcggaaaccctgccaaaaccggctagccagttaaaaccgactagccggttcataccaattcaccccaaaatttccatttcttgctcaatcctccaccaaatgcaaccataatttccagaacacctatacaatgcatatacaacataatccaacca

SEQ ID NO: 116030 - DNA, 1859 bp, Cannabis sativa
tagtctgactggtcactttgttcatgcgcagatcctggccctgctcaacgacatccccgccacctcaaggaagtaccagttcgccatggcgatggcggagcgtgtgatggacggcaacgctgcatcgggacacccggaaatgctcgaggtcaaccgaatggcgctctcctccgcctttgagcgcacctcaacccttctccaccgctccctagacaagcgccaccgcgacaaaaacgatgagtactcgggatccggagcgtgggcagcacgcgcggtcagggcactgccgttcggttcctacgtggcgccttacatcaatggaatgagcatctgtgttggggtggtgcgttcgtgggtccgctcgagggggacaaaacggttgacgggaattggtggtggcattggagatggaggaagggttgtttgggaggaagaggaaggaggagaggtggtggctgagaagctggtggaggagctgttgtggataagccataagctgagggcttatggggcagtggatgaagctctggtgcagtggagctatgcttcaggattggcttctatttctctcaccactgatcccaggcttcaaggcctcgttgtcaaaatatcaggtagttactactttctctttctttaatttatcgtagtttcaatcttaatcatatataattattttcggatactataattttgctcattggttgtagtacacgaacatggaaaaataaaatatagtaaacttagaaacatctggttccatattagatttgcataagcttactaaaagtatcgtagtggtagtaatgacatttaaaaatgtgtactataacatttaattaacttgagaattatgctaattagaaattttgtggtgcatgcatgtgatgatggtcgacatttttatgttatatgatactgatattaattataaaacaccctattagttatgtatattatagcattgctacttactttaaggtgcttgggagcggtaagttttttttttttttatatattatttattaaattaaaatatttaaaatttaatattaaattaaaccaaataatatattacttatttagaattatatatttcttacaatatttctcatatatataaatgtttatatatacattaggactttaggacttttttttatcatatctagatacgtttatatatttaagtactaatcatatattttatacatatatattatccagccatgttatttggtgaattaaaccgagaagaggttggggtatcagcagaagtgaagttcagattgcttcttctgtggcttccgttgttttgccatgctgggaacggatttgcctaccctgtcttgacctacttcgagaagatggaggtggagaaagcgatcgaccaagcgctgtggagcttgccaccgatggatcaagaagtcatcctcacaaattggatacaagacttcgccatctctgcttctgattggcctaatcttcaggttccttacgaccgatggtgccaatctacgcgcaatgttgttgtggcctagctagctacaattctattatatcttaataataatttaccatgtactatatatatatatatatatatatatgttctcgatgcaatttatggggagagatctaccgtatggacagatataggtagtttacaattaaagatgtaccatttaatcagatatccagatgtgtttttgttatcatcatcatcatcttgtactttttagttcttttcctttttgcagcgtcatttcatatttcctgttattatatatatatatatatatatatactagcgaaaaaattacgtgcgaggcacgtatactaaattttatgttagtttt

SEQ ID NO: 116031 - DNA, 1304 bp, Cannabis sativa
tacagtttttatattttcttatatacagttgacatttgcaaaaatacggtttttcacataccattaaaatttaatatccttgtcttggggatggctggcttccatcatcttttatagcagaacataaaacctgcctaaatgtaggtctcgtgctttatggacacatttgtccatttcaggtggaaaattgcttttgtacttgtgctgtggtgatgccaaaagggcagaaacagtatatggagtatatggaggacctatttttatggtttgtcataattatttagggtataatgattaaatattttatttttaagaattaaagtttttcaaattgtaaaataaaaattaacattttatttaaaaatttactttgtgttatattctaattctatcagttaataggcttattgctaatagctaaggataatacctttggctggttatttttaagtttttttattagattatgttttacttaattaaatcaagtggtaaagcttaaaaatttagtttttattaatatatttgtctttcttttctttgtaaatagacattttaatataatttattttttagttattgttttgagatctttctaggtagtttttcagtgttacaatttacaagctaaatttttagttcttctagtatgttgtttgaggatgttatagttttattgtctaaattttaatacaagttttatctcatattttgctcgtttattttaatagttcatgaatatctgcttcataaatttataagtgattctaatgattaaataaataaaattagaggccgtttgaagagatgtcagaataatctctgggttatatagggataagttgacgaatacctcttttttgtatctattaatcaaaatacatttatattatatttcattaaaatgtacccacttttgtgagtgagttacccaatatactcttatccttcacttaagtctagcacataatttttattaacttaaggagtataataggaacatcatctataaaagtaggcatatctcaaaaaatataaaaataaaggtaaaaattaaaacatataaaataaagagtaggtatacaattgtaattttctcagttatatatcacagcagcccattattcatttccaagccaaataggcccaatgggctatattttgggtccatctaatgagttaagagaaattttcatggcccaccttattttggcaattattttcaaaaatgacgttatttttgttatgttaagtttccgtatatgtagttgacgtttttatggtaattttctatttttaacgat

SEQ ID NO: 116032 - DNA, 2288 bp, Cannabis sativa
gagagagagagagagaaacaaaatggtattttggagggtaaattttcaattttcccactttttttttcaccctctcttctacaatccgtccaataaagggaggatacaaaatggtggaccctgactgatttttaatccctccaacactcctctccatccatttatccatcctgccaaacacataaaaatataatccctcctctccacactccctgcattgctcttccttcctcctaaaagctctcctgccaaacacactgttaggttcaaaattattagtatcctatctaataaaccacagagaaaagatgtcaaaatgatataactttcattcttttagttataaatattttccagtattagtgatttcaatgaaatgaattaccaattgctaataacattatctattttatcaatttttgttctctcatttagttggtgaaatgtttatgctatttatatgatgtagacttaattatgtagcatgccatgttttgcccatagcttctcattgttagaacttgatcaagcctttgaataatttaagaacaatcagattagtgattttattgagcctgaaggagaaaaatattttccaaaacaaattttttgttatttaatttttatttatttattgaagtaaagatcaacttgcattttgatgacattgattttcttatataattttaatgattaagctcatttttaattgatttattgcctcatgaatattttaaagaaattcattttgcatgctacaacctaatataccatactataccaagcaataatatattatcccagttttatttattattgtatgatttatctcatataaatttgtacttgttttgatattgcatttggatttgattgataatgtcttctttgttcaatgtataatatgtgggattattaaagttctggttatcttgatgctttataacaccttacaaatttgaaaggataaggtaagatgctggtttgttttgtaatttttggcaaaatttataagatgaagaatgttgcattgacaaatttcaacacagagatgagactcatgtactccaaaatcatgacacgagagagaaaatatatatattttaattacttttgtaattttaaaatagttaaaagtttatgaaataattgaaattattggaaccaataagagtacaacaatcttaattggcgtcttattcagctgtcatttaattgagaaatttaactattatagtgatttgccaacagaattaaagtaaatggggtattaacaccaaaataaaaaataaggggattataagtatacaaattaaaaagagatttaactacaaatttctctatatctaaaggacaaatccatctatataggatgttgttttttctatatctattaatgttaaatgtatttattattttattaatttcaattttacataaaaaaaaattgataacaaaatttgtatgtaaaattatttatttttttttataaaaatacctatataaaaataattcaaattaatttttttaaaaataataataattaaaattaataaattaataatttttttaattattaatataattttattttttaaaataaatatattattaaatattattataatatgtataaagttttacttgtatacaagcagtcctaagtaagaatattacatcataataactacaagatttaaaattaatggtaaaaaaaaacgttccctaccggtaggaaacttttgcaaagtcctaccataattttaccctatatatgtacaaaactatactaaacaaaccttgtacataaatatattatgggctttaaaattaatatttacagaattatggtagaacaaaatagtattacccacgacactgccaccagccaccacccttataccatcacccatttgacccatagagcccccgataacttttcagagacccatattaattcagaccaatccaccacccaagcctttaacatcagcaagaactctgctcaaactccatctcttcacaccgtacattatagccaaaatccaacatagaaagttagaccccaccacgagctccatcgctcctctgatcaacttaaaggtacaaggtggttgtatagctagccttggattaagataggctaagtccacccagcacaagagctcacaaagttttttctctcttttaatcagggacggacccattaagattgatgtgggggctatagcccccacgaacaaaaatattgtcttttaaaaaattaaatgtaaatttttttatttaat

SEQ ID NO: 116033 - DNA, 4706 bp, Cannabis sativa
ttcttcatttttccttaatctaaataatggaactgaagaaacacatggcattaatgcgttcgattgttgcatcccataacagggagcaagcaattgaaaaaaaaaatcctaaaaagaattacaaaacagacgagtgattaacatccagcagtaaggtttttgatgctgcaggagcagccacttcttctgacctaaaaatttcaaaaaagaaaaaaacaccctttaaaataattccaataatctctgtcggttggttctttcctgcatcatctacctaaaccgtcttcgatttgggagacttcttcttggtttgcctctttggaagtgagttctttacaccaaggaagaacagcagtgcaccgaatagtgcaacattctgtcaaagcacaccaaaaagaatagcaaactcaataaggtatataggtcccaagactcaaatatacatacatgtatttacagttacacaaacctggaggaagtcgttcaaaagtacaccaaactggaacttctcaggactgtagttgtagaaatcgtaaagaattggagtgaccaaggctaagtagaaaatctacagcaagaaacaataatatcagaacattaagctccacttgtcacacctttgtatccaaaagcaatccatagaaattctaaccaggatataagctccaaaggagcttccgaatataaataggatgcctccaagagctttcgaggctataatagttgctactaaatgcctagcctgcaagtagaattaagaatcagaagcgtaatcagacttgaatgttgagagtctcaatgtgaaaccataacaggagaggaaatcaaaagggtcttacatcaatattaggtaatgcaacaccaagcttggccgagagattttctttgagggtggtaaatttgggaaccaagtccttggcagcaggcccaccatcatcaccaaattcattgaacctaatcaaatggagattaacatgtcaaaacagaggtacatattttcacctattggatttgaaatacataccaaaatatgtaatggccaaattatttaagttatacttcttacataaaaagtctttctaataattgcaactctttcaacatatcaatttgtagctgcaaaatccaaggtctttctaataataataacatattgattaaattatgataatgtcaaagaaactatgcagatctaacaatccaaaaagagctgcaacttcaacacctgtcttctaactaacatcctttttttcgatgaagtgatggtcgccaaggtaagttggtgacactatactatcttcctttgggtttggtgtaaaagtgaaatttaaggttgacttattctccattctaaataatcttttgtagaaacaaaatataccaagcataaccctatatgaaaatagtaaaagaacacattaacaagacattcatggctcatattcgcatatgcccctcaatcaaagactatattaaaatcacatcattaagagtccatcccgagtccgacaacaaaaataaaatcttcttatttatttcttctccaatgtcccaacaaaccaatatttaaatagacccaaaagaaatgaacttagaaaaatatacataatatcaaaaatatgtgttaagataaattaccgaaccaattcattaaaacgaaaagattttcatatgcagcataatagattgaccctataaaaccagatccaatagctatagatcccagatccaagatggtaatgaaaatttgaccaaatcttaagtaaacattccgaataataactacatcatgttccatagaaaacgacaagtaaattttttttaaaaaaaagcatagtaataataaataaacttttgaagaacgaaaacgaaccacagaactgtcatttataaaaccataacgagaaacttatttacagaattcgaatacatacatcacgagcaaacaagagtagatctgagaggacttacgcttgccaagcggagaggatgaaaagggaggcgaagagaacccttccgagaaaagagaagaaccccattttcttcttattattattacgaaaaagcttctttgtatgggcaaactggaagctcctcactcccttgaacggcttacaagagagggaagtaaaggagagagagagagagagagttgttgggagatttatgggttgaatttataagagcagagacgagagattggaaaataatcaaaaacacgcaaatggaaaattaagaagggttgggggatttcaaaattttcttatttcccaaaaggaaaatttaatataaactttcctccatgattttatattttcctttttaagaaataaattaacaaaatttgacaaacataaaactaaataaataatttaaaaaaaaaaaaaaaaacgtgttagccgcccactcgatagtcgtatggtaaattgttgcgtgtgatacggtgaaaacgtctttggtcatccctaaataataaccaagtgagttccagcaaaaataaataaataaataatcaccaagtgattttctttttcattttaatttctaaaaattaaattgtatattttgacagctgtaattttatacgtttacatataattttccaagaatacttttttttttttttttttgaatgtagtgtttaaatagttttcgtaactttttcactaatttggattcccaattaagctatatattttgagtctaaatatgtatatttagctcggaataaatgtatacaccactttcttattaattaatacaagtcattgataaagtaaaattaatgataagtgaatactaccaaagcaaaaagggaaaaatgtaacttttttttaaaagcagtatgagtttaactttcgagacacccttcgttttctctagcgagcatgctttcaactcacatttatttctcttcctctccaaacagtggtgatcatcatcatgattttctacaactttttttatcttcttaggcatcttttctacccttcacaatgtcgtggtaacgccacatttttgacgattgacactcaactgcctccacccaagataatgaggtcagctcaatctcgagcacaaaaaatcttagagcaagcgcggattgatattaatgaatatttctcaagtttgatttgtttttagagtaaatctgatcattactttcctccgtatttaatttcgagcgtcctttcagattttaatttagggtttacctttaattgttgtgtgtaccaacctagattgtggatagatttggataatctctcgcctgaaccggccatttatgactattatccttaccgtctatggtactcgagtatacctaggatggatagtactctttgtaccccttcgattgccattttgcttgtgtctggctatttaagtcctaagtactaggattttttctttaccttatttgctcacaaacaactaccttgcctctagctcttattttgccagaaatggaagacttagtctgttctttttttggagctttgcatctcactgacacagaaaatactgtgcactcactcattgatcatgttgatactcatgaaggtcttccaccagctccacctctcttccatcttatggcaactttttacaccaccaaaagtttcaaccataattctctgaagaatttcttggagaagtattggaaaggaagattccttgtcagtgttaaaggaaggtcccttaactccaatttgtacatggctgctttccactgtgaaggtgacaggcgaagggccatcattaatcaaccttggatcttcaataaaagtcttgtccttcccgaaattcctgaccctatctctgccctcgtcccggaatcaatccataagatccccttctgggtccaaatccacaacatacctttctcacgtcgatccatttccttaaccaaacttgttggccaaattgttgggatccttctagaaatccaccaagcctcccttctcgaaacttgaagctcttacttaagagtttgtattatgtttgacgtcaccaagccctcccaagaagtgtcttaatcctctctctgagaatggcatctcctacctagcttgaactggagtatgaatgcctccctgatcattgttacttctacggtcgcttgggccatacttataatggttgcactaattatatgcgggcttctgatgagtccctcactctccaccgatcccatatgaaaatgttttgtgtggtattgctcgacccaaccatggcccctttggaatcttacctactatagtcaattgcatttttctaacactttaacccccaatctaactcatgaaacttccaaactagaaccttgtgaaccttacaagcacctccacctttggggaccaataaaccaataagacttctctttccaactccacgaggaagatcactttggcactgctgacctctatatttccacccaaacctcccaaataataatgctgacttatataccacccccactgttactattcccccacatacccagcaacaccacactggcccaagcccttcttttactgccttgaagaatgttgcttatgagggatccatatcatgctctgtaccccccagacaaaactccaccccaattcaagaagttctacttccccgattgctagcccaatgaataccccgtgttgacttccaatcccaaccctgccacatgttggaaatttattttacca

SEQ ID NO: 116034 - DNA, 1553 bp, Cannabis sativa
gcaactttcggccaaccacctacttcggccaaccacctagcaactatcttgcaaccatcgtctgattgaaaccttcgtctgatgcaaccaccgcacaaccacgtagcaaccacactgcaaccatcatttaattgtgtaagtgatagtgtaagtggtattttggtaattaaaatcacataaaaagtataaatattgtccttatcttatagaagtattttggtaaataaaatatcaatttatattttttatgtaataattattataataaaattattgtattcgtctatgattttttcagcaaagcatatgcagaaacacaattaattgttttacaaacattttagtagcatgattaatgtgggagtaattattaatattttatacatgttactcaaccgttttgtatgcctaagatacggcaatgaagtagatgtataggttaatttagtcttctacgttatcattggactttatgagcaaaaagtaaacaccgacaagtatatactaatattgaattattagagcactattaaaatcaactctatgtacgggagaagtgtctttctttatgtggaaatattatagtgtcttacaatatttatgaagtgaaaaatattaaggtgtattttaaaatgtcaagtataataaaagatggtttatggtattaacattagattcatatattttaatttaataaatagtatagaaaacttttaattacttagaatgtatcatattttagtagtattggacaccttaaagcccaatacttttatgaaagttgtttcttttgtagttgtacatcacgtgttagttaatgctccataacaaaaaattgttaaaagttgcaaataaaattaaagctcgtcgggaaagtctttaattgatggtgatgtatatgaagccagtttccacgtacggtagcattctccttgctgtcatttgaattttttctgcaattgccgtgtgacgactgacgactgactaaaatcaatatcaataataaataacgacaacaaaaagtctcatatggtcaaatataaatctttgggtaattttagaatgcatatcttaaactgatacatttagttattgagaaaggttagtaaataaccttatttttaactttagctatagttaatgtctttttttttttaaataattaaataaatatcttttttttattttttaatacctaaaatattattcattatataaaaagtattataaaaataccttagagtaatatgaatataacatataaatactataccttagagtaatatgagttattatgtcattttttatttcttttactgatatgtattcttttaattttattttttatttctttccttcatgatatataatataacatataataccttagagtaatatgaatatagcacaacaattccattgtcaaataaatatataaaagaaactaaaaacttcaattaatatttaatagttttttttttctttctatccttcacgatataccatatcacatacaaacaatataccttagaccaatatgaatataccataaa

SEQ ID NO: 116035 - DNA, 1360 bp, Cannabis sativa
ttaaaaataaacaaataaattaaggtcggtgtctattaacatatttattttagttattttttttttgttggcatgtgaagcgcgttggcttgactctctcctctccttctcctccgacccatgtgtctattatgtccccaaccattcacctttccactaccccaaattacctaaaaaaaatttaaaattaaaacccaaaaatatataatatatattatccacgtcttccacaatttttcagagccttgcattaagattacaatttcacaaataccacttcttcttcttcctttcactctctcaaattttcattttcatggaactttcttcttcttcttcttctcttttcttcttctaactccaacccaatacttttctttcttccttttccttttcccaattcagaattcatgtttttttccaaatccaatgcgatttctcttgcccatttcggaacacgggctactgataaatgattttccattcaaattcttccactttcgacttttctccgtcatgcaaatgtggaaccacgacctccatcgatttcaccaccctccgaaaccgccacctccttatcgctagcttttcttaccggagtttgcggagaaaatcggggtttcggtttcagtttcagtttcagcctcgtgctgctgtttctactgatgctgctcctaagcctaatttgagttctgagctcgttaattcgaccagaaggggtgctaagagatttgtggtcaagcaatttaccgatgaattggccggtgaagagttgtctgaggaggattcttcttcgattcaaatgggttcgaatttcactaattttcaggaagaccccattgttgataagctcagaactcaactgggagtaatacacccaatcccggcgccgccttttaatcgaaacgtcgttggattgttcgtcttctttttcttcgttggcgttgttttcgacaagctatggacttcgaggaggaagaagaagttggtgggtaaagagggtcggctaggtgcttggccgcaagtgcctacgagcttctcattgttcttggagaaagatttgcagaggaaagaatcagttgaatgggtgaatatggttcttggaaagttatggaaggtttacagaagtgggattgagaattggatcattggattgctgcagcctgttattgatgatttgaagaagcctgattatgttgagagggttgagattaagcaattctctttaggagatgaaccactgtctgttagaaatgtggagagaaggacctctcgccgtgccaatgatttacagtgagtttgctgttttaattttattctttttctgttattaattgaatttttattgccattaaattac

SEQ ID NO: 116036 - DNA, 2830 bp, Cannabis sativa
gtaatgggttttatttagggcacaaaacctaacatatcgttccttcgattttctggaatgtcctgcgatgtgaggtccactgatgatggtcaatatattgcaaggagttctaaaaccactcgcattgtgattttcttctttggcttgcgcttggggatgaccttcctcgctcttcttatacttgctgaatttccctcgtctaattaattcctctatttcatcctacaaaaaccaacattccagagtagtgtgaccaatatccttgtggtacttacagaattttttcgggtctctcttgtcgcagtttcccttgattaggggaggttttttgaagactccgttcttttcttcaattgcatagatatggtaccgatgaaccgcaaattctgtgtagttcacaaagcgtggatgtcctttcctcttgggagatgactccttctttggagaggatttggccaacttcggacttcgctgtctttgcgaactgggtcttctagggctcctccccctagaactttttcctctagcactgcgcaatcgtgatcgcggtactggcgactcacgcttatccttccccttctctagttcagctagagaattctcaatcctcttatgtggttttgccatagcgaaaaactcgaccaacgatataagtcttgaggcctgcagctccttccaaaaatcagttctcgataggacatctgttatcaacatacaaactaacaaagactcggggccttctctacttttgttacttcaacattaaagcgtttaaaataatcctgtagagattcaccgacctcttgtttaatgttagccagagtggtatagggtggcctataggtgatggtggcctgaaagtgcatgagaaagaggtcgactaaagtctcctatgttgaaatagatgcttcaggaaattggctaaaccaatcctgagcattatcctctagggttgccgcaagaatgcgacacttcgcaagctggggtacctggtccacttccataatagtattaaatttttctaaataatctataggattagtggcacctttatacttcagagactttgataaacgaaatcttttaggtaatcgagcttgtggcacttccgtagtgaaatgagaagtccaatgcagcttgtatatgggctttctctgctgctcgatcatcttcaaagcttggaaaagcatacactgatcgatacctcctgctagggtagtgttgccttgagtcgtcactggtgccattattactacagcaatatttgctggaatattaactcctatagttgcacctggtgtgttaggcaggtcagtgcaattatttatgccctgatcacccaactgaggatcacgaggctcttcatcgttttggggctccttaaaacgcaccctaaaaatggcgttaaggtgatcacaaagatcacctttatcaacttgataccgccctcctcgcggtgttaccaccgaacctgacctagtgtaccttctaggagtacgactttgcaaagatgaggagtcagactcaatgtcattttcttcgttttgcgatgtgcgtctgcgaggattacgtcgctctagatcttcttccgtttgcacttcacggttgaagtcccttgcagattgaccccttgacattgggtgatttaaatcaagcccttcctgatccgtccttcgttcactgcgagtacggttatttcgacgtctagagtttgttacctgggcattatttgagtgatattgggcactcgaggaggacgtcaggtcctattccgtccataaatcttggcctgtaaagcacgtatttgatcctatattactgtgtactgatcattggttagttgaatgatgccctcggacactactacaggcgtaataggccaaaaataacctgtcgtagctactggtgtggatgtttcaccaacgtgaggagcaacagtttcggaaaataagttgagaggtgttacgttcatccatcctacaccaccgttgatagtatccactggaggtatcctatttccttgtcgtgggacatttatcattccaattttgattgatttgctgttaagacctccatttgtttgatttccaaccattgtgattttccttctaaatcacttaagtattatcgttcccacagacgacgccaaatgttgttgaaggaatttttacaacaccaaaaatagataataataataataataaatatataataagtgcgagtactcgacccagaatggtgagtattcaaatcatgaacaaaaatacttcacaaaagacttgaaaaatggtgaacataagaggaatatagcggttcagtcagatctcggtctgctaagtctactgttgcaaatattctgtctctttttatttcacggcggatcacacctttatttataaagcaagtgtcctatcatttacacaaggattgcattcattatcaatcagtttatacattgatttacaataattaagctaaaaaacgtaaacataataaatgaagaactttttccagtttaattcactaaatacagcaacgtatgtgacttctctagtgcgagttggttgttcatattcttgcataaactcgcaggcttaagatgcattcgagactagttgagttctggatgtcttctttccttataaagtcgcttttacggacatcatataacgagctgatagaaccaggacatgcgagtctatatcggtttatcgaggcgttgggtcatcacgaccagctcacaacatagagaatcgatctctatgttttcgcaggaggatcgtggggatactcgcatatatcttgatatatgcgggttaaatccgttcct

SEQ ID NO: 116037 - DNA, 1231 bp, Cannabis sativa
aaaaaaaaatctataagtatccaaaattgttttttttttttattttttatcagacccgctagtctttttttaggtttaggtgcagattatgttagagttgtgttttgttactgtcgttcgatttttactactgcgattagtcttgcttctgtgacataattttgaatattttagtcttgtatgtgtgatatgattttgagtgctttagttttgtttgtgtgacataattttgagtgttttagtcttgtatgtgtgatatagttttattttgttgttagtttctctttgttggttttgcgactgaaaggattgttagtagtgcagttacgcacacaatagttgagtactcaagctacgagattgaacttgttacaatagtttttacagttgtgttttctgagtggtaaaccagaatatgagtattttaaggtaaactgtgttgctgcaatttttttcatttaatttaatttattttttttattaaataatttaggaattaagcttgtgattatttgttctgatcatgttgtcaacaaagatgatattctaattagattgcaagcgattattttattaatgaaacactattaataaaattttataatttattaaaaataattaattagatcatgaaataatatttatcgagattggtgttgggaaaaaaattatatatatattattcattaatagtttgtcggttaaaaaaataaaaaaaaaagtgaaaaaagttatataatgtattctttacatatggaataacttgatacgcaattatgtgtacatgtcttttttctaaatgttaaattaaatatatgctataataataatgctaatttagtttttatatattttaatattttgaaggaactaattaatttagtaaactgtctcaatatataaataaaaaatatatatacctttattagttagagaattattttaattttgagcaatttagttagagcattattatatctgcacacacatttgaaaatatttacacaataacagttttaagtttatttttgtcttttttttttcattttattatttaaatttataatggtcaatcggtttaatgccacataaaattacacagtataatatatatatatatatatatatatttaagtgtcttacaatatatgatcacagtaaaaaatataaatagatctgataagtatatttatatatactagtaaaaaattacgtgcgaggcacgtatact

SEQ ID NO: 116038 - DNA, 5357 bp, Cannabis sativa
  modified_base (5319)..(5323): a, c, t, g, unknown or other
aaaaaaaaaaaaaaaaactaagtggaaatgtttattaaaaaaagaatgaaataggaaatattttgtacttattaagtaaaaaaataaataaagagttcagtcaattgtcatccctctctcaagtcgagacataagatgggataaaaatgctattttcgtgaataatttgtggcccacatggttgcgattggctaattactgttgtggataacatttccttttttcactttatatttttctattctaatctaaaatctaatgtaatggtagaaaagcaaaaagcgatttcaacgccagaagaaaagagaaaattagctggtctttatgccccaacagttgcgcccacatactagtacaaacaatgacacatattactactttctgacatttattatcaactgtttcatataaagataaaacaaacttcactttatcaatcaattcaaaccagttttcctttttcttgtacacagattatatcgttcaaaacgcctatactaagttgaaaaaacattaaaccagctcatttgcacatgctcatattaccctagaaacatgactcgatttcaattatgaacatatcatgccatccgtggtcgaagaaaacaacccatttcagaatcaaacattacccaacaattcccacttgaaatgcaattaaagggagagagtgagttgaaagctaatctactacaaaagtaactaaatcccctgttcactgtttccaacgacattttttttttcttacaaaagaatttatccaaaaacgaaagaatgaaaataaagttgaaaagaaaaaaaaaagtgaaacctaaatagtgaaaagaaatcaccattttaccccaaaactaaggaattcttttttccataattatcacaaccttttttttcttcttgttggggtttctggtatttggtgaagcagatcaaagtgtggagggctagcatctcaaactccctctaaatgttccgagtcaactgtacttgagttgagaacgttgaccactcatgctttgtattatcatttatatatatatttctacttaaaaatgtccctaattcatgttatgttcactgaacttgctctccaattaagtcaagaccaaccagaagaaaagctataccctgaaagagcaagaagtagaaatgaataccctgagcagagagcaagcttcttgctgatgctgcaagtaaaaggaaggccaaagccaattcttttgtatacatcctattgtgtttcgacttcttcttcttagaggccttttcatcatgctgtttgatttcttccttcatatcattaaggtccggaactgagacccctctttgatgcttcagctctttctcaaccaaagaggtgagatcaccttctgatgagcggccagacttctttgtcacgacccactcgtaagcactgccaagctggaatagccccgagatcatggcgttgaacttggtcactgacatagtgttctcaaaaagaaggtaagggacaatgaaagggaatgatttgggagctgggaggatattgagaaaggacatggtagcggggatataacacacaatccatgctgggagctgagcctctggaatgaacattgtcattgggagaataatgcaaaaaagtgtgaaggagtaaaagggcaatatcagttttctgagaagaaagaagaggaatatcaaattgaacttcttccaaaagctgatctgtaaaaaaagaaaaaaagaatgtattagaaacagtttaggaatctataaggaatctaagtaaagacaagccaaactcccaaaattgcataaatttaactctagaatagtgaagacaaacctttgacttgattatatcaggcaagcaaagcctaaacagctgcataggccctgaatgccatctgtgttgttgtttcctataagcttcataggattcgggtaattcacactggcactgaaaatttggatagaaaaagacaccaggagttaagttgtgcccaaaccaaatgaagaaaatgaaaaagcagccatagatcaaagcctaaagaagtaaaaactactaaaagtaaaatacaagacaaatacctcaacatcgttgagaaagatgaatttccagccatgaagatgagcacgaacagcaatgtccatgtcttcaacagtagttctctccaaccatccaccagaatcctccaaggccttaattctccacacaccagccgtcccattaaacccaaagaagttaattaagcaaccattcacttgctgctctacctcaaagtggaacgctaaattaatgttctgtaaccttgtgagtaagttctcatccttgttcacaaaggaccatcttgcctgaaccagaccaagttcctcgttatcctgttagaatgaccagtaagtatattcaagtcagtttattaatggtatgataatttggccttttcttaacccctagaacagtaagtatgtaaatttatttatggcagaagtaaaataaataaagggtaccttgaagtgaggaactgttttcataagaaaatcagaggtgggctgaaaatcggcatcaaaaatggcgacgaactcatagtctctaacatagttgcaattcatggcagacttaagattaccagccttgtaaccatctctaagcactctatgccgatatacaatgcgggcaccctgacgttgccatttattgacctcttctttgataagtgtttgagctattgggtcatccgaatcatcaagaacttgaattagcatctttgactttggccagtctaagttgcaaacagcaccaatcgattgctgataaacctgaattttcaaaacattgtacgtaagacacaacagtctccacaaacatttaataatcatagagaagctttacttgaggattcaaatttgcttacctccttttcattgcacatggggatctgcacaaggaccatagggaagtaaccattctctccagtttcaagatccaatacaccattcttaggaacaggtttgatcttctttaagcggatccagaagcaacccaagcagaggagtagcctatccaagctctggataaggaacaggacaatacaagcattagccaagaactgcagaggaggagcgagatactcaacccgaacgaaaacccacttgaaataaacccaatcgaaagcacccttgaccccaagttgtgcattccacaagtactgcaattgaaggttcgaagccccaaaatgccatcccttaaagtatgccgctacttcaaacccaagcataagcaaagacaaccacagaaacaccttaatacaaccataaaaccggcttttcatagccgggttctctgtttcccgacgtccacggccaccggcgtctctatcatgctcagtgtccgtacgacccgaggctaaacggcgtcgtacaacggcggcgaggccgaacattgcagaagcaatggaagttaagcaaccggcggctctgtgggccttgaggaggaggacccaagtgagctgcttggcgtttctgctccggcccttgtcacgggcccgaaccggtgagtcggccatgaggaagtcatcatcgatcggaccctccagctcgaccatggaccagtttggattctccatcttgacaaccaccggcgtacctcgccggctgtcctttgcccaccaatcaaacgacggtgccattgttaacgtctgatctcaaaaacaaaaactcttttctttttctgggttttctattgtagaccgaatcccttcttctttcttcttcccctggtttcaaggctatcaagccggttgaatgtttgtaacaaaaccccagaaaaggctacgactttgatctcattgtcagagaacgataccagaaaaacggaaagagagacgcgtggagaagaaagccgagcaaaacgtctctaaatcatggtgacattggtagataatttatacgagaaaagctcttctagaaaaagagagagagagagagagagaataagagagcagtgtgtgagtttgaagaagaggagatttggttgtggaggatttaagtccaaaatcagctctcattcaattacagcttgcaaagggggtgtaataataagaagccgaaagaaagagagattggtaacagctcaacacgtctttgatttttgattctgaaaaaacaaacaaatttaaatttatattattaaaaaaataaaacagaaaacaaaaaaatggggggaaacaaataataattctaacaaaaaataaaaacatacacggacaccacgttcttaggtcacatcactaatttttcgtatttgatttttttttactggtttacataccaacaacgccaccggattttcttacaccataatgcttcatatatatattttaaaataaaacaactatatatatgactaataatattttatcccattcaaacatatatatattatgatacatgggtctaggttttaaaggacagagagacaataaatgatactgtacaaaatcatgtaaataaataaataaaatcacacgcactgatgatacgcaattttcctttctttttttaattaattttcctttctacctactcttttaaactagccataaataaaatcaaataaaacccagaaatgtaagccctatccctggttattttccttctcttgttctctaataaaatatatatatatatatatttagaaaaatcaaaagagaattgttcatagaaaaaatcaagagaattaatacaccttgagttatttttatttttcagaaaacggaaaccattatttatttgtcctttctttttaggatgacttggtctttcgtggtcttatcccttgtaaggtgatgtttagtttaagggttcggccaaactctcaataattttatttttattacaactaatttttaaaatttaaagtttgacggtaaaatctcaaaaattacaataccattagcaatttatattttttatctaaatttaacttttaactttcatgttacattattcacgtagacacaatgtacacatgacacaatttaattggtccatataaataattaatttaaaaataaattaaaataaaaaaataatttttttcctattctgttttttttttttccttcctactttcttttcttttcgtttttttcctttttctttctttcttttcatctgttctgtttgtttgttctttttttttttttcattattctctctttattgaagatacaaggagccaaggacccagacctgtcgccaatgactaccgtgcctgtcatcgtcattgaggacccccgacccacgtaagtcaatcgcctttctctctctctctctctnnnnntatatatatatatatctatctctcagtcctgatc

SEQ ID NO: 116039 - DNA, 1219 bp, Cannabis sativa
actcaaaccgtaaatttgaaaaagaaaaaaaaaagttaaaaaaaatagtatatgaggtaattccccaaaataaaaagtgttttggtagatattttctaaaaatagattttagttttttttttctttttttatcaagaaaataaatttctattaattacaacatgcatacaatcaaaccaaaactcccaaactggcagcagcaaattcgttaacatattgaaaggattttggggggttgtccaatatatccatttcaattaaaattcgagcaaactgaaccctagagaaatctttagtgtgtcggtctaccatgattggttttccaacagtactaactaacacactgaggtttttattttcccaatattgaagacctaggccaaataatcgaatccagaggagcacagatcttactattttaacagagtttaattttgatgtccacggacgagtaataactggcttcctatcgaactgcacaactctagcatccagcacttcgtttcttgttgcttcatcattgaaacgaaccattaccatccccctggtcattctagctatttggacgattccaaggtgcccccatgtcctcttaatgaatccctcaaatacagtcatgggagggttagctcccaatatcatacaaattatagcagcattctacaattcagcttgctctttaatttcctccagatccacttgagcaattctttgaccattcttgatcataagttcagtgtaggttaatttggcatcagtatactgaatcttctctttaggaaacgaagtccacaaattttttgtcgattcattgtatttgccctaattcacttcttcttcttgctccatctccgtttgtttagcccaactaatactcaccgaaggagtgagatattcagcaaggattggtgaagatccaactccttgttccacttcctctgtttcagcagctccatgaaactcagtaatttccttgttcaaacccgtggaaagcctatcctcttcatcagtttgttcggtttggacaactgctcgattcgccggtctgcctggtcttcgcacaattctcttcttcttcgccaagggagaaggagagaacatagagaaaatcctatttttggcaaaattatttatttttttttgttttgatgttttatacgccaatatactgcctttaattaaaaaaaaaaaagaattgtcattttttgggcttccacgt

SEQ ID NO: 116040 - DNA, 1438 bp, Cannabis sativa
gtcctattttccttaatgtttgtgtgtctcatgtttcgtagagattgcaaatccaagccgctcatggcttggctaagcaagcattagtgttggataatgattgttcgtggtatgaggattgccctcctactattttttctgttgttgtaaatgacgcttccaattaatgataacagaacttttctcaaaaaaaaattatataaattttaatttttaagggtctctaaacttgtggggcctggtcctgaccactccaccctcgaccaatcgtgtatatatacagtaaaacttattatactgtatatatttgtcttttatactatattttgttttaaaaatttattttatttgtcgtgccaatcaatttttcatttaactttttttatcatcctatacacatttttcctccttctactaccaccatcattacaatattctcctcattttcatctcattccaccatatcaacttctttgcagtatgtttttatttttatttttttgaaatttcttcaccatgttcatccatttcgctctattagacagttttgagttggtttaacactcttttggaaccattttttttttaaaaaaataacaaattcccttttatttttcctcttctttattagtaaatttttcctataaataatttctaagggtaacaatggcagttactcattcttcttcctaatcttttgttgtgaaaaaaccaaacgaacccctccccccacacaataattttgcccaaatcgggagtgggtaagaaattaattgccaaaaaaaacctaaaagagttttccctagccctacatcttcaatcaatactaagaggaagttagtagttaattctatagaaacgagaaaatatatgcatgttaagtctattattgaagattttcatgatgaatattttgaacttgaagataaagatattaaagtaaacaaattgataaaggtaagtaactattctgtgattgttggttttttaatcatcaatgtagtttatgtagttttatgaattttttgttaagttgttgtgtaaaaatttataaaacactcaaaaaaaatacaaataataactcatataaatatattttgaaagtattttaatatagaaaatcttaaatcatattttgtagaacctttgctaaatcaaaaaagaagatgatgataataagacgagtgaaatcactaacatgcatttattattggagattgcacataaagttatgatcttccaaaaatacattatttgtctaaaatattttctatgatggggaatgagagaataaaggaaccctagtatttcgaggggaccactatttatttataggctcattatagaagggaaatttgattttctatacttaaaaaaccttaatattttatttttaaaccaatacatttcaaactaagaaaaatatgacacttttatc

SEQ ID NO: 116041 - DNA, 2181 bp, Cannabis sativa
agctcgaaggaaatcatcatttcacttctaatagttatataagatatatattctatatccataattagcgtttccactcaattgtactaccatgttctcaagatgtaagtattggaccggtctaattagtcaactttaacgaacaagtcaaagaatacaaataatacatttaagtcagaattaaccattttaagattaagatctattgacctaagatcaattatgtgatattgacttagaaatatataacggtaagtttatgatatcttatctaatgtcaatattggtccaatttgatgtatactccatacatctaatactagcatactttgctaatgctttgaaaaggacataacacttatccaagatgggaagtaaactttatcgctaattatcatgttagagtaaatccaatatactaataaatcatgggacttaaactttaaaacatataatcatgattattctccactttgtagacaacactatagtcatgaataactatatgttctggatttaatagaatttatgcattaaacttataattatgaaagtaattatgtgagtcatgcaacataaaataatttatgatcttttattataattagtaaatctgattatattgaaatagattttatttggggttaaaatctcaacatatataatatgtgttctattttttttttcttaaatctcatattattaaaaaaaatttcatgtaaaattattttgtacatattttacagatttctaagcccaaatgatgaattatattgtataaaataataatgtataagtttaaatttgtgatattttcatataaatctattttttttttctaatttttggatttctagtataaatatggtggtagtggtgcagtggttcggtttttttttttacttcggttcatatttgataagtgttacaaaggattgtggcaaaattatggaggaattctaaacttttttaagttaattgtatttgtgatttttgtgactttactaattgattttattctctgggcgcgtccacgtaaactaatagtgtttaaaagaatattaatattacgtataattcttttatatgaagttttaaattttgtacaatttatttttgtctctgatctatttctgcaagtttgtgttatgttgtaataagttttcaatttttttattgcaagttggtacatttatgcttttaattacaattattgaagaaataaattgttttatgcaaaacatcatttttcaataatttgttaaaatattgtcaaatattcttaatataactataatatataccatcatataaaaataattgttgtaattgaataaataattttcccaattttaatacacatcatcattttagaaagactaataatatttatttttcatgaactatgaaaaaaaatcaaaatcttgcacccgatcgaatgattctatactctatagttcaataatgaagattgctattgaactaaataataatatattaatgttattgagatatatgatttggtagatgtcctgattatccaataatgatagtgtgatattttggatgctaatatgacattttcgcataataagctttttttattattatttttcagtcattatatttcgatgaatttattgtttgatttctaatttatataattacaattgccaccaccaccaccagattacagcggaattggtagatgtttcaaacacaagagaaaatcaccgtgaggagtggggttggaagtgatgaggttgtggttgtgaagtgaatcaagtaattttaagttgtatagtattattttagtgatagattttgtttaaactttgtaccagagcatttaaaattttgatgcataggaagtctcttcaaaattttacttaaataacgaattctttcataaatatcattcattaatttttgtaggtactgtctttctgttttatatttatattactattttaattttgtatgatggagttttgacttgtttacgacgaatttttttttttttatatacttttaaacaaatttgtatgttagatttttattatgaggacaatataattgtgatgtgaaagttagagatacaatagaaagaaagataataataataaactacttgttagaatttgaggaataagatgaatgaggttccatcccaaaaccaat

SEQ ID NO: 116042 - DNA, 2321 bp, Cannabis sativa
  modified_base (2279)..(2280): a, c, t, g, unknown or other
tttgaaggctcgaatattggggaagaaaatcgcacctgccatagaagaatatgaagaagatgattagaagtagagaacgagagatggatgttgtggggagaataaaaaaaagattacaaaatggagagaatgcttagtaaatatgaatcgtacagggatagtgaaagctgtaaaagtaagagaataatttgttatcttatgaaatatgaatctccaaaacgtaggatgtccagatctattttaggtcgtgctcgtctatatcgatcccatttgattcatcttcgtcttctaaatttaggagaggtgctcgttgttgtatcattaaaaactctgaatgttctttgtgtaagataatatactaaaattatttttaattttgttattttacagtagtccatgaataattttttttttttacaattgtgatctttaccttttttttttttgtaatgaaagggatataattgtcacaaatgtgttcataataaagatgacaatatacctattcctccatggagttttgtgattccggatgaagatggtgaaattacaatcaataatataccacaaatgttaacatggactctctaaaaattccggaacacataaaatgtgtaagtatttatattttttgttggagtcattttagtgtagtcatatatatatatttaatttttaaagtatttattagttatttttttttttggatgataggttaatgtgcaaaagattaatactttgatgacaatgattattagattgcacaatgttttggtcatgaaaatccttgaatctaaagaacgattgaatggttttagtaatctcatacatcaactatgtcgtcacctaataagtttacattgacaattttgaaacctctaaagaacgattgaatggttttaataatctcatacattaactatgtcgtcgcctaataagtttacattgacaattttgaaaccttatttatcattatattacaacttattctaactcttatatattgactcttcttgctatttttttgtttttgttttacttttaggttgaattcaacacaatgaacttacataccgataatagtgttaaaatataccatatgagagtgttgagtaatatttgaattaccaagtaataaaataatattgaagatgttaaataagtttatgtatattgattgtaatctttgaattatgaattttaactatgttttatcgtttattacaattggtttgcatatcttgaattatgaattaccaagtatgttttttttttttttttttgttttgagttacacgcctaggtttcgatctcatactcaaccccacaaatgaccttccaatctcctgcatacataggtattctcaagttgtattaatctttatttattttcaaatttaagattttttttaagaaaatattgcttaataagatatgagaattttggtagtactcatgtaaaacactaaaatcacaaagtatagatgaaaagaataaaataaaaaagcatttgcatttattgaaatcataaaccatacacaatacataaattataacatagtttaatttaaatttgaaatacattaacacatatttttaaaatgaagataagcaacccttaattgtcttcaggaattctaatcttcttgacgggccacttaatttcatgcatttccaccttttttgtttagtggatctttcatagtcatctttcttaccatcaaactctactttttgtttgagtttttgattactaattttgcttcattaaaattttgtcagcagtgataaaatattttgtctaaacaagatagtgttttaattttttttctattattttcgcatttacgaaaaataataattatatattaatttttattttttgtaggaataataaaaaataattaaagttttaaatcatttatattttgaagatgatattttatgtttattttttcaagtaaaataagcatggacatttaatatatgttatcatacacttagtgtttccaataacaaggtaaacatgtaaattatatgtcattagtagtaacttattaccatatacattaaaaaagtaagtatcaaaattatttgaaataacttcaaatatatatttttttaccattccaaaaaattagactaatattattgcattattgaaaagggccggcccatatggtgtgcaagatgagcacatgcccagggcccaaaaaagtaagagagtccaatatttttccccctgaactttgacatgtaccaaatcgtgccccctgaanntttttggccgttaaaaatttccctcgaactattgagattgt

SEQ ID NO: 116043 - DNA, 4535 bp, Cannabis sativa
ttcttaacaccacccctcaaacaagagggtgagtgtctcacaccgagtttggaaaccaagtagttgaatcttgaatgagaaagaggctttgtcatacaatctgctacttgatcagctgaaggaatgtatcttacttccaatgacttgttcagtaccttatctctcacaaagtgtatgtcgatctctatatgcttagtacgggcatgatacacaggatttgaagctaaggcactagcactcatattgtcacaccaagtaatggaacaagtaggcagaggaaatttgatttctttaagtaaggactcgatccaagttagttctgcactaacatgagcaagtgctctgtactcagattcagtactggatcttgaaacaactgcctgtttctttgatgaccaggacacaaggctttctccaaaatagacacaatacccgccaacagatcttctgtcatcaacattgctggcccagtcagcatttgagtacccagtgagattgagtctgtcactacaacagatatgaagaccttgaaagctagtgcctttgagatatcttaggatccttttagcagcactccaatgagaagttgttggagctttaaggaattgactaagggagttgacagcatagcttatatcgggtctggtgtggttcaagtactgcaaggctccaataagacttctgtagatagttggatcttctattggtttcccatctgctagtgacaatgattttccagtagctattggagtaggacatggctttagatgttgcagattgttcttttccagcagatcttctatatattttgtttgggtgagatacaggccagtttcatttctggtaacttcaatgcccaaaaagaagtgaagggccccaagatctttaagtgtaaacaacctgttaagcctttcaatgaatttgtctagatgaatcttgttgttacctgtgactataatgtcatcaacatagatcaatacaagaataatgacatcatggctgatatagaagaacaaagatgtatcggcctttgagttgctgaagttccatgacagcagggtgttttcaatttgtcaaaccatgccctcggggcttgtttgagtccatacaaggacttgagtaacttacacacatggttatgttttgttggatcttcaaaaccttctggttggcacatgtagacatcttcttccagatgaccattcaaaaatgcattgtttatgtccagttgtctaacatcccagccttttgacatagcaatgcttagcacaattcttacagtacttgctttgacaactggactaaatgtctctccataatccaaccctgctctttgatgaaaccccttggccacaagtcttgatttgtacctttgaaaagatccatctgcatttcttttgaattctgtgcacccatttacacccaattagattaccagcttctgaccttggaactaaaatccaagttttatttcttttaagagctacaatttcatcattcatggctccattccaccctctatgctgcaaagccttaggtacaattcttggttcttcagcaattggttcccacttggcctgactcgggtaagtttttggtttgaatatcccggcttttgacctcgtgatcatgtgatgtgtaggaccaatgtgaacactgtgagttgcatctgtcgaggcttctgtattttgttctgcaggttcaggatcagcacttgtggaattttcatttagaggcatctgctgtatgcaaaattcatctgcactggaaccagcaggaacgatttctggtgtaatagttccatgatcaagtcagtcaaagtttagttgagatgagtttgtatgatttacctgatttgaagaagttgctgctgtaggagttaaatcatgatgagctcgagatggtacagaggaattggtattttgtgacacagaggtgaagtgtttgaagtgaaaattaggaagctgagaccatgactcgttgtgaataacaagttgtttttcaggagcttgagtattcagaaagccagattggaatggaaatatattttcattaaatacaacatttcgagagatataaactctccctgttgtactcaaacatttgtaacctctatatgaatcattgtatcctagattcacacacctcaatgaatggaattgaaacttgtgattttggtatggccgaatgcaatgataacatgctgaaccaaatgttttgatttgtttataatttggttttccgcaatgtaaagtctcgaaaggagttttgttgtgtaaaacaggtgttggcaatctattaatcaagtaaactaaattttgaaaagcatctacccaaaatttaagtggcatactagattgagcaaggagtgtcaatcccatctcaactatgtgcctgtgcttcctttcagctcttccattttgagctgaagtgtgaggacatgagtgctgaaaatgaatgccatttgttctaacaagtgtctcaaatgcttgatactccccaccccagtcacattttatgcttttaatttttgcatcaaattggttttcaacaaaggctttgaaatcaataaaagcatttagtgcatcagatttttgtttcaatggatatagccatgtgaatctactaaaatcattaatgaaatgtatgtaaaatctgaaattggtattggatgcaactggagcaggcccccacaaatcagtatgaatcaattcaagtaccttagatgctctataggaagacagtttaaagggtaatgcatgagatttgcctaactgacaagcttcacaaaaattttccatttcattctttggaatttttacattgttcaattcacacacaagcttaagaactctagtagatggatgacctagacgtctatgccacaaatccttcttggaatgataaaaactagctgtattaacagcatttgattttgacagactcgaaacaccagtaaagaactgagactgactttgattgggacatggtttgttggcgaattgatagagaccatctctaagcactccttccagcagcaccttctttgtgatgttgtccttcacaaaacaacaattaggatgaaattcaacaaacacaccattatcagaagttaaacttgacacacaataagttctttgcaatatcaggaacaagaagcatgttattcagcaatagagatgcagacttagtattggtatttagttttccataaccaagatgagagatatgcaaaccattaccattaccaatgattagattttccttaccaccgtattcctgtttctgcaccatgttgttttcatcagctgtcacatgattacttgctccactatccacaaaccaagcctcactgtcgattgtttctggagtagctgtgtatgctgttggtgcttgattttgtttttgatttgtttggccatgaagctttggatcagatcccatgtaggcttcatcatatctgttgtaacagatagctgcagaatgaccataacgaccacaaacctgacaagttggtttaggtccattcgaacgaccaccacgtcctcttccactgttaccacctccacgattgtagctacttcgacctcctcctgactgattttggtgttgatgacttccctgatttgaataagaatggtttccacggcctctgttgttgggaaaagaacgattggctagatttgcatttggagaaacactgggatgagtcgttttgttgctgctgttgagactcagattctgaagcctttccatcttgttgtcaaaggcaaggagaataccttgcagctcctgccatgttgttgaaggtcgagcttcgatttgaagaacaatgggcaaatactcgatatccaaaccagaggtaacattggatacaagttgattttctgggtaaggctcaccagcaagagccaaggaatcagaccacgctttcttctgcttcaggtaatcttccattgatgtagagccttttcgagttgtctggattagggtacgagtatcatcgattcgagatcttgagtgagctccatacaagttttcgagtgatttccacagagctgcagcagtatcacatcccatcacctcagtagctataccttcggtcattgaactgtacaaccagcccattagtagctggtcactgactatccagtgttcatactctggattaatggtgagatcaacaccagattcaccttcagttgctgttggtgttgtgatgaattcagtcggacatggtcgactaccattgatgaagccatcaagatgatgacctctgataaccgttgagaccattgtcttccataggacatagttcttacgatccaattttagaggaaagggttgattgagagtattgaaaggctgtgtgtatgttgagtgggtaacagggacagaagagctagcagcacctgctgcagcagtggtggttccctgaggagtctgagaattaacagacattggcacgggccttcgtgctctgataccaagttaaagaatgcactgaaagcaattacacaaaactcagctcaaaa

SEQ ID NO: 116044 - DNA, 2535 bp, Cannabis sativa
ctttagcttccctttttataaaagagattgaaaaaactgcctctaaaggctaatattgtagtagtggtaatttagacatccataaataatattccataacagattatagtttacagatcctaagtatatttttaaatgtagattctattacattagcaaataaaaagttaatatttgaagaagaataaggagaacaaagagaacactatgaatagaagttgtaggtgacactggcgtaaaaagaaacaaaatagaagattgcataaaaaaaacaaaatacttgaacaaaatttaaaaagcaagttcattttcatagaaatgttattgacaaataaaattatgcatttttttttattaaattaaaaaatatatgtataatgtatgtaaaacctttgatttcttaaaataactataggaaagtgaagaatgaaatccaccaccaatattgacatgcattgtagcttaatgctttagctatgagtatttttttaatgcaatttaatgaattaaatttatatattatattgtttgtatgtatcctactcaatccaccttcattcccggtagatggatagcaaaatcatcaattcttactcaagagcttgtccacaaaattaaacaaaagaaaggtaaagggggtctaatggctataaagttagatatgcacgaagcttttgataagatggagttgggatttataagtgttttgaaacataatggctttgatgagaaagccaacaacctaataatgaattgtgtcaagggagtttcttactctgttcttctcaacggtagtcccctcaagaaattcactccgcaaagaggtcttcgccaaggggaccctctatcccccttcatctttatactttgccaggaattcttgtctaaactattattgagagctgaagcacaagggaagttgcacgggatcaagatttccagaacagccctagctatttcctatcttatgtttgcagacgacacaatcttgtttgctcgggcgaatgttggggatgctagggaaatcctgaactgtttggcaatttatgaatgtgtgtctggccaagtttgtagtaaggtaaagtcaagtgttcttttctcaaacaacttaaatccaaacaaaaagaaagaactcctgctggctttggaaatatctcaaatccgtggaggggaaagacacttaggaaatccgtttgtctttaagcgaagaaagaaagaagagtaccaagtgctaaaatctaatatgttgaaacggttagaaggatggaggatgaaactcctctcttatgcaggccgtgtgatgcttattagttcggttgctgcttccttgcccatttacagcatgtcaaccaacaaagttccaatctcaacatgtcgagagctcaatgaaattttgagaaaatactggtggattggcaatgttgagaaggaaagatttatggcgtttaaggcatgggataagatatttgtcaaccaaaatcgtcaggaggcttgggattaaggcggttcgaagacactaacaaagccctcctcatgaaattggcatggtctttggctcagaaagagaacaaaccttgggtgaattgtcttcttcgaaaatattgtagcaaggaaagcttctggtcagtcatgccaaaaggaagcgattcctatctctggaagagcatagtggaggtttgcaacacaatactgaagggatcattaactctggcgactgatggcagtaacattgacttctggaaacaaccctggatcccatggctaattatgctgaattttctggattaaaactatagccgatgtctcaacatcaggagcttgaaaccgtaataccattttccaaatctttggaacagagttgggaaggaaaattgtggctatcccaagattgcctaccaatcatgaagatcaaacggtgtggaaggttagtacagacggtaacttttttgttcgaagtgcttattgcttagatcaagaattcagatttgattccaggagagttttatggaatgctaaagtgcacccgagaataagtgttctcttatggagagtacttagtgaagcaatccctttaagaagcaaaattcctttctgctatgaaaaatgctgcctattttgtggggaggagtttgagacaagccttcttatcttcaagaattgcagtgtccctaaggcgctttggttttcagggacctactccatactcagtgatagaatcccgggagactccttgttggactttgctgaaaatctcctcaactctttcccagcagaagacctatatcgtttgattaacttcatgggttgtttgtgccatgaattttggaagcaaagaaataacatcctctacaagggaggaaagttaaatttgactgacatgctaaggaacattcattcctcctggtctgaattacttcttgatgatgtcccttctagggagcttcccgacttccctacggaagaagctgatgttagacaatttatatgtataaactgaaacatatatgattaagtataaaatgcggaattaataaa

SEQ ID NO: 116045 - DNA, 2573 bp, Cannabis sativa
cggtactcaaaacggtacactttaatataaaattgaaccaatcacatttttgtaaaataaatgaaataaatgtactgagatgtaaattttccaaaaaaaatccgtaaaagaaaatgaaaaacctgcttgagatcttgccaagacaaattcgacaaagcgaagaacttcaaagcatcattgccaataatgtggcaatcaccatctgattaaagaaagcaacaaaaaaacaaataagaatttgacagaagccaaaccttgaagacaaatataactcacaatcaacttctaaattaactttagtttcatcttattctaaagagacaacattaagaaaattctgaaatatatcttaattattaatatgcatcaagtgaaagttgcaaactaataagaacagaaattcatggtttaataaatttcagtttcattttttcgatacaatatgttttcaatatctgcacattgatctcattaaaaggaaaaagaaaatagatatatacaggaagaagtttacataaaaatgattgtataagaacttttagaaattacacattagaacaattagaattatgctggttgctcttcgtctttccaataaatgagatgaaactcttcgatctggttgtagttcttgtcaaccctcacaccattaatatcaactgtcaactgtatataattaagtaaaagagtttaatgagtccaaatttaagaagtattcaattttaaacaaaagagcaaagttattgataaccaaatagatagcaattatcatagccttctcaaagtaataacttgagtttaactaagtttagtcttctcaaaactcaataataataacaataaaaagaaaggtcaattctcatcaaccaaactgaaaatctaaaagccagtaaaaaaattatcattaaaaaattagtttttttctctctgatattctcataaaaatagaaaatccaaaagcgaatttttatttaaaaaacaaaataaaaaataataacttattaaatgtacaaagcctcaaaagataatttcaagtaccttcttcattttaataacaaaatcatgcctaccaacatttcaagtttgaatgcattaacatcagatcgaattagctattcgatcctcagtctcagtctcagagagacaattttcacaaacccatttgcttttacagccatttctttgtaaaaacaataactttcttgtcaattcttttgatttttttttcttcatattcacctgcatagtcatatggtggaaacaagaaattatatgtgtaagaaaaatcaaacagaaaagaaaaccttattagaacactgaagcaaaaaaaaaaaaaattattatgtcagcatgagaatgttttgtagtaaaaaactccttccaagagaaagcttcaaaattgattgttcaatcgtcttcgcacaatgaatttgacaatctatctatttttcttccactaaactaaatcatataatgtatataatatatatttaataaattaaggtatcatgtccaagaaaagtactgaagcaaagcttctaaaagaaaggaaagtaagtgcaattttctctctctgaaagataattaggttagagtttagataagcttgaattttaatcaacagtttccttagcaaatatctgaaagaggaacaaattaaataccaataatcaaatatataattatataattatatatgctccgtcgacaacctgcttagtcaccgccgccggtgaagccgccggcgattgtttaggacgggccgcaagatttcccttcttgttccctattcttttactctatgtatatatcaatccgattgattcacatgcatacacctaaatacaaaaacgaaacaaaaaaaaataatcacaaaccacacatatatcgttcgtacatttcttctatatatacacatacccgcatatagatatatagatatagagcgagtcagagtgtgtaatataacttacttttaacagtgaataaaattaatgcgaggaggcgaatgaattggaatatgtacccggagatgccgtagagaaatctgcagtgaaatcgaagaggagagagagtaacttggtatgatagcctagctacattttcaaaaaaaaaaaaaaaaatagtggcctaagaataaaaaaaaagaaaataaaaagtcaaatcataatatttttttttataatagtcaaatcataatattagtgttcgtacactcagtaattttatttcataaaaaaatattataagtaacgagtagtagtacaatattatgccacttctacagtaattttaaaaaaaattattcttatattatgttataggttttatacttaaataataacaattttgttgaaaaaaaaaactgattagactataaagtatttaattcaattttactattttaactattaaaaaaatataaaatgaatcttacattttttttttttaagttataatagacattttgataattgtaatccattcaaagtacttgattatttatatatataggcagccgattttgtgcccaaatgtgcaaaacacggattggaatccgtgtacggcaggta

SEQ ID NO: 116046 - DNA, 1246 bp, Cannabis sativa
tgcttgagttttagtgcaatttcaaccttcctacacaaaagccaaagtttgccacagaactcaacattgttctcacgggcacatatgtttttaccatgcgtgaaagatcattaggggtctgatatgtcttcaaccatctttccgggagagaaggattgcttgaagtctatcacacacccattggggtttcacacctttggtcttaaacgtgaaacccttgcttaaagtttagtgcgactttagccttccttcacggaagcttaagtttgccacataactcaatatggttctcacgggcacgtgtgttttcaccgttcgtgaaagatcactcgtggtttgagacatcctcaaacctccttctagaagagaaggattacttgaagtctatcacacatctagtggggtttcacaccttttgtattgaatgtgaaaccatggcttgaacttaaacatgacttcaacattccttcacgaaactcaaagttcactgcatagttcaacacgattctcacgagcaggtgtatttctacgatccaggaaagaccactgggggttcgacacatcttcaaccatcttccctggagggaaggattgcttgaattctattgaagaccgtctgtggtcttcacctccatccttgaacatgaaactgctgcttgaacttaagagtgacttcagcctgcgttcatggaaggtgaagattgttgcatgatcaagtgtggttctcacaagcgtgtgtgcacccataatgcagtcttcatttcactcgtagaaatttcttaagcttttggttgaaaatacctcttggcattcaaacacatcttcaaccctccctctgaatggagaaactacttgaagtctattaaatggccaactttgttttcaccattagtttcaagagtgaagcctttccttgaattttagtatgactttagccttcctcagaagttaaaagtccactgggtatttcaaccgggctctcacgaaaagcacaaccaatacattgttaacttcgtccttagaacattgtttgatgatcaatgttgtcacattcgtccattggatgtgactaaagaacttatcatagagagcaaagaaaagaaccatccctccatgctagctgcattttttgatgcactcttactcccgtttgaggaaactttatcatagacgactttagatagagagggcataaagagccgagctgaaactttggcacgctcctgaatctcccctttagcgacct

SEQ ID NO: 116047 - DNA, 2476 bp, Cannabis sativa
  modified_base (421)..(422): a, c, t, g, unknown or other
aaaactagtttaataaaattgtatattaaatatgtacaaaaataatatatattatatataatatatatgttcggtcggttctcggtttaatcggtcggttcgccattgacactaaagctgaccatgttaaagcggttttaaccgaatgcggttttttcggttttcgattttttcggtgtcggtttttttggtgttcggacagtcggtgtattcggtttggtcagtttttttgaatttttcgctcacccctatttttcatctttaatatcatgtattcttgaatattaaagcatgtttcgcttagttcttcattatgcaaaaatataataatctttgatgaaatatctttcattaaatcgtttacatttaattcttagaacataaatattatatttttcctaaacatagtttctttgatttnntgtagtttcattaaattgtaacacatttgatgtttagaaattatattttatttaagtgtcgaaaaaaatcctacctttttgaaagtaacttgtgcttaaatagaaaatatagtgggatttatttcaactatatctaaacttgggaatcaatatacttataaatactattgaacttgcattttgtggattctaatatcttaataatcttattttacacattttatttgaaaaccactttatttttcattcaactttcattttaaatctttttttttgtattacttgtcttttattttttttttaaataaaatctcatcaaatatttagaactaggttagaatattcttgctttgtttaaaaaaaaattcttttgatgttggtcaactctcatgtgctcgacctcgtacttgcatgaatataatattctaaaacgacttgtgcacttgcaaatgtaaatattaaaacactcatttttgagtacaacattaatattatttgtaatcaactttggtactccattaagtcaactatcttcttaatatctaatttgactcattacacatgtcgtctgcactgatagcaagtgagttgacctagtgtatcttgtccattattatactggtggagtcatacatctttgtagtcttcggtaatctcactacaaaatctatagttatgtcttcccatttccatacgggagtcttctaagactgatgtaattctgctggccatcaatgctttgattttcacttactgacaaataaacatgttaatagatatcccatcatatcattcttcatccatgtctactactacattctcatcttggtattgatttagtcgtttattgctttaatcgttttttaattttaaatactctgctcatccctgttttaatctccaattattgtgtgtgaactattaatcttgtcattactaactgtttattgattaagttttagttattttgattctgcacattagttataattttcccacaaggtattatcacctttgtccaaaatcttatttcctctatctctaagcgcactaagggaactctctaagaaataactttgagaattatcaacccttatgttttctagcaagtgcttgttgatagaaaactagattgtacaaatgagcaccttagaccttcttatataatgtttaggattcacatttgatatcacacatccccatagatgttaccagtcaaaatagggcaataaatgtagataggaacgttggcaattagtgatagaaactcccttataaatttccaatattttgcaatatttttatacaaaaacggctccaggcgatatgtcaactagcactataggcgatatgtcacgtggagcaatatcattaagtccccgagatacattgaaaaatatcaaaaacctcccatttcttaaagtaggcaacatgtcgcttggaccagtttcagcatatcaaacttaagtttcaaaactcctctttgagtcaactcaacacccaacattctaaaacccatttaactaatgtaaatgaatattttgacaatttcaaactcttggaagcatctccatttgactttctaactcacatttataattactcacttaattgtatatttaccaaatgttaatcataggttacaaattcattttagatttgcaacttctcttatgttacaaaatcatgacaacttgttgcacactcacttactagtatgttaatcatatttaatctatatattatattattaaaaaataatataacacaagcatctcaagaatataaaattatgaaaatacttcaagtctaaatagctaatattttgatattctttaaggctaagattctcagataatcaatttgataattaaattattattttactgaatgtttacttttatttatgttgttctttttagttttataacttagtattatattaattttattttatttaatgttagtatttttgttattattattttatattttaaattgttagaaaaaattaaaaataaacccaagatctatttgtatataacatagaacac

SEQ ID NO: 116048 - DNA, 1228 bp, Cannabis sativa
  modified_base (827)..(830): a, c, t, g, unknown or other
ttttgtgacattttaaaaatgacgaatatattcaatatggtactattcacgtcggtcaacgcgatgaacagtcgcgttgaccgacgtgaatagtgacttttgtagtagtgtctgtaaacatggatgtgatgagaaaatatttcttgttttaagtttcattgatttggatgaggatgacttcatatttgatcctctatctactttgttccattattccaatctgatattttagtacgcattaatagtatgatggaatcaaagtgctatccaaacaaaatatttatatttataattataataataataataataaaatttgacacaacttctctatgatcacttcactctcaatcatgataagattaatatatagaaatataaatatatattaatgatagagtggcatgtttatacacacatatatttatataagagaacctatatctattgatatgtcattataatattggatgctcgatcatttcattttcatatatataaacattaacaaagagagatgaagttaccacatgtatctgaatattacagatatatacatatatatatatatatatagaataatatttttggtgatattggtaatgtgttggattagcaacaacagctaattagttacctgtataggaaaagcaaccaatgggtatattcgataatgggtgtgacggtcaccacactaagtaacatgattgagatcactcatttgcatgtattgtattttctctctatattatatgcttgttgacatcataagcataacactttgcctactacttcttcctaagccactagtatatatatatatatannnntatttatatatatatatattcttttgtatttataacatgaaaatgtgtatattctacctatttttttatatttaaataaagaataaatctgtcgaataatgtatgtcatttaatttatagataaatagaaatattttattgtacttattgccgttaatttttctgttttattttctcaatatatattagcagtgacgttaggcttggaaaaccctccaaaataaaaataataattgatcctctctcattgaaattggtcttttagggtgccacacttctaaggtcatttttaaagaaactctaaaaatattttgccgcttaggccggctaactgaaagaaacttgtaataaagtttgtaaatatttttgggattccaactgttgtaaagtttaaatta

SEQ ID NO: 116049 - DNA, 2336 bp, Cannabis sativa
aaaaaaaaaaaaaaaaaactagggttcccaaaaatgccctaacttgtagaccggtttttcaaccagaattccgattctgtggggtttcctagggaccaaccagtcgaccagttcctacaggtcctcctgaatcagtcgaccgaatcagtgcaggaaataccaaaaacttcactacaacctcaaatcaaacccaaactttaccataactttcagacctgctatttataccacaatagacataagccaagcaataaaacaggaataaacccaaaggagcaaaatccactgtgagagcaaagcttgaactctaagttcaaacttagctcaaacacatcaacaatcccccaaacaaaacaacatcagctcaaaacataattaataacctttgaaaacctaacacaacaaacttaacatcacagatcctaaactccaagaaaatcatgcaaaacatagcttgaaacttaaggaattcataagagaagggctagggagttataccttggattggaattactaaaaccttgtctaattcactgatttgcacaaggaaaattctccaaaagctgttgatcgttgagggttcaaacaaaaggagagagaaagagaagactcctcttcatttttcctatttcctctaatttctataatttactaaaaacaataataaacttagaattattaaacaaatagtggcgagctgccactctaaaaaatcagtcaccacaccttaaggtaaaataccccttcccacaagcttaacacataaaatagtgtaagggtaaaatggtcatttcaaaccctcacatcttcttttttactctatcttttaaaatatctccccaaaaccttaatttctttatttttacctcacatcatacatccacttctatatatctttctttacatcatttacatattatatttttttatatattatactaattaaaattaaaaagaatgaccaaaaaaagtaagaaaaatacaattaattaaagaataagaagataaaaagacataaaatatgtttagttcactactattaaagcattcacttctcatgagctaaaatagctcaaaaggtaaaaatatatataaaaaaaaaaaaaatttgttaaaaatgaattccatcagagctaaaataactcatgaatagtgtttctctacatgtagagaaacactattcattctttaaatattattttaataatttctctctcatttttaatgttttttcatttaattttaattttttttgtttataaaagaaaatgtatcaaaaaatataatatttaaatggtatagagaaaaaataaaaatgtatgtatgatgtaatgtaaaaatgtaaaaaaaaaaaaaaattgattagatattttgaataatacaatagagaagctaatgtgagtgcatgctctcattgaactatatgcagagaaatattttttagaatttgaaatcagctataataaattattagaacattagatgaagatcaattttaaatcttcagctaatttttttaacttttaactattataaatcacttgattttttttttttttttttgaaaaggtaaatcacttgattaaaattcttttaagtattaaaatttgttagaattggtatttttttatttttttttatggtagaattaatgattggatgtattataggtacgatggtgtgacagtggacggcttcactatttatcaaaatcaactgaatgataaaaataaacctttctttgatatttgtgacggaatctttctcaattactactgggaggtaagcttttttagctatgttttcttttatatatataatatatatgaatgttttttctatagcttaatgtcttgaacttgcagtaagtaatattttgaggtcatcttaattattaatagaaagactaccctaatagctctgctgctgttgccggagatagaaagcatgatgtctactttggcatagatgtatttggaagggacacttttggaggtggacaatggaaggtaataaattataataaaaacaaaaataaaaaaaatcttataaagttatgtaatttgacccgatattgttactgtattacaagcaataactccatagctgtcacatgttcaattaaagcttaaacttttaaaggtaggaatatccgaaaatgattagtagaatagacatagcatattgtcatctctttattctcttgatggtttgggaaattataggactagtttggtaccccgtttaaggatcatattgtattaaataataaataatactatgtttggataaaacaatatattgtattaattattacgaccaaattttttaataca

SEQ ID NO: 116050 - DNA, 2228 bp, Cannabis sativa
  modified_base (99)..(104): a, c, t, g, unknown or other
taaattatatgattatttattgaatctttctcaattaaattatagagcacctaacataaaactaagtatatgtgccttgcacgtaactttcttctagtnnnnnnatatatatatttgattttttttttcaagtaaaccctcttaattttaaaaccttttaagctaatgaattattagtaaatttaaagtggcatctagttaactgtcaccataaattacttatgtgtataagcacaactaatattattattttaaaattaaataaaataataaaaatgaaaatgaaatatttaaaaaaataaaaaaatattataaattttaaataataatagtaggtatactaatataaacgtgccacgtgtattagaatatatacataaatagtctatattggcagttaactgtagaaatttaaggtgacatcttaaatttgctaataatttaatagtttagagagttttaccactaaaatttaagttcaaaggttaagtgtaaatgaaataataattgagagaatttagctgcaaaaaaactttttttattaaaaaaaattacaatgaaaattattttcacccattactatttgaagaatatatatatatggaacacttggttactaaacaaagttaactataaatattaattttaaaaatattaaattattaaattttgatctaataagaaaattttaaatagctatgcttagtttagctacttaattataaaaatgtcaaaaaatatatatttttacactatatcaaaaatatatttagatacaaaatctttaagtcaaaactcaacttttttttatcttttttttttgttggaaaactttctttgaaattttttttctagccgataaaacaaactcaacctataaatataaaaataagagattaaattaattaaataaaaaaattaaacttaaaaactaaaatttacctattcataaataataccctattaaaagtgcatctatatatattattgtgatcgttattccattaaaatttgaacaagggataagttaagttgtgtgctctccaagaaaattgacataacaacaattcttttttgtggtccgttattatcttctttcacttattttgaataatatgtttttgacttttgttttagtagtctcaaaaactagtcacactccaataagcccataatggcaaacaaagaaatagttgattaagatatcatctttctttcatttattaattattattaaactcagctcttttattggattataatgacgctgttttccacacacatgtttttgaattttgaccaaagtgttagtggactcttttgtctacatatttgcattattttttccttctattctcttttactttcctttctctccaagcatatataaatatatatatataatatttaaatttttagtttcccccaagatatccttattcaatgtaccttgattgaaaacatctctcattttttcttatcaacgttgggtagatgtttattactagaggtgacgcttagtaaataattagcagtttttcaataatttttaataaagttaaataagtgaaatttaattaatatattatataaatatatataataataatattatatttggaagtactatgcgtaccctttaacatttctcgagtttatatgtctattgtcactagctattctataaaagtgagtggcattaatcctccagtttttgagggatttttagtattgagtatgattagggagcttcatgctttctaacatataattaaaataataaaattttaaaaagtagtattaatacttaatatatttgttagtgttacattgttattagtgtaattaaatagcaggtctcatattttaaaaaaaaaaaatttttttaaagaatatcgttaattaatcgtagggtgctcacatggaagatgttgggcaccattgatgtccaataacaatgctcttaaaacaatgtgccaaagtttgataactataagcaaaataagtctttctcaataaaatgaataactttaaccttctcattcaaagttctctctctctctctctctctctctctcttcaaaccattgcaaaatttgattaacattgatgcttaaagaagttatttgatttcataacttaaaaattatttttaatttttaaaaatagaaaataatttttaaaaaattaataaggttgtttggctaaattttttaaaaaagatcgga

SEQ ID NO: 116051 - DNA, 2244 bp, Cannabis sativa
gtccttgtattgtattacaatagaattgtaatatcttgattttctttcattataataaaatctctaacatttcattaactaatttcatagcatgaatttattagtattgttatgtattggagcacatatggcttaagcattacatactaaattactaatactacctaacattaaattaaatttccatgcaagtctatctgaattagttgtggtgtgctgacatgagatgttcctttaatacttctcataatttaattttttttgatgaatagctttttatatttagtttttgctcagtaaaaaatatgtcattgttaaagataaagttataactcccatggttttggaaagagcaaaagaaaaacgacttcgtatgaattggtcaactattaaaaatagagttacccgcttattcccataatgtatttcttcatattttatcaacatgtttggtggattattcatacgtacgcataatacatatacatatatgatatatttatgagtctataaataaaatatatatacgtcatgtatattgataatcatcatgcatgccagcataaacatacacatctatgcacatcaaacgtagttatatttgcaattcagatatgaaagaaaatttctagtcgcatccgaaaatgaaattactaattcaaacaaaggcttaattaggtaattcatttccaataaatatatacaaatagtactcgaaaatttagaaccataaaaattcagaggagttttaatggaagaatttaattaaatagaaagatggagaagaatttcacgcaacaacaaaattcatgcgtgagtcaccaaactaagttttgttcttatgcagaaaccaaaaccccatctagttattaattcttccttttatggttggcttcttttcataacactctaaattctttttatagagaaattagcaatttatttggtcgtattattgtataagaatactactaaatttattttctatggcttctagtttaatttataacaaacttaacaaattatgatcagaaacaaatatggagatttatttagggagggtaagaatttgtagagctccatgccttagaatagaattagagtaatttagtagtagattttatttatgttaatttaagtttattaaaatatatagtacctagtgtttatttattctaatattgcctaaaatattttttcaaaactaaaaaggtctattttcaagttatcaattggacagggtcaatattctcatatggtggtggctggtccacccacttaattaaatcacagctatacacgtacaaaatccatggtagcctccttgattattcactaatattactgtcattcttatacatatatattttttatttttgtaattagtaaaataaaaatattttcagaaaacatgttttcaatttttttttttaatatgatttattttaattattatcaatttgtattttctttcatcaatattttgtacctcgatctcaagccggcctcggaattggactcgaaccccgaccttaaacaccgattctagtcctggccttggatcctgacccaaattggaccttaaccttggccccagattcgaacctcgaccccgactctaaattcgaacccaacttaaataaaaataaaaataaaatattacataacatatttttatttttttaaaaaaattcacaaataaaagtaattacaaaacacattttatttttcaaaaataaaaatttaaaaatttcactcttataatttttctttcatcgtgaaaaataatatttaaattacgtatatactgttgaacgcattcataaagcccatctgttaattagttgatccatagaagaaaaaagaattgtgagaaatgaagactgcgattttcttaaatatacaaaaccatgtagagatgtcaaagatcaaattaacatgtatctactatctaattgacctaatttttttttttctctcactttgtgccaatgatatttttacttgactaaatccaattaaaggctatcttccactcacaagatatggtctatgtccatttacctaccaaagaaagtcaaaagagtaaaaaaagtatataaaataagataaataaataagagagcatataaacaaaatctaaaaaataagactttttttcaattttaactaaaaaaaagtaataatattataaaaatactttcaactggtcaaataaataaatatacagtccaaataaaaaaa

SEQ ID NO: 116052 - DNA, 1410 bp, Cannabis sativa
agatagttagggtgttacaacccagtagggggatggccgaccaaggggctggcaggtcaaaacttgcccgggaaaacacaagctgaagtttattctttagtgcaagcacaactggatcaattcaagaacatgatacaaggtctgcttggcctaaaattgtccaacttagaggtggacaacacctgagggtcacctttctttgttgacatcaatgttttgcctttgcctaccaagttgaaaatgcctacttggaggatgttcataaggaaagaagatccctaggcacacatcaagtattttaaaatctagatgggtttgcaaaatgttgaggtgatattcattaccgtatctttctagaaaccttgtctaaaaccgcacagcagttgttttttaaaatttctgttagaagcttcgatttgtggaactctttcatacgagagttctacacacatttctcgtcttctcaaagaatgccttataggctagaagatttagttgaggtcaaacagagaccagaggaacctctaaaatactatctccaaagattcataactaaagttaccaagatcaagaatctgatggaggaatgaaggtagaaaaccttaatgagtggcatactacctttgagtgagttttggatggacatccgtcgacactcaactcaaaacatgattgatttctttgatcgagcagaaggctttgttaaacttgaagaggctatctgaaaagcccaaagtaagagataggcaggtgctgggtaggtcttgagtgctggacaacccacagctctatccagcacacctgccaacataggcgaccagccctgcaatggtaaaaataatggaggcaagcatggcaacaacaactctcgccaagaaaatggcaaaagggggaaattaaataactccccatgccacaagattcaaatgagaaggaaaggagctttacatgctttaccctcctaacagtaacttttaaaacagtgtacgtggctccagagtccatagttctgtacaagaagccccctcccatgaggaaggaaatgactaagagggtcacctctaaactctacctattttacaatgattttggccatgataccagtgagtgaaagaacttaaagatggaaattgagttcttgatcagaaagaacaatctctatctacgtcgttatgtgtgatatgaccaaacacatgcacaaggtgaccaaatcagagacgtaataccaccgccaaggcaagtcacctagaggtcaaatcaatcaaagctatggagcactacgctcgaactctctatcacaagcaaaaaagtgaaatcctagctttagaggaaatagatcccaaatagcttaagcttggagagcgtaccatctcattcatagaaggagatgcttgttggaatttattttac

SEQ ID NO: 116053 - DNA, 1805 bp, Cannabis sativa
ttctaaacatataagggcccaaattttttttttccccctttgtggtccactttgtttcagggccgaccctgctcaacatgcctcaagcatgcatcttaacaccaccccttcgtgaccatctcagcaccaacaagttgtaaaaacttggatgccttaaacatgcatctcgacaccaccctttggtgaccatctcgacagaccaagagaagcaccatctcgacatggtgcaagtggtgacaaacttggcaacaacaaagtggtgaccaactcagcatgcctcaagcatgcatctcggcaccacactattggtcacaatctcgacatgaataagcggtagcaaactcgacacacctcaagcatgaatcatagcaatacactgttcgtgaccatgttggcaccaacaagtggggaccaattcagcatgcctcaaacccaatctcaagcaagtgcttggaagtgcatgtcagcatcatctcagccaagtaattaaaagcatcctctcaacaaatttctcaaggagcttctcgaccacgtcactctgagaatacctcaactagcaattcaacccacatttaaagaattcccatgaattctagaaaggaaaccactagaagaagaatttaagggataatacaaacatgaagacaagtacagatcacgatacagccactttacctgcaagacatgaagcaattagcctatcgtgtgagaaggcatctctagtacaagtagtggaggcaccttgcctgcacgtcctgacatcccaacaaagggcctactaaaaatactaaccctacatattaggaccacttgacacccgaaaggcattacttaggaccactagggtatcaaaatatcacctcttgcaacctttcacctgcgagagtacaatgtcctacctatcgccttaggaccactagggtatcaaaatataaataagagccaattgatctcacctttaaatacccattttttagattgtaaaggggttaaaagatcattacaatcagagacacgtaaaacaaacacgacattcatttttgcttctccattaaagttctgaaacttattctttgttctttgagttttgctttttttttttcatcgtctttggtttgctaaccataactttgttgatgaattctcattgtcaataattttgcaccatctgtgaaatgacaagctttagctacattatttcctacactactcactattgtcaaaaaattccaaggtgttcccatcaatctgagatgttgagattcgtttggacaacaaccaattggttgtctaaaggagagagcctccatggaaatcatcgaagaagataatgatggaaaccctcaaagatgtcactgcaacgagcataaccatgtacccccaatgatggttggagacaaccacagtggtaaagattgaaccaatgtgtagagagatggagtcaccgcttccattgctggttgatctttctaagtcaatatcactggttgatcttagattaaaagatcttaatcttgacatggttaggtttgatctcaagagtattatttgtgttcttagagttgttaattagtcaaatcttaccatttggtttgggtaacacatacaacttgggaacatgatagtacaattaagtgggagcgttaatcatagatatggaatctatagcttctatttggatataaaagttaaatgatgattttctccgaccttagcttaatagagataaatggatgagctcttattttagtaattatattagtttacttaaatatcatttaaaggaagctaagtgttttaaggat

SEQ ID NO: 116054 - DNA, 4169 bp, Cannabis sativa
  modified_base (4140)..(4143): a, c, t, g, unknown or other
tggatcttccaccattgcccactcctggtgttggatcgtcattgcctgttcctggtgctggatcgtcatcacatccttccgagactcagagaaacaacgacgatgacattactcgcctagaactttactttttttattattattcgaacatcttttaatgttttgtttatatattaattttagtataacataatataattaatgtttgtttatcttttaatgtaaattatgttggtttttttgttaatataaaatttaatatagaaacaaaaaggttatttttttaaaaaaaatagttttgcaggcgtcggcaaaaggtagcaacaaaaaggttcccgccaatcctcagattggcgcaaatagttttgtcggcgcatctatagagtcggtaaaacttttggcgcaactctcaggattggcgcgaacctttttaccggcactatattgcgccgacaaaagcttatcaaagcaggttcatagtggataagggtattctttaacaccggaaattcacctttgtcggtgccgtttcttgtcggtagttttaccagcgcatttcatctacgcgttggcaaaaagtcctttaccgactaagattcccagacatgttttgccagcatagtattgcgccggtaaaagtaagttttcttgtagtgattcaaaaaggtttcacatttagcctccacctatcctcatatcatatgagaggaagagtgcaagcttccataacctctagagttcggaagcttgggaggtaaatgttatttgtgtttctgaatgaggacacgtgtaattttcaaagccaattacaactcattaactccaggcccaatagcaagcccaatgaagataataggccagatccattatcgaagtcagctcttctgaatgatggattgacaactcatccactcgagacaatcctccaatatagtgatgagaatctggaagagatcatttagagtgtccaaagagttagttagaaagcatccaaacatccagctccatgtcacacctactattagatcccatgatattaggcctcaactctctagatcttgttcgaggatcatatcttctcaatatggaaatatagtaattgacaatcagatatttaatgtgtctttattctccacaaaagtaggacacaattatgaaaactattaacatgatgtgacatccatatcaacatatagtcagcacctcatgggccaggctacaccaaatgagtcctagtcgatatgttattgatatttatcccatcagtggataaagtgaaacaaagaagaagagccctagcactataaatataagaacacttattcaagcaaagtgttagaatcccattccccaatttatcaagcaaaatctagaattcaaacacttgtgtaactcattaggcttttccagtcttatcgtaataacattgactaatggattaaggcttgttaatgtctcaaccacacaaaacctctaatattatttcttcataatttatctatttctttagctttcacatagaattttttggtttctgaaaatcttggtaaactctcctatttgaagatcttatcaataattatggaaggaataatatatctcctcattgtactatcaaaaaagatctcagcaaagcttatgacacaatttattggtgcattcttgaagactttctcaaggctctttgcttccctgcccattttataaggtgaataatgattcgttgaaaaatcacttcatactttctaatgatgaatggtcagcttcaaggaaatttcattgggaagaaaggacttaggcaaggtgattctatgtgtgctttgctctttgttctcatcatgtaatacttgactagaatactaaaaatgtaagctgctaaaaaaacttttcactaccagtacccaatgtgtaagagtcttaatctaacaagtctctattttgctgacgatctaattttttttattttgcaaattaagttactaaacaagcagttcatcaattaatgattctcttgaagagttcagctttgccactggccttgtagctaacaagtctaaatcttaaatttttttttttggaggagttaatttggtagaaaaattggctattctgtagaagattcattttgagaaagattcattttgaggaagtgactttttgtctaaagtatttggaggctcctttgagatctggtaaatgcctaaggagaattgtagagatattattagtaatataaagcttaggatgctcacatgggcaataaggcatctttcttttgctggccatatgaaactgcttcattcggtgcttttggggtttaagaattattagatgaatattttcatcctttctcaaagtgttatcaaagagattgagaagctttacccaattttttatgaggtagagtgttacaagaagtaatattcatgttgcttctcagaaaaagctttgcatacctaaagccttttgttggttgggtttaaagatggtctaaaatagaatcgaactatccttgccaagtatgtttaggttgttatggagaaacataatttgctttgggtaaaatgggttaatactatctatctaaaaggctttgggttttgggaatacaaattcaaacaatagacgagttggtattggcgttaactttgtcagtttaggctgaaatttaacaagcaaagtatccgagcagcaggtatttgagacaaatttcgagcaaccaatctttacaatagtgtgctttagtaaacccttgcccattataaggaagctagctatttggtgtagggtaaatccccctaagcattgatttggtttacgacaggttgtaaattctcatctccttactagagatattcttcctcgttttcacattctgttggattttgtcttgtgcccaatttgtggtacataggaagaatgtcataggcacttgtttttttgagtgtcttctctcagtttaggtggtaaaaggtatctttaagtggatgagttttaatgcttagcctttgaaatatgatgactagcttattgggcttactgaccattgtttggggcgattgaaggctattaagtatgctacatttgcagcttcagcttatagcatttggtttaacaggaatatgtatatttatgagtgtttttcttttacaattgtacatataattaaaaatattcaataatttgttaaaatataaattgtatagcttacaaagcaaaaggatctacagttattttttgcttattacaggatagatagaaaagtgaggggcttgagataggttggttgtgccttagtttggtttgctatttgtaatttgtttggttgattattgaattccttttcttgattaaaaaaaaaaatagatgacatttgtataaaaacaaaatccattgaatatatgtataagccccttcaaccacaacaatctcaagtatcggaatgtgtcccttcgtcaccgaacctcttatttatgtctccaattttcaagggcaataatccaagtggtgtccgaataatcagccttttgtttagaaaatgcgtgttacatttcccacctagatcataactttacttaaggtgaacaaaaaaaagaggaaagatttgacaccaaaaatatagttaattgatcaacaaccactctagtattttgttataaaaaaaaaaaccactattatttagttcattaaatttattaagtgcatatattttttttgaaagtaatgattttatcaaaccaacaaattaactgtttgttacagaaacactaataaaacgagagcaaatattcgtccagattgacactattaacgaagacgtaatagatttaactagtacatggagtacactatttgtaaaatgcaaaataacataacacggacctccaccaaccgcagccactgattatgaaaaatcatcaatagcattcaagataaattttttaattaaacagttaatccaagaaagaacaacggaaaaatgacacttcaccctaagcccaatgaatcccagttagaccgccccactaagtgcatatatttatttttggtgtttaacttcttagccccccattttttaggtacgatgtttgccactgattgcttataattttcttaaccatatctttatatattaaaagnnnntatctaacggcatttcttggtttaac

SEQ ID NO: 116055 - DNA, 3464 bp, Cannabis sativa
atctagatcctggtaaaataatttccaacaagtgagtcttagaggatgtggggttttgggtcccaaagtgagtaacgctactctagcttgcgctggcggagcaaggagtgcaggcaactgtgatccaggagcttgagaacgatcgaccccctacgaaggatttacagcatttctgctatcccaaaatgatcatatgcccgtgaataaccctctgtccaagatagatgattgaaatctggacccattgtcctaagtgtcccgctctgatcaaaattttgatctcatcccttagataatcacactcattagtggtgtggcctttttctctatgacactcacattctttgttctggtcacacctatttctccctctgtgcgacattcacggaggctttctatagtggaccatattacatgtttctttgtagaaattctcccgtgtgtctactaaattggtatactcagtgtatttgggttcatattccttcatcgacttcttcgaagaatcatttcggttgttacctttacaccttcttttatttcgtgtatggctcacatttgattttagagcttacatttttgcctgtctgagagccacactacacttggtctgtgctgctctatacccaaaaaaatgggtatgtgtaggtacgagaccagaagcagtgggttcataaacagttggcaaaaattgagttctgggaagagtcaaagttggagccagaacttgaggtgtaaaattaggtgcaactgcggaagaaaccagaactggagggacttcgaaggcttgttgataagcgtcctcaaggttaataatgccttgggactttgacataaacccaattaatgtttcagctctctttctttgcattttccccatagcaaagaatcaacaactagcctaggttgaagggccatcaacttcatgccatcactaacttttgttttggctgcaacttacatcatcctctggataaatgccttcaagcttttattttgttgctattgatgttgatgagagagccaacttccatgtctagatcgcgtgcgacaataaactgtttgcggaaggcttactataaatctttctagctatcaattgatccaagagctagacgcttccaccagtctttcgcaaacttggtcaatgttagggagaaacacaaacacttggcatcatcgctcgaacgtgccacatgcatcatcttattgtattttgccaagtgtgtttgcagatctatccttccttcatacaattcgatgtgtggcattttaaagttttctaggagcgaggtctctgcgatcctcctcacgcaaggttttgggtcctcatcctcagtatcggagagggccctactctatttttgactagcttaattagagctgctatttactcctctaacctttttatgtcacttttaggaagatcacgtccttgcattttgtcacttatgtgatttttgaggtcgcctctatatggcctcgctttttcacttttgtacctttcatacttggcatccaatcatcaacgaaggtctatagtggactagttgtcttcagagtgcgcttaagtcgtccttctgtcatggttaatagaatcattggggtggttttcctgccccttgagcttaggtactttcgtactttgcccttttggcatagttttgcctctaggagcaaaagggtgtccacactcgaaagcatcggtgtccttctgcgtcttagagggctagctagccaaatttgtgtccttccaaggaggtttaggagtagacttttgtgtgggttcacctaccttgcctttacattaatccttgcggggatttgaggtttcagccttggttttcccaagagcacgatctttggccataacctccaccgagggatcattgtcagactccgccaggtccttaaacttgtcttggacacgagccatcattcttttcattttctcagtgagtttttcctgctctgctaactttgtttgagtagcttctaattccttagtcactcgaaacaggtttgggtcatggtcataataataaccatctttgttgtatccatctttcacataaccatcgtcgtcatcctcctcttccatgtcttcagggttttggtcattgttgatgccatcatgcaactttttagcatcttctccctagttttcaacattagcagtacccctttctttcacaccgcttggtcatagaccgggggaaagggagtccacctcctccataacagtatcttaaggagctttcttgcctacgttcttctaagtgaacaccattgttgaggtggtgtggcggctatcaagctttccttagctctccatgaaagcaccaaaatgtttaccgaggtttttgaaaactaaataagcaaagcttcagaaagaaataaaacagtaattaatagacaagtaatttttacatggttcgggcattaatgatccctagtccacgagttagttgtattggccctttgggcgagtaattgaataatacaatatgtgtttacataataaccctagcactatactctttttgtttctcttgaagaagaagaaagcttgtaggagtttttgcagaggttcggctagtatcaaaattgttcaccctttgtacataaaaagtggggatatttatatgcttggatgtgggtaaaggcactccctttacccacctaaggtttcttttcacagctcgttccaagggtaggagaatacaacttttgatctgaccgtctggccttgaagaaccttcttgattgtgcggtgaacaggggtagtgactagtaccgtctggattagggacacatgttgcccaaaggtttgttctttatgaattactctctagacaagccattgggcaaaatgcatgtcttgaggtacgaacgtgcactaccatgtcctggcacgggggacaagatctgatcttgtgttagaaaaatgtataaccgtctgtaggttgattttcatataaagctgacgtggccatccgcatccgtgtaagagtcgtcattcgcaaccaatctaaagaagtccttattcgaatgttagatagccaggacttcttagaatttaggggcgagtatggtccttccgtgtcccaaagacactaattggctagagataaccctccacattaagcatccataaaacctttctcggattaacggggcatctctgtgtggaaccgtgatgtcatctctattaatctgggaggttgtcacatctttgcctctaattatgccacatgtctcttatttaaaaacacgaataacaataccaaacatagttagaaagagtaagatcaagagaagttagcactaatcatgcatatattggttatatgcgataaccaagtgcatctctcctataattatgtataacgatcgccactacaaaaatgtttacttttagtcacaacaaaatttatgactaaaattaaaaaagttgtgactaa

SEQ ID NO: 116056 - DNA, 1078 bp, Cannabis sativa
gcacccatggggtacatccgaaatcccctgactattggagggagtccaacaaccataactttgatggaatagttcgacataatcgacgtactcttagccttcaacaccatgataggtcgaccaaccctgtgtgacttaaaggcagtgacatcaatctaccacctttgcttaaaattcccaacaagggatggggtaggatgtttgaggggagaataacattctacttgtgattattactacctgtccttatccaaagcaaagatagagaagatgcatgccaagatctctacagaagatcccaacaaagggaaatgaagtacagcatagagcgtgaacatggacatagatcctcatttaagggatcctgcaaaccgctttggacctatggaaaaattggaggaagttgaggttgatccaacttttccaactagcacattaaagattgggaaaggtttatcgtcataaataaaatcagtcttgataatatttctaagggcaaacttggacctctttgcatggtcacatggagatagggtcagggtagacccctctgtgatgatccatgccctcaacattgatcccaacttctgacttgtatgatagaaaaaggaggttattggacaaagaacacgccgaagcactcaaggatgagatcaaaaggttatgggccaatgacttcatcagtgaggcattatatccactttgggtatcaaatcttatgctggtgcccaaaccatataaaaagtgaagagtgtgcataaacttcaccaaccaaaataaagaatgtccaagggactactttatgcttccaacaatcgaccagcgtgtggatgccacagctggccataatatcataagtttcatgggcacgtacttagattacaactagatcaagatgtatcttctagatcaagagcacacaagcttcatgatagaattaggcctatacaactacaaagtcatgtccttctggctgaaaaatgcaggggccacttacaagattcttgtgaacaaaatgtttaaacatctcaatggctgcaatatggaagtgtatgtggacgacatgctggtcaagtct

SEQ ID NO: 116057 - DNA, 1549 bp, Cannabis sativa
  modified_base (1514)..(1517): a, c, t, g, unknown or other
aaaataataataaaaatgataatatggtagagattttaaactttaacttcaatatccaaataaactaaaacttattaactataaaatctaagttttaagtttaaaattaaaatgcccaaactttaaatacaaaatagtttaactaataaatataatttatataatataagatatacacttttattaaaaaatatataaatcggtttaattcggtttattcgggttaattgggcggtttagaataatttataaaccaccaaatatattcattgggcgatttggattttcattgtattatttcgagttgtattttttgtcggtttattcagtttggtttgggcggtttattcgggttgggcggtttgtaaattttattgaacacccctagtttaaacacataattctctgatttcacaatgtcccatacatcaattgatgactacataatgagctatcaaatcacaaacaaaagataagtcagatctctcaaagcacctataacaagcttaagcacatcataaaaagtaggcaatcatgccgtataattaaaattggaaaattgcgcaaatcatggctcatacaatcatgataattgtgatcttttaccatcattatgagcttttaaataccccaaagatgtatgcaaaatgggtctctgggagaattctttatgagaaaaactctgattaatagtagtgactcgtggactaaggcacattagtgtcccaaccacgtaaaaaaatattcttctctaacattcattaattgcttcatacaactctaactaatagttgctgaaaacctcggtcaacagtttggtgttttcattgagagttgtaggaagcttgccaaaaaaggaagttgtataaagcctcgtcgtatcatggtgttaacaagaaacacttcgcttccataatagactaacgactcgaagggtcctgaagaagaagaagaagaggcttcttgtgtggatgctgaaggaaaatgagacaccaatgatcctgaggatacagatcaagagtagtacgaagaatacgatgaagacatttatacagaactagttgagttaaggcaaaaagttattgaccatgaagctgagttggcagaacaaaagaacaaaataagagaatgcaagaaataatgatcgccatgaaaagacgatggaaaatgctggaattcatgtagactcaactgtagtcccgcctatgcaagagaagatgggaaaaggaccttctaaacctatgggaggccaaaaacagaaggatagggagcctagtcccattaggtaccctctagaaagaccttcccagaggggaaccctacgaccatgcctgaaaagaacaaagcggcttgggattcacgggaagttcgttatgatctcccaaaaggtaaaggtccttcggggtaggtttcctagaggaagggagagggtttcgttatgttttatttaaaaaaaaatttaacacatatatattaacaataattaagaataaacaataataataataataatnnnnataataataatattaaaactttattaataaaa

SEQ ID NO: 116058 - DNA, 1250 bp, Cannabis sativa
aggatgagtgacctcctaagaagttctctcaggaagcatgtgagtgaggacaaaggacgttggaaacactcctgttggtctgtagggccagtcgtcattctaaaaagtatctagagtgacatactcgtgtataagagccatcattccgtgggtgtaagggcccaatagaggcttaaagtggggacgttacaattgtaaggaatttataatggtgggtttggagggtagagagcaaaataaagtgagacttgaacatcaccaatatcaggaatataaacatcagataaaacagaggactgagagatgttatttatattttaatgaatcaaattgtggtaatacatgagaatagttagtagatgggattgttataggcagaggcatggtcgtatgagtttgaggcacaatacaatcaacagaagatgatgttgacaaaggagcatcaaatgtaggattaggcatattttggatattatcttgttgttgatgtgaagattcaccaatgagcaaatgtggtggatttggtagtggtcgagggagcatatttgggatggtagctttaatggtagttcttgcaagacgagttaacaaaggccaagcattgccttttgaaaagtcaatacgataacaatcacagttggaagttgggaatgcagatgccttcaaagacggaccatagggtagagcgggttcaatgccatcgtccattttttctaaaaaattggacatttgttgaaaggatggccaatgataccacactccatacaatactctagacgttgctcatagcaaaattcgacccaaaacacatctcgtactttcggtggtgtgatcatttttccccgaagtaaaggctttcttatgtcgagtttaacacgaaatcgaagaattggaccctaaccctcattgcaagagtcatcaaatacttccatgaattcacccattaaagagttgagatctttctctagagcacgtgacttactcaagaaagggagtctataggcttggactcaaaatggtgaaaaaactgtggactctcgtgagacaatctgtagaacagatggcgtgtggagtactgtgatgattttaaaaatgctagggatccatactaagggccctctctttgtcaccaatacaacaaaaagttacaagaaataaaccagagtgatgctcagtaatttttgccttaaaacgactgttctagtgttgagtcatctgctgggttttgtgccctaaataaaacccattac

SEQ ID NO: 116059 - DNA, 1079 bp, Cannabis sativa
gaaccatgcatcataaaataatttctgatcttttattaattagtaaacctgattatattgaaatggattttatttatagggcacaaaacccaacatcgagctggacctcagacctaaacttcgtgcccgaccctagacctagacccgatgccgaacccagacccctagccccaaaacccaaccccattcccagaccccagactcagacccgtattcgaacctcgaacctgaacctggacccggacccagacccagagttggaaccaagacttgggacacaagacctagacccagcctcgacctggacttgggactcgggactcgagactaagacctagacccaaggtctaacctcagcccggaccttggccccgaccctggaccccgtccccgacttcagacacagacccaaacctgacaccaaactcggatccagacccagccccaagtctctagggccggggtcgagtttatgataaagataatataatttcatacaatatactaatacaagtcaatattaatgtattaaataacactaatacaatgcatctgttaataaagataatagttatttactcaaccaatttttgggatccaagaaaaagttctattatatcttacaagttcaagtttatatgtatacattctcttaatgtatttagcttttaacttaaacaattaggctaaatatatcttattaattagtctctactaattttcatgttttaaccttaagtatttaaccaattccaacaccttttagagaccttaaatcccattttactattgaccattagataccttagaatccattttatactgaccaatgctcaatttttggatttaaaatgaatctgtttaacatacttaatccataagtacacaccatacaagacatcaaatttcccgcacattaagcatatgggactttacccatatataataacttgccacaattgcaaatacagtacaatcaagaaaatcaagagcttgtttggttgtgttttcagttttcagtttttaaatttgtgtttttaaaagtgagaatagaaaacagttttttgtcattttaaaaa

SEQ ID NO: 116060 - DNA, 2230 bp, Cannabis sativa
aattactatatattttaattacacatatattataaatatcacagagctatcattatcacgcttgtttttttttttttttgtcatcatgatgctattttaccatacaatcaatgcagatatatatagcatcttacatagtctgtcccacatagaagactatgttcaaatgttattggttaccgtcgtcacaaaacaaaagaaacacattcatgaaaattattaatattactataatttatatcgtatagctataataattgccatattattagttaattaacacttcatcataatcacaataattattttagaagtgttatatatcaaacacaaatcttatcattgtccattcaataatatttttaaagggactaagcagaacaacacaaaacaaatcttctttttttttttttttttgcaatgaagactaaacaaatcttatcactatatgaagtagattttttttttttttttgaaaatggctgcaaatattatttgacataaaagaaaattaataatatttgttaaatatttattgtaaaataattatagcaataatatgattggttatagaaaaagtagtgatagtaatatgatattttaattgtttttcttaactaatatgtaatatttattgttggtgtatatttattgattttgtgttaagtttagtttaattttttgtttttgccggcaaaattgtttattgttttaattttgtaaacataattctttagtttcattttttgtgataataccttttaagtttatatttgttcgaaaatttgagatgtaagttaaattttgctattaattttttttatagtaatattttttacagtagtggacactacttatgtgtacatgacatgttttattagattccattcgagatttagtattatgtgtacacaaatgatcacaatgacaatttaaattgacatttaacaatgaaattaaattgaggcttcaaatttataaacaaaagtatatttaaggagtattgctaatgctaccaaagtaaaaaaagaaaaagaaaaaattactttcaaaaattgattaaaaataaaaaattaattaaaaaagtattactaaacgcaccatataaaaactaaaatataaagagaattcacagcctaattacttttttttagattgttgtacatttctgtgcggtttatatcttacagattattattattattgttattattattaagttaaaaggatgtaatgctcagatatataatttacagcaatgtaagctgggctttattgtatatgtatgtatacatacatattatttacttttatgtggttacgatgaactataatataaaaccaagagtaaaatctcacaccatatatgtatatagattgtatatattatgtatattgaattttaataaatattctatccgtacgtaaagttttgctatatatagggcatgatcacttcaattttaaagtactcttgtccttcctctctttgttcacatttttcttcttcttattagaagcatggagataatagtacctgctatttcctcaaggaagaaactgcaaaacatatttcttttattgattatactctcatcacagattttctcttcactaaatatagctaaagctgagctaaaatcttcacaatcccatttcgccaaaatttctagaaaacctattccatcaaacttctgcaaaaacctcccgtttccatcagactgcgaatcaatttatcttaccggattttccacctctttcccttcgtccaaacaggacttattcgatcattccgtgcaatacacaatcggaaaggcccactggacccgaaccctggcccatgatcttagcttcacttcctcaaagaggcttggggcccactcagaaaccgcggctatcattgactgtctcgagctcctggacgataccgtggaccttctctcaaacgtcgtcgtgtcccgaaacgaagttcccaaaacttatcgagacgacgacgttcacacgtggctaagcgccgcactaaccaatcaagagacgtgtcttgaaagcctcgaaacgcaccgtttagaatctgagaaagcaaccatggcaacctcggctcgtaatctgagccagctcatcaccaattccctctctctctacctttcctcaaccaagtctaaatctggcgctggcgccggcgccagaaaattgttatcggtaggcgagttccccgcgtggggtgctgccg

SEQ ID NO: 116061 - DNA, 2335 bp, Cannabis sativa
catccaacaaaagatagtgtattcttttagttcagtacaaaagagagcaaggtcaccactactactctcactgcattcataaaagacttaatataatgcatcagatcaggtcatggtgactacactatgacaaatggaataatatatataagggataaagcaaagctagagggagagacaatgaattaatgacaaaaattgcaggtaattacattatataaaaactttttgcttatatatatttctattcattaagaaaaaaaatgggtgaaattgtttttctcttcccttatatataaaacattttattattcttcttaataatatattaagtgcacaatgttctcttgattcatattcttgatcatctctgccaatctacttatccaattagctcaatcctagaaatcgctaagtcagcattcactatagcttgagtagaatccaactcaatcacatccaatatatataactttaaatatatatatataattttaggcacacagaaaatatgtctaatttaaaaaaaagaaacaaaaaatgcccttaaagagttcattaactagatgtgcatggaaaataatagttgattcaactagatagtgtaacttgaaaatgaatatatatttgtttgtgttgattttaaccttacatggattgagaatcgttcttttggttttctttttactcaacactcagaattttgccaaaattatttggagcaagttgcatggtagtgtgttgtgtaaatgggagggggttggtaataataataagaggataacagcaaagcaatgctcgagtagtcctatgttaaattgtgtcttctttacactccccacccaaagtttatccacttgtttgtctctttttcaggtactactaaccgtacaattatagtttcttttggcttgaaaacactatgtgtaacataggccgatactattgactttcaatttagattgattgtgactgataagtatagtttttgaaatatcaacaaaatttgtacttattttaattcattactagttaaaaagtgtgatgaaccacacgtggatctagtgtagttgtagggataattttgctcttatatatctttcttattgtttgcactacaataataataggctttaatttattaaaaaaaaagaaaaagaataataagctttaataaggacaaatttcattagtgaagaatattttttcattagtaatgattattaatagcgatttttcgttagtgataatttgtctttgaaaataagtgtcaatgacgacatttaaagtctcagtaaaaataagtgtcaatgacaacaatgttgtcattatattgattatactatgtgtgagtttttttaagaaaaatatgtatttataaattgactttttatataaaaattaatttgtattaaatagaaggattccaatctcacacaccctttcattgtgtgagcgatatacatgacctaattcaaacattgccttggatggtcaaggtaaactaggtctatcattggctctttatagctagcacgtgattctcaaaatagccaaagacaaaaaagatgagagtagaataccacataatcctcttttcaataacgaaaaaaatactaaattaattataaaattattataatttgtttgattcaatgaatttttagtttgcaataaattttataaactttacatgtaatatcttaaagtttaataactagattagcaaccttaactaaattaattaaatctaatgagaaattatattattatatgatttaatatgtgaaattattatgatatattgcattttaagacctcgttggtgtgtcaagggcattttcataattttgatccgagaattgtaaaatcgtaattttattgtatattgtgtttatagactatattattatatagtatgtttattctgtctttctgcaggtgatcatttctgacaagtcggccggtataatcataaccgggtattttggggcaaaagtgatgctcccacctaaggagtacccatagtttatatatataggtttttttatttatacatttcaaaagcattttttttttcttttatagagaaatacatagagtaatttaaatttatatatagcaaactacacaataattatcggaacccaaatcataaaaatatgaaaagaaaaagttaacactgatatatggggaaattatcctaaatgccactttttaatttttttctatttttatatatatctaaatatatatatatatatatattaacgtttttacatgtatgtcattacaataaaattatcttaaatacttagagctaaatataaatata

SEQ ID NO: 116062 - DNA, 2094 bp, Cannabis sativa
  modified_base (2048)..(2068): a, c, t, g, unknown or other
cccccaaattttgaactcaggctctaaattaagtgattagagtgcaacaatttacctgagttcaaatcgggtaatggaccaaattttagaatgggaggagtgacagattgacctgaacggagcagcttaaatctcctttcagaagcttccaagaaatttgagaagtcctctcgtatgtcctgaacacgatgtgcccttagcagcgaagaccttggagagatgacatcttcgacggttcttcagcattcgcctccgattcttcctctgtgaaatatacttttgcaactccaaggatttcgtccatcgatttcatcttcaggggagtcaccgacgatgagggaccccattgtttcccagcctttccttccttcttcccctgagttttacttttcacctttgcaatagatctcgatctctgagataagagtttgcgaggcctccctcgacccgccatggcacaagtatgaactgaagtcgcaagccctagcagagctcaaatcgcagagtctctataaaaaaatacaattatttaaaaaaatataaacttttcaaactaagattatacccaaataactattttgaaatatatatttatataagtaatattttaatcaaataacataaaataaaatttattattttgacctaaaattacaaaattagaaagacataacaaaaaataaatgtgatgaaaaacaaatcttatattactctaaaaaaatgtctattaaatataatttataatatatatgatctcaacaatatttaaaaaaaatacacattcaatatattattattattgaatttttggccaaaaataaactaaaaaattcaaaaattatcccaaaatatttgtaaatattttttcaagtttttatagggttgtttgaagagtacccactatattaaactcaaaaatatagaaaagaataacaaaacatagccaccactactattttcggcaaaaaaaaaaaaaaaaaaccaacaacaacaaaaattaaaatcttacacaaattaagctcccaaaaatttccaagtatccttagtgttgtatgaagcttatccaaaaaattttgaacctataacatccaaatataaaccaacatttcataaatttactcaactttttaaactaaaaaaaagttagaaatttagggtacaaatataaagaaatatacaccaataaaaaaatattcaaacttacatttactttgtagtgtagtagtaatgaaatagagataagaaaattagattttggttgaattttgggcattctcggactggttttgagagaagaaaaggggaaatattttgagaagaagaagagagtgggaagaaaatcacgggttgggcggtttaatgaaaggtctaatatttgactgagagaacccataggaggactctcataaaaagaatgaagttctccaataatagtctacaaaagcacttaaaagaattcttatagactaggggcaagtgttgacactgagatttcacaaagtatctcaaagttataattaaaataaggagtaaaataacatgaccactaaggtgggtcccaagagtatttctccttggtgcctccaatccccttggcgccaccaactactctcttctcttctttttctctccttggagtctccaactcccttggcgccaccaaccactttcttctcttcttttctcttctttctctctccttggcaccaccaaccactttcttctcttctctctttctctttccttggcgcctccaacccacttggtgccaccaaccacttccttcccccttcttcccttattttctctctccttggtgccattcactctatctagctaggagagtggttggtaccaaccactcttctctttttttctctctctctgtatctccttggaaccatccactctcccaaggagagtgatttgcgccaaccactcttcctcctttcttccattcttttctctattttctctctctttggcgccaaccactctcccaagaagagtggttggcgcaaaccactctttgttgggttttatgcccnnnnnnnnnnnnnnnnnnnnntaatcagatttgcttattaatataga

SEQ ID NO: 116063 - DNA, 2412 bp, Cannabis sativa
taggtagcaaagtttaattataggtgttaaattataattggtgtgggacataaacttgagacagaaaatgtctattaggcttagtagtgaccatggcccccaataaattaaaatgctaaaatgtatataactattttttttacacgtgtgattagtttttcctattgtgtggtaagcacctaattgatttttattttttgcactataaattatttagaattttttaaaatttacaagtgctcctagataactacaatattgtatgggatcatgaaaaagaaaagttggactaaaaagctctttcgaatgtcgaaacagataaaaatttactgaaacagtcctttaaaaaagtgtagtacaaatattttcaatgatataaaattttataagaaaaaacattactagtaatacaaattataattaatgattaaatttaaaactatatacgtatgttagaacaataaatactataatttttgtcaataaaagtaaaatatacttttacttaacttcgttaataatacatattaagaagtttcattgacaaaagtaaggaaatttttgttgaacttatatgaaggagtgttttaatagatcccttttatctattttgaaatgtaaaaaagttttttagttcaatttttgtagttatttagggttacttatgaattttcaaaaatttttaaatagtttataatatcaaaattaaggtttaaacaataagcgtgtaagaaaaagttacacgtgcaacaaaatatttaaattttattttcaacattgtaaattactcagaatttctaagtacgtagtccatcctagatatccaaaatgtacatgatcatagataaaacagctactgaaacaatcatttaaaagtgtgctataaatttatcaaaaaatttattattaaataaaattaaatttataataatttttatttaaatagtcagatacaaattttaaaactaatttactttgaaaaggaacccacactaaactactttttagcttgtctttataaccatagcaaataaaaagatatttataatggtaagtagaataaatatttataagtaaataaaaaaaaattgtatgcaaagagtcattttatttaatgtgaatttgaaattctatggtttatcattagtgagaaaattgccctcatagtatagggaagcaagtgcctccctacatgatatatatagggatatttgtagtacacttttttaaaaggatgtttcgataaatctatctattttggtacttaaagaattttttagtttatttttttttatgagatgtaagttgtaattatttaaaattatctgcagaaattagctaatgggagacctcttaggaatttttctttgacgctctcgcttcaagccttcgttagatctttaacctcatagaatgatgactcttatacacattacgtcactttggttgtttcatggactgatgactgacctcacaaaccaacataagtgtttccagcgtgctttattctcactcgcacactccctggaaaaacgttccaagaggtcagtaccaatcctaaaattaccccatgtaggtgcaagcttgcttaactgtggggttctttcaatatgatgggctaccaaaaaataagaagcatcttattgataaaaggtagtacccatcaatctatttaagtcatcttcaactgtgtagtcccatacatacacagtctcaaaatcatcacacttgacctttcccaggtgatgtgagattgcacaacttacctcctatttctccttacagatcacgagactactaactgtcacaaaaatttaaaaatgaatcaggaaaaaaaaaaaaaagaaaaataaaaggaaagaaaagaaaaatgtgagatatatatacataataaaaagaaaaatcgatttttttaaaaagaaatgattaaaaaacgacaaaacacgtcgttttccatttatatacatatatggtaagataaatattaattgtacacatgaattaagtgtggtttgtacttttgtggctagaaaaggaatgatcactgatttttgcatgcaactagttgagtgttgggacctctaaataaacattaagaacatgtgcttgtatatatatgttaccctttcaattatctcaatcactcataatatatatctaaaaaatctatctttcttagctgtattatatatataatatatatatatatctaaaatgtaaacatgtttttccctttgaattatctagctcaatcactcataattattatatctctcaaaatatatctttcttagctgagtgttggctctgacatttttcatttataataatgtttcgaataatatatatacagtttttctgtgatgattaatatatattttttatttttttcaacttgaattaatttgtata

SEQ ID NO: 116064 - DNA, 2232 bp, Cannabis sativa
  modified_base (2203)..(2203): a, c, t, g, unknown or other
aaaaaaaaaaaaaaaaacaccacattctaagtacatagttttagtgaataaaactatcaaccaaataagcctatctagattcattcaccaattaactctttcttgcaattactcagtttagagatgcaataaataatggaagataataataaacattatatgaagcctccatttatcaatcaaataagagaatccattttataaaagatatattcagattgacaaccaaatcaaaaaccatttatttttcaaatgtcataggctgaatgaaaacattcagaaataataaatttaacatgatttgttcaattattaattatgataaatcctacaaataaaccaagtcttgacaactgttgacaccactagttaggctttattattattagtataattaatatttttatataatttttttataataattttgtctttatatacaaaacccaattaaaataaatataaattttaaattataatttttttaataaaaagtattatgtaaattaaaaaaaatatattaaaaattatatttttacgaataaattaaaaattatataaattatttaaattttaaaatatcttttatccaaaatcctgctttttttttattctataacctaaaaaaaaaaaacttatataaccaaaaaggggctagccaatttatatatttatatgtttaaatataacctcaaatttgtaggagggttattgtagcgtgagatttcctctaacaaactgcactggtttaataaatgccaagaggaaaaaaagaagaaaaatcctgatgaataaaacttaatagtatgggtatgattaaactccaacattccttatccattgtatcttatagaagataaataaacagtttttctagtagtaaaaaaataaaaagtgaaacaatgaaatcgaaaatattaaaagttatgaggcactcagaatgaaaaggactttgaataaagtttggtagaatatcaaggatctttcgatctcataacgataaaactcctcactgtgccaaattcgtaaaaaaacaaatataaattatctcaaaaaataaaaagaggagtcatcagaggaataggatatttatcatcaatagaaaatctcagacgaccgtcgtgagaaaaatgacatccataatcatcctttgcatacaaaaaaaaaagaaaaaaaaaaacctcagaaaaaaacctcagaaaaaaaccaagcagctagattagggttacaacttacaagagatggagatgacagtagagtttagtcgccttttatagcattcagttcagttacattcaacacttaaattgtttgggcttgggccggatgaaagtggagctgattgattttgggcttttaacgaatggaatggataaataaggcccctatagttgctaactttctttctttaccacttttgagcttgtatttggagacttgaaatagactacaattgggaagataatttaggaaagttgaaaaataccacttttattaatcaattaattaaatttacctctaattttatatttaattctgatataagagagtcacatagagagtatcttgaagtgataggggcagaattggtacaatgtttaaaaaaagaggtaaaaatgataaactttaaaaaaaaaggtaaaaataaaaaaaagataatataaaaagagtataaagtgcaattttttcaagataatttggctagaaaattactttttttttttgtcaaagtttgaaatttaacataaaatttgtaacgtcttaggtataggtgggttttgggcctaaattcagacgtatcacttgcaaagcatccaccatatagaatagagaaaattgtattatatacctattttactttatttgttttaatttttatcttcattttcatattctttaagatatacccatttttatagatgatatctccactataccccttaagttgatgtaaatcatgtgctacacttaagtggaggaacgagaatatgttaggcaacccactcacaaaaataggtaaattttaatgaaatataatataagggtattttttattaatagatacaaaaaagaggtattcttcaatttatcccctaattcgaattaaacggattgagcctgatccaacccaattaaagaaaggaaatttgattttttatgcttacatttggttaaaaaaaatttcctaaacaaataataactnatatttgtaggatatgacaacttttatga

SEQ ID NO: 116065 - DNA, 2836 bp, Cannabis sativa
  modified_base (1389)..(1393): a, c, t, g, unknown or other
gctgcacccaatgtaagctttctaatactttatatgtgtttatttcataatctttttagaagttcatatttacggtgttaatcaacatacttgtgagtagatctaagactttggtaaaataatttccaataccgcaaaccacaaattcttcgaaactgggcaatccttaaaaacatgtatacttgtttccaaagcctcaccacaaagcaaacatgatttctcaggacagaaagggagtttggtccttagagggatgggctcattgaagattctccacaaacacacccctatcctaggatgtaactttggactccatagccacttccacaatagtttcttttgaccaaaacgatactcttgatccaaccgatacgcacttttaactgaatagagcccattctcattacctctccatatcacttgatcttgatggttaatgggaatccttggaatttccaagattttccttccaatttcttcaccgaaaattccaaccacaacctcattgttccatcctccactagtagaaatattggctacagagttaaccataattctgcttccatcaagacttcccataagttgaacaaagcctaaataatctagccaaaggatccaaggctgtgtccaaaagtcaatggaatttccttctacagcaagagtaaccgagcccttctgaataatgtgtcgaacatccagaatactttttcatagaaacgagtccccactctttgattcaactgcccaaaaactttccttgccacaatacttgctcaaaaggcaggacacccatgactttctcgccttctgagccaaattccacgccaactttgataaaagtgctctattcatgtcttcaaatcgccttagcccgagtccacctaccgatttaggttgacagattttatcccatgacttataggccatatatttatttttttcagcattgcctatccaccaaaatcttcttataattgcatctagctctcggcaagtcgatatcggtactttgttagtagccattttgtacaccggcattgaagcagcaacagagcttatcaaggttaatctccttgagtaagaaagcagcaacataacgaaattaaacaacgtgtttacaactttaaaataactgtaaaacaacaaataatgttatttctaaatataagcaatttttcttcatatttacaatctatttctattaatgcccccacttgattaaaaatcaacataatgtgtgttctcttattatttttcatatctcaatgtaagagataagataaatttttgttttaacatgtaaaaaatgtattcttttaattattgaacaaccagtgtagtgtataacaatttataacaaactttacaacaacatgaaaacaacttgannnnnttttcaagttgaaataagatgttacaaaaacaacacaaaagaaacttcacaatatataacatgaaaacaacttaatgattcttttgtagatattgtgtagttttgtttttgttgttttcaaccaaaacaatatcaattgatgaacaaataattatagattttttaatattcaatatcttcaaggatttgcttttggttgttttcttgttgctttatggttgtttctgctgtcaaagtcccagtatcaaccaaaataacatcttttaaaatagatccccccttgaagcagataaaagttttttaattgttgttgtcaggttgctgcacatgtgagtatactgagtgattgtcactttctgtcattatcacattgttgcactttattgtttgggtagcttccaaaaaaaaattgtataaaacaacagacttttgtcatccttaatttagagtggttggctaagaagcaactatgattttgaagtatggtaaataaaatatattcatgtcaaaataatattttttgaaactgattccctccttggagtaggtaaaagttgtttagctgttgttgttgttgtgtttttgtcaggttgttgcacatctgagtgtactgagtgattgtcactttttgtcattatcacattattgcacaccattgtttgggtagttgccaaaaaggattgtgtttttgtgttgttaaacgtgtttacacacaatgaataccgtgtgaaattagtttccttagttaatagctttatgtaaaacaacagacttttgtcatccttaatttggagtggttggcaaccttccttcagttggtattttaattgtatttgagttgttccatggttttattttagttttttcatcattatatgcactagtttagcaaaagtgcaatctcttgatattaattctccacttgattcgtaatcaacatagtgattgttgtcatcccaatgatcattgctctgtactaaaatttacagaggtttcatgcctaaaactactatattaatttttctatattgttaagcaaccagtttaatacatgagaacaacgtataaacaattattacatgacagtaattagtaaatgaccttaaattaatcactatttttttttaatttaaattatttgcaccaatttcttcagatcaatcaattttcagtatgaatttgctttgatatacttctgaaacactaaattacaagctgattacgaagaaaaatatttaaaatattggtaccttgtatgtttatttgtcaaattcttccgagttgtttttaattttttgttaaaaattaaggaaaagttgatcgtactgttgaagataattatttttttattttattatttattgttctaaataataaagttatattcgtcattattttattattgttattgtgttatttatacatttgttatttcacgatcat

SEQ ID NO: 116066 - DNA, 8551 bp, Cannabis sativa
tgttagtaaatctagatcttgataaaatattcccaacagtagcaaccttcacattaattgactggccttgaagcaaatttcaagtgtcctgcacaatcaatctgcacatttcctccttaagccacacattttcaaatcagaacatcatatttttcctgccactagtttgaagcactggatcaaggaaaataggataatggtttgaatgcccaaaattaagattaaaagcttagcagaatggaactgagacatccaaattgagttcgtaaaggccctatccaacctgacttccacctatcagcttgttcctttacccctctcccaactgatatttttatataatttttttaatagtgagtagctattaaaatttttattttttaactcttaatatcaaaataaaaataaactaatattttagagtcttaatttttctaattattttgaactcaatacataataattattaattaatttaatagacatatatttctataaagtcaattttcaaaatatatatcttttgcataaattaaattagattcaggacatgataattggataaatattatttttgtgtgattaacttatataaaaaaaatagaattaggaaaaaaaaataacaattgataaatctatagaaaactcgttaactttaaaattattgccatcaccgtatctcacttgtcactaaatttaaagttgttgtcatcaccgtatttcacttgtaatcgtcactatcttgaaaagaaatataacgattgataaatttatatatataaaaaataataataccaaatagagagaataaagagtatcaataaatgataatgtaagaaaaattaatttaaattataaaataatatcatgcaattagaaaaaaaaaattaaacaaacttctcaaaaatattttaaaaggtcatacatattttaatttgtaaacataaaaatataagaaaaatagaaaaaaaaatatagaaaatagatatacagtaataataataaaaaataataataattaggtatagatattagatttatatatattcatgttatattatatgtgactatatatcaaaaattaaaaaaaatattacaattcaaatttaaattcattacttatatctcttttattttttataaagtgcataactccaatcaccgttgtatggggagtaagattgaaggtgtgatgttttataattttagaaatcagctcgcacttcgcgtgtggttgtttaaattttatgctcataatattcatataaaaaaattaataaaaaataataagtaggccataaactttgttaacaatctttatttttttcttttgaaagcttgagttttagaaggtggatatttgctgaaaaaatatctatatatattagtaatttatattggataatttacaccacacactgaaatttctaattttttttacttttttactgtagggcggattttttttcaaaaatactgtgttttttttttgtcaaaaataatgtgtaagttttataatgtgtactgtgttttgttttcactgttgttatagggttgtttttttagttgttccaatgttgtttttagttattctattttgtgttccactgttgttttataaaaagacaatatttttgaaaaaaaatctgtgtgacagtatttttataaaagttgacctaaattctagtatttttgtaagttctcctttatactcgacaaaacattgttcagaacaaaaaaatgtacttcactaaacactatattagacaaagtcatcgttaaaaatatcataaatcatgaaaattaaaaaaaaaaaacaaattgtaagcatgatctagtaagtatatacacgattaaaaaaaatactttactaaacactatatcaaaataaatgactataactatcttcattcatccatataattaagtagaaattacacaatatacgtaaaatttttttagtttttacttttttatggtatttttaattaaatcatttgtggtatgcgatttaagttttattttcacttttatgggttttatttttggcatatttttgtaaacattggcccaaatcccatatttttatctttttttttactctattatttttaaagtaagctacagtagatgtagcttactttttgcatgcacctgagctcagtactcattaccattaccattattgctattttcctctacttcaatcaatcataaatttcttttatttctcttagtattcgttttcttttctcttagatttgttagggtttctagtttatcatttctttgttcttcttcttgttatttggtttgtgagtttttgggttccattttcgtgcgattcaagctggtgttgcttccgtgtgttgttgttctttgtttcattcatttttcgagcaatctctctggtttaactaaggtgtttgttcatttccgtgtaagtatttgttgtaatttttttagtttagtgattagagtgttttatcttgaggtttttttttttattattattcgtgatggttttgtcatggtcggtggcgtatttagcttatttttggtttctttgttgtgtgttttgtgttatttatgtcgaaatttgttggttgatcattgtttttttagtttatttttgtcttaagtttgtgtttgtgttcattgtttgggttttgtagttaataattgtttaaagcttcatgaattttttagattttttttttattttttgtttgtgtttaatctgtttgttaagtgtttgattttttttttcgttctttgttttggcctttatgaactgtttttatttcagattttttgaatgttttttttaatgaaaccgactttttttaatataatagtatttgttctttttgatcgttaatttaattttttgtttttaattttttatgatttttgtattttgttttatctctttttttgattttgaactggttatttttgttattattttatttattttttttattttaatacttttttttaattatttgtgtttttagtgggtgcactaattgtctatgccacattgtggcagtttttttttatgtgtttgtgatgtggcttggcagttatattttattacttatatatggttattgttaatcttttatgtgtacttatttacttgtttatctttctttgtatcctttctgttgtttaggttttcatatatcatggataaaaaagttgatcctattgtttatgttaaaaaaaaagagggttgatgaaagcaaggtatttatttaaatttttatgttctttattttttatattttttgtatctttgttgttgtttatgttctgatcaatattttcaggatattgttgctttaattgatcatgcttttcaaccgcaggctgttcaacaaataatcattggttctgaaaatttaaatgataaggtatacaactatttttcttgtttattttacgtttattgtttgtttaattcttgttctttgtttttaaaatacttttgttttaatcttttcttttttataaccgctttataactcgtttcatcttgtttttgttaaaagcttgaggtagatatttctgtaaatgttcctcctatgtttggtgattttggaaccggttttgaggttccagttgatgactctaaaaagccagagtttaaaaaaactcgagccaagaaaaagaaggtgagtatttttcttaagttcttttcttcttttagtattagaactgattttttttattagaaacagtttttcaaatatttattttttgtaatttagttttttatagctttttataaccgttcttttttcaaatcttttgtgtttcaaggcttgttttagtattagaactgttttttttttgtttgtgacatttttattttttaaaattttattttttataagctttttatgaccagtttttttttttttcaaggcaactgctgatgtaaatgatgatgatttcattgatcacattgtaactggaacaagttctgatgttccaatcgaagataagaaagagcctattgttaggaaaacccgaagccaaaagaaaaatgttattagatgtttataaatttgtgttaatttttactttgtatgtttgtttttttttttttttatgtatatatttcatttttgttatttttttcaagctgggctagctgatactgatgtttcgaagcaaccagtacgtcgtgtaatacgttctggcgttaaatgtgtggcttcgaagggtatcgggccttcgatttctgatgaatctattaagaaaaccacaagtttttctaatgtggtaagtatttaatttttctttttatatatatattgttttctttttatgtgtattttttttatttatggaaccagatattttttaatcatgttttttttatttttttgctattttttttttattttttgcattttgtctaaatctttttataactagttatttttgcaggatgtttacttgaaaatgaaacaaaacatcgtttttcaagtaatcttcaaatttggaataacccttggtaggggtgaaaattggtcggttatggtcagtttttacaatttcataactgaccgttagaaactataaacgtataaaaccgaccgtacgatttttggtagtttttcggtttggcaattttgggcagttttggacggtttattgcggtttttggcagttttggcggttttttggtttaaccatttttttatttcaaaaactgaaacctatcgccatgtcacaaaaaccgaaactgaaattgaccgccaaattcggtgatgatgtggaaccaaaaatttggttacagtctggtcggtttgaaggtcggtttcggtttatcggtttttatgaacacccctaacccttgggttattgatgagctgaatggaaatcttaccgattctcagaagacgttatttatgacgatgcctttttctcattttttgaagatgggtagtattaagtggatgattgcattgtctcaccttgctttagtgagggagattcatcaagagagggaggatattgagaagtggtttctcattagtgatcgagttgtacgctttgggttggaggagtttgttttgattattgggttaagtccaaaagggtcttctgctttgaatgaatttaagcagaagatgtcatttaagaagaagatgtttcctcacttaactattaaggttgttcaagaagaggttaggggtagattttgagtggtaattttgatgatgatgttgatgcaatgaagatgggtgttgtttttcttttaagtcattatttatatgggtatgagaatgtgaagaaagttgataatgagttgtttagttttgttgatggggagttgtctaatttgagaaatattgcatttagaaaactgttgtgggataggactttttattacatgaacttgacttttaaggatggtgacaatattttctataagattgagaaggccaaagatgaaaaggataagtgttattattttaaatttcaaggttttccatttgcttttcttatttggttgtttgagatactgcctagccttagtcctaagtactgcaagaggattgctaatacatatcttcgattactgaactgagagagtacaaacaagaagaaaactggaggttattttgaacatgtgttggagatttttaatattcctgaggtacttttaaattttataactggtttcctttttctttccttattgatttataactggtttcttaacttgtttttttttttattttgtcaggccactgtgaatgatttctatcctattggtcgtgagcttaagaaatctgcattgtaaaaccttaagttcgaactagtttatctaccaaagaaaccttcaggtttcgatgggaaggtatgttttctttgtgtttgtgtttgtgttttgtgctttttagtttgttagtttttttgtttgttttatttttagttggtttttatgatgttttttaattttgttatgtttttttgttagtttgttttcagtttgctaaggtagagtctgctttggtttgtattcaagaagaccagaagaagataatgttgagtattaaaagcttgagagatgagtttagtattaagtttgatgaagttattgagctgttgaagagtaagggtgggtcgtttgtgcccaaagatgtggatgataaggctgaggattcttgttctgagaatctggatgtcggtggcaatgatggtgacttgccggatccattgtccccaaatgtattttttcttcattttgttgctgttcagttttataactggttattttactttccatttggttttttattttttcagttatttttttatgttttataatcgattttttttttgtttgttcttttgtttttttaagtgtttttcttttttagaaatcggttatgattatgtttttctatttttttaggtattttcaaaatctaatgttcctgattatgatgatgactctagtggactgcaattgtcgattgtatgggaagataaggtggtttgtttgttcgttgctattagtgatgtcattattataactgattatttttaacttttatgttttttttattcatgttcattctggttttgttgaagggaatgatgaggactttgtgtttacttatgatcgtgttgatgtcgaccaatccattttgaatttggttgacaacttgactggggcatatgcgtccccagataggataaaaaatgatcaatgggatttggttttaattcttaaatctgcatcatatcctgttgatgatgttgaagtactggatgtagtacccttgcaatttagggttgctgtcaagagacaagaaaaacctggagtgcattgtagatctccgtttgtgaatgagtttggttcttctgaacaaaaagatcagaagaagaagaaggacaaggagccatctgttcaagaagaggtcgatcataaggagatgtttccgtttgtacgagagattgggatgaacacaaagtctgaagattgccaggaatttattaggtggattgaaggtgctcgtatgtataatatttttttatcttgttcttttttttgttttttttttagttattgaattctctttttttagctggtttttgattttgattttggattgtttttttgtaataacaggaaaaataaaaaatcatgtggtgctattgagcctcctttagatttcagcgtcgtgcaaattgaagtcaaatcccggtttgtcattttacaaacttgtggagaagagttatttgatttggtacgaaactgttatttttcattctgtcccttatcctattgtttagttttttgcttgtcaatttttaactggttattatttttatttattgtgtgtagcatttgaatgttgcattctattatcttaagaagagtattttatttgatgccaatgtgaataagagagtgatgaccacatgcactcatttcgaagcaacactgaagggagtttatgatgtttttattaaaagctaagcgtgatcttagtgttataaggtatgacaatatggttaccgactatattctgggccaatataacttttgtttttagccttgagttgatgtggatgatgttgtcggtccctgtcacgttactctgcaacaacattggatttttctacacttcagcattttgagaaggaaaatctttgtctacaattcaatgaagaatacaaagacaaatcaaaagaagattttaccagatcttctagcatattgtgagaaactgccctatttcctggatttcttaaatttttatgatagtaggaacgatattagcttggactcaggcccttatgctgttcccaaggagaccctaattgcttatgagtttgtggacaaccttcccactcaaagctaaaggtaaataactggttattttttatcatgtgatttcttcaatttttagtgattgattttttttttctgcttataaataacaggttgcatttttttttaattatttttgttttgttttcagtgattgtggcgtgtttgtaattaagtatgctgatttattcatttaggagaagattcatgagattcctccaaacatggatgacatgatagcaaattataaggattacatctcagtaatattgtataactatgaccaagaaaagatcaataaatgatattctaccgaggatatgtcaaaggaaaagaagtcgaagaggaagaactaagagtcttgtgaactaagtgacttgttaatagcacagatatagtttttgtagttttattttgtgttttttttttttggatcaatacattatgttatgtttataatttggttttgttttttttacaacaatgtttggaaccatattcatattttgataatttcttacatacgtttatatatacggtgttttgtgtttttctttggtaatacatatttttatggttttacaattttcatgaaaagtttctttatatttttttatatatattctttttattaattataaccggttttttttttttttgttttcttgactggccaaggtttct

SEQ ID NO: 116067 - DNA, 1713 bp, Cannabis sativa
tgttaaaagtaggtccaaaggacatttctttaccgttgaacactttatttcttgaaatttttgaattattattttgtgaaaaaaacatataattaaaggggttaactttgaattaatgtctttaattctgaaaagtttgaaaattgaaaagggtctactaaaatttggttgagattgtcttataatgagagaaaattgatagtgtatttagtctaatttggttttctagtagagaactagttttgattggtcaactcttgttgtttcaattctacttagatgaatgtttgagttgagaataatcttagttttacatagttgtgtatcaatttcagtttcgtactttttgatagagcagcttcagatttcaatacaatgtcatgaaaaagggctgtagccattgttttgtgttcctccataatggaaagtggaaacttttgttgtctatgagcaaagttataaacttgacttgctcaaaatgttggtgataggatagggagacatgttattatacattgtattcctatcttgtgacatttctctcctcagtttttgtttacgacaggaaccagaacgacgttatagaggtgaacaaaactaattacgaaacgtgcaatgccgagcaccctgttcacaactggactacaggagctggaagggatgtgaccccattgaatgtgactcgacattactatttcataagcagcaaagggtcctgttatggtggcatgaaggtagcaatccgagttgaaaaccttcctcctccaccttcaggtgcaccattaaaagagaagaataccgctacaaaatctacacatcagagcctattcattttaccggttgttttcgccattggagcagcatgggacgcctttcttcgtttcggcttgtagtttctttgtggtttttccactattcatgagtgacattattagacttgcttaggttacgaggtgatgaaatctccttgtgaaatttatttatttttaacaaagtttctttctttattatgattattttcttgtgggggtgttggtgatgattatatttatgtttactcctgttgtttgttctcctcaatagttgaccctttaaactaggacccttgttggagtttaagggagttggtggagcttgaatttttgaaatgtcaaaggtgttgcattggtttgattatgagtttcattttggtggggaagagggggtatcaaaatgcatgaattgcgcaattaatttcttttcactttggattggatgaagtaatgaatgtgttggccatgtgggtgtgtgctgtattcacctaaaatcttgaaacaggcactgtatttatatgtatatatatagatttattaatttaatattgtatgtactcatgtttggtcattttggggtcaatgacaaatggagattggttggccgttggttttagagtattccattcattaactatattaaaatatgttaagtgaattcatttaaagagcacttccaaatggttgatgggacaaaatctcatcttttgttgccaaaagaaagaaagaaagaaaggagaaaattattccctatatcttttttatattgtctttttttatatttaccttcttttttaaagtctattatttttatctctttttttaaacattatactaattttgctttacttcaagatacttttcatgtgactctcttatggtatgtttcaaataaatataa

SEQ ID NO: 116068 - DNA, 2375 bp, Cannabis sativa
ggttttatttgattttcttttttacaaatcaaataaagagaaatgttaaatgacatcagtggtgactatcacgctcttatgtgctgttattggtctaactaaatattatgttgcatataatttaatatcatagcttttaggaagtattgctaaccaattgaaatatgacatgtggagaaggtgtgtaagcaccactggtgctttataagaatgctcataaataaataaataaataaagaggtgtttaattttgtatggcggtgtttatttatgatgtactatgtatctgatttacccgaatctaaataataatgaatcggtcagatcagattacttcgaattaaactttgattgagacttttattaatcaatgaaaagacaattattgctcaatttctatttgattactgatatgtcttacaatttcgaatcaatagttgaatattgaaacattgtgtaacaccacaagtgacaacctataagtttctctcgtaattctttttttcccaagtcaaatgcttcatcgatttacctgtttatgtacatttgtacaaactccatttgccttcagtagctgagttgaagtgcacgaatttttcgtgagttgaaatagttgtttacaaacgtttggctttccgttttatgagcaagtgggcgtaagcgtagctaagttaataaaacgacagagcccaaatgtggcctaatttatgcttgtcactgggaaacatttctaagcatcggtggacccatttatgcgatcctcacgttacttcctactatggatttttgtggtgttttaattgatttgcacgaaatagaaaaagagaaacgacaaatatgggaaacatgatgataatacaataagaaagataagatatgaagcaatttttgcttaatgatagtgaaagagggataatttagtattggttttgggtcatcattgccttattaactaaggcatgcaattgacagcctattatattgtaagggctttatcatcatgtatgttaattaacgttgcctttggtcttgatttccatcaaagcacaaaacttggggatgtactaagtgaaaacaaatacctaacttgtttttttttttttttattttatttttttaaatatttggaaacctaacttcaactaaataagtgataaaaagctaaaacttaacaaaaaaatatgttctaataatttgtgaaaaagtaatattaatttgacacaatatttactgtaaaatttaactcacataaatgtttattttttaagcaaaataaaataaataaatgtataactttattatttatttttatgtttttttttattaattcctttgactataatattaattatgaattagttataatatctttctttattatttaaataataaaatttatgataaattttttttttttttatacttttaataaaaatattaaattttgcaccaagttttttaattgtgcaataaaacataatgctaaaaattgataaaaatatattacaaatttttttttcactaaatataacacaatttttacattcacaaaaatggtctaagcacattaagtattcttttttttttttcttttttttttttatttcttacatcccgggataggtaattgtgttttatcatatttttaatttagtatcttggaaaaaatagttttactaatattttttcaaaatgatacttttatgcacatattttctgtgtggggcttttatcaaagatggtaagtacttattttctgttgttgtaatagctctttgtttttgttgtgttttgcctttttgtttagtttgctttgtcaagggtttggatctaattttttggttcatcgatgtggtggtttctattaggtttgatccttacctgtttaagggttatttgttgtgacgttttgctgttaaagtccttgctcgataaaaattgaagctcttatgaattactctgttaggatgctacttaattatagttagaattaaattagatttttagcagaagagttaagtaattttctattggagcttcttgtaaagtttaacatgcctatgttgatcatcttcttgtaaggagatttgtattgggactatctttttatgtcatttaccttgtccataacacgtcaaaaattacactataaacaagttatatgcagaggaattattgaacaaaaacattactgaaaattattgtaggaattttaaattgcattttacaattttaccctacaccaacaaaacaaacaaatcaatttccaaggacaatttcgaccttccctgtttccctgacttttcaaagtcaacccaacaaaacgactccgttttgtgtttgaacaaaaccaaaagatcgagactcttctcgat

SEQ ID NO: 116069 - DNA, 1600 bp, Cannabis sativa
gtagcaagtgtgaacccacctctctctaggagttaggtggaaaataagagcaatatgagggtgtgaatttttgtgcatatatgaatatcatattccctaatttaatcttatttcttaataatttaaaaaaataatctatcaaccatcgaggaccagatagatccagatcatgaatcacacatatgaaaaaatttccatgaaattttttattaaacattataatagttatggtctataaattaactattcggtgtatatatataaaaggaaaaagaaaaagaaaaagagttatatctagtaagactcttatgcctgagttgaaggaaacatattataattaatcttattctaacataatataaaatatgtaatgaatcttttgattgatttgaaatgtattgtacatggatatttgtgagaattatatatatgtgatgatcatagattattggcactacacattttattctaataaatttctgattattaatataatttttgtttaataatcacatctaacgttctttgatttaatgatcagtggttaattaatgttaattagctgggacatatttttttttccaaatattaatatgcatgttcttcgcactacatgatcgtgttgatgttgaattctcttgttgatcacgtcatgcaatacatgtcatgcaaaatatctacatatattcatgtaaaataatgtgcggatatattaagataatatataatccctgatgtttataattggctggcaataacataaaatctattaaataaaattaacatgtaaagtaaagagtaattaggttggggttttctaatttttttattattttctaaacacattccttctttcaacaaacataacattacataagagttggcacattgagttgtgcaacccaacgagcacaaaattggggtttctaaattagattagagtatttccctattttttcaaatgtaaggttgggtttcgattctaaaagtttttgtgtagcttacataagcaaaaaaacaactttttaattaactcactaacaacttccaaagagaatcaagtcaacaatactcagaaatgtgcaccgctcaaccttattgattctccacttctcctcactttttgactttgagtacttcttatatattaattgtgaaacttttttaaaagtgtagtataactctccatattatccaaaaaaaaaaattatatatattttattttatctttcttatacaagtatactctttattctcaaaaaaaaaaaaaaagtatactcttatttttttaaaaaaaaaaaatctaataataaacacactttaaatttgttcaaatagttgcatatattatttaattttatttcttttaagaaaaagtatgaaatcaatgccaagttttgatatattaattttacttataacccaaacatatataatggaacaccctaactagcatagacgtgttaacgtgatttgaaacatactgtacacgttattaatgaacaagtttaatgaaaatcgtgattaattaaaattttcttatttaattaaaacttataatattacatacaaaatatttcgagatcccgtttacaaaata

SEQ ID NO: 116070 - DNA, 2188 bp, Cannabis sativa
cgcatgggatggatgcaccatgttggaaagagacagaggtctaacacgtgctactagtttcgtagcttgtctcgagggcctgtcaacatgtgtggagacatgatgccttaaggattggaccatgattatataggagtccttgggtgatgagggagactgttcgaataatatcgaatggggcatggttaaaagtattggcacgtcagcttggtattggcatcttgccacacatgctaccttggtcacgagtgactaagtgagcgacgatgttgagatttatcttatcatagtggaaacctatgaacagtgcgagtatcttgattaaagagccttgatgcatggatacattcatggatgcttgtgagcatgactcgacgagagttgtttgagaaacagaaatgtgcacgagttacacaattgcacgaaaaataagccattattatttggatagttagaaggctcacattgacttaaaaaaattaaggtaccgcataaattttttgctgcttaaaaaagtgagtccgtgacacaccgtagtgttcactttttataatgaacacacattcattaattcttctttctagctagtcatcactagttactacattctttaatgaagttgatttatttaattgaaaactttggagtataatgataagtgcatggaatggtgggagggaatctgatccaatcatacacatgacagaagtatggcccacatgggcatattagttgtagttgaagggtgcaagaaacaataaacttataaattccttcatcactgaatctaattattggtgcttcctcattggctaatctcttcggaacccaactaattgatatcttaaatctaatttttaagtggattaattatgtgatagattaactagtattcctctaagcaccagtgtgcctattagttagcatttataattaaattagttagtaatattttataaatattattatattaaattatataaaattcaatattttattatactaataatcatataacaatgtgaagaaaaacacggttgttaccataaaaaatagacaaacataaaactaccatatatttcaaataaagttttaaaaagccaagtataatttcttctaatttagctttagtgtaccaaaaagaaaaaaccaaggctgactaaagttttaaatccagttattttatgcaaattttaagtcatattataggtatgactcattttgctgtcgctattatatactcatcaattataacatgtaatgaaattacaaaaaaaaaaaaattaacaagttaaaaagaaaaagaaaaattaagaaataacaaaatgattttaaaataatgttaaattattggtgtaaaattcaaataattgacagatcattctggaaatatatttcaatcttataatttaggacctaaacaataatcacaagctctcttgcttcctataatttttgttggtacaaacaaacaatttgtgttgtatgtagaagcaaatgataataataaacaaaagtatgttgggttattatttatagtgattgacatggtgtggtagtggtagattagtgaaatgaagtgggtcaatcccagaactgccatgtttcattggtcaccgtgtcatgtccatctctatttgacagcttgagggacatcgttcgatacgcatgccacatttttttattttattttgtttcttggttccatttaccaaaggttctttctatgtctttcattttcacacttgtaacccatttctttaatcaaatcactttaatttttcatgcaaaaacagtactgcttgtatgtatttcaatgttttattgaatacaaaaaaaaaaaaaaaagagaaggaaaatgatgatgttactgttactaatggggtaaaagggtgatggaatctgtgcctcatgtatatgcttttcccactggccatttactagtttctcttcaaatccaccacaactgcccattttatgcttttggctggatatccttatttagttatgtaaaaaaattaatgtttaaacataatttaatttaataattattatatcactaattatttataaagtgtcaaacactagtatctcataacattctctttgggaaatttgaatttatatgcttaaataattaaaaaattttattattataccaaaaatttacactataaaaaaactatac

SEQ ID NO: 116071 - DNA, 5318 bp, Cannabis sativa
aaaatttagaatatgtctaatgttatacaacatatataaaaatcaagtccaataatcaagttgagtccctacctctcccaagtcgttaaactttgtccaaaaaatcacgatcttaagctctcaagtcacgagctccaattttttagtccaatcttagatattactctcaactataccatcaaatggctaaataattattgagttcaacgagttcaacgacatataatatgcctatacttaaagtttaaggttccgaaacctcacctaagcggtgcacattaactaccggtggcagtaaaaatcggtgcactaaaaatatcgccaaaaataagagtagtgtatatcaaaacgaccacctcgacgagtagatcacacccatgccatccgtttgtcaaaacgatacaagatatcactgaaaagtttttggaaaagggcggagctacgaaaatgtcactgaaaaaagtagccagttgggcaaaatagcttagtgtaggttgttctccacgacaaggtgattctagtggtaaactcgttaaacggacaccagaagtggctcaaaaatccattcaaagtttgaactgccaaactttattaacttgtgatcccaggctaatggcggtgaaggaagcggcgccgcttaggggttgaggtcgtcagcacctgggatttaaattggtccgacgcgtgaggccagacggtggctagagatgggtcgctagagagtggtggtgatggtggtcatggcttctttgaagcttgaagagagagaatgagaaagggaaagagaaagagagagagtgtgtgttgatggtgaaaaagattatttatattatatttatttattttattatattatatatatatatttttctttgactcggtcaaaaccgagtccttacaaagtatgattaattaattgaattaactaataagattgtagcatcacagttaaagtaaagaacacctatatttagtttcatctacaattcagaagacacaacaataaagttgcaatgggaaagtatgtgtgggctttggctaacaaggaagatagcttgtggttgagatgaattaatagtgtgtatttacacaatgaggactggtggagccatgctgttccaactcaagctagctggtattggatctgcatagtgaggctcaaagagcaattcaaagctgctatgaatgacagcatgatacaaggaaaatgcacagtagcacaagggtacaaattgttctgtccagacccaattaaagtgcattggagtaaccaaatttggaggagattcattaccccaaaacacagttttgtgagctggttagccatctaacaaaggctcaagacaagagaccgattggctaaaatggggattgctgcagattaggtttgtttgctatgtaacttacaacctgaaacacactcatcttttctttgagtgtccaaccacccaactttggttacaaagcatcaagagctggctgcaatggagagctcaaggtaatttttttgctgtgctggttcgttggctgggaaaggcaaaaaccagcaagtttcgaaagctggtgtatgctgctgcacttaccaatttggtgtatcacatatggaagacgaggaacacatgctattgggagaaataagcacctgacaacaatagaatctgtaaagaattgaagactggagtgaagcaaaagatagatttattttggccaaaaaaagtatctggagaagacaatatttggtattcaatattgtaattgctgattttattcttgattatatttgttttatataccgaatgtatagatatatatcaaaggcctgaaaatttgggtgcttttaggttgtaaaagttttgtgcgatacctgatacatcaaaaaattaatgattgattatcctcccactactacacattcctttattaatttataatatgatgtttggttggaatgattaaaaatataagaatagaaagggtgataggaattagaatataggaatgtaatggaattaaatttaaaatgtataagaaattgataaaaaaaaattattaacattttcaaatattgcattggaatagttttttcttccattttaaaatggtattctaatggttttaaatgcaacaaaacaaagaaatagaatgaaaattgtttcttttccattcaatttcattacattacagtttgttccacattatttgatatacctctaacgatctcattatataagatcgagatccaaataaagctaactttttttaatataaaatacactaaaatttacattaattagaaataataataaatattattagaaaaatgaaaagtcgtctctatatatattttgctgggattacatgtatataataatatttataaacaaaaacgtgacaatttatatgcgatcattaattccttctttgtatatatgagcttcacatcgatctacccacgatcgaattgatttcttcgttaattaattaacagcattaccacacatgaacgtacatgatatgattaaatagaatatatatatatatatatataataataataatagtatatgtacgtatatatatgatcatatgttaatggtgtgctatatatacgtacctatttctgatatagagtactcattcaaaaactccattccaaatatattggtttatttataataattctttcaagtacgtagctaataagtatggcattgcccaatattgtgattatcaaatcggtagccatggaaaaatacatgagatgtttaactggaaaggaggagaaggttgggcaagagaatcgagaagaatttaaaaggggtgtgaaattacaagaagataaggacattagcagtcctttgataaaattccaagtggtgacagccacctcaaatccagagttggtccacattcggtgctgctacaccaacaagtacttggtcatggggaccactactacttactatgactatattcaagccgtggctgagaatcccatagaagatcaaacttcaaatgcatgtacactattcaagcctattagggctacagatgatgaattcaagggtgacacacaaatgtaccgacttctacacgtccggactaagagataccttatttaccggatgatgcccgacactcgcaacgatcacttgtccattctctccgagacccctagaacttatgcgcccttttttgatgtcttcaaaatcatggatttcggatccatcgtcatatttcctgaacaagtcgcattcaaacaacatggtagccaaagcaagtttctcaactgcaaatccttcaatgaccacccctacctgcagttcctcgatggaactgacgagggcgacacaagggtagccaatgtcatcaccaccgttggtgacggttttgttcgcataaagaatctctccactggaaaattttggaggcgtagccctaactggatctgggctgactctaacaaaactgaggatgacaacagctctgagtttcgggacaccatattctggcctgtcaaactcggcgataatgttgtggcattgcgcagtgtggcgaacgaccgctttttgaagggaattactcaagatggcgtaacaggttgccttaatgccgcagaagaatacatgacaaatgaagtgaagctggaggtggttgagaccttgattgagaggaatgtctacgacattgaataccacacagaggtagcgaaggtgtataatgtcatagagaaggatattgtcacatctcgcaacactagttacactaaagaagacactgtcaccctcaagttctctcataagaagtcaaactctaagactattggaggtagtgtatccctcaagttaggtgccaaagcaacccttaaacttgacgtgatacccacattcctaggtgggcagatcgagctttcagctgagctgacagggacagttcaatggggaacgaccgacttaactgaaaaagtaaccgaaactatgaacgctgttaaagtggctccaagaactagaaaaacagtcacccttgtagccaagcatggaatatgtgaagtgccgttctcttacactcgtcgtgattatcttcgcaataagcgtgagccagagattaagagactgcatgatgggatctacaagggaatcgattccaccgaaatagactacgacaccaaggaggagcccctaccagcttctgattaattgaatcgatcaacatgcaagcaataatattaatttcaagttccgtactactttccaataatatactatcatgtgatgatgtgatagctatagatctaaatgtcatattttctattctaaatctatatatgtattttgtgatgtgtctttgctctagctcactttttgcaaagagactatacattgtaatacaaaattaccaaattaataaaagggttaagattcgcattcagtatctctagtgtttgattttgtgtgtataatctcagattctattcttgagtgtttatagtgctaaactgatagataaacttatgcaacaattagtatcaaagcttgaaagttcaaaggaggatcttggattgagtaattaagaacttagtaaattggttgagaagaaatggggagcacgaagttcaatttagagaaatttacacggaaaagaaaattcaaattatatggcatgtaaatatgacagcattgttggttcaacaagaattataagttgtgattttaggagagaagattctacctacaggtctaactaagaaagagaagtttgagatcttggacaagctcatagtgcgataattttaagtttcaaaggataaaactcttaaggaagttttgaaggaatctactgcaactggtgtttaattgaaattggacatgatcaagtatttggctaattgattattcttgaatcaaaaaatatattctttgaagatggcactagagaagtggtatcataatcatcttcataattatataaattaaatattgtgttgagtgagtatttatgaatttatatatagatatatatatattgaatcattgatatcatatgaatagaaagtgaatttttaggtatacatctgatataataaactcagctcaatagagactgaggcagagcaattcatttatagacagagtcaattacagggcaaggggcaaaagccaatacaattagactacagatggcagtatacaattccataaggaataacagaaagatttcttgaaagatagggacagctggtgaatcttgtactgcaatgaaaacgtgttgaattgtgccaatgattaggtgagctccgaatattcaggaatagggtatga

SEQ ID NO: 116072 - DNA, 6710 bp, Cannabis sativa
  modified_base (5504)..(5505): a, c, t, g, unknown or other
tgatatagaataatctggattacattgaaacagagttttatttagggcataaaacccaacattaactcctcattgtctggagtgtataatgtatttcatacctccatgctaagaaagtatgtatcgaacccgacccatatattaagttgtaatgattttgagcttcggatagaattattatatggggaacagcctgtccaagttttggactggaaagaaaaagtactttagaataagacaattccactagttaaaagtgttgtagagaaacaataatgtggaagaagtaacttgagagttagaatcgtaactacgagagcagtatcgtgaatggtttaggtaaatttcaaggacaaaatttctataaggggagatggttgtaatatcccaaaaacctaattatgaataattaagtttattattcattatgggttaattaggtagtaatgagtaggattatgatcccgctaacctaatttagtataaattataaattttgtcataagtggataaataagcataatttattaattacgaagatttatttgaaatatgtggatataatgtaagttatttgtgaaataaaaatattttcaaatttggcgatcctggagacttgatcggaggccgaaaatgtcacaacaattttagttagtaattttgatgggatcattgagacaaattaattatagaattatcagggtattttggggtacttaaagttgaccaaataccctaggctaaagatttcttagtggttaaaaaatagtaaaataattattaataataattttttttattattattattaataaacgttattcttatcagtttaatatatatatattatatatgtatgttttaacttaaaacttaaaaaacagtacaaacgaaattcttctccttcagtgcgacaaaactctcacctttactattcaactttcttcaattttcaaccagaaattagtgattcaagctctggtagtagcatgatagtaaataattgaagagggagagcttaagataatgattggtattgttttaagttgaaaatgattggttctatatgttgaatgtgtgatttagagtagttgtaaagattttaatttcatgaaactgcttttgggtagctatgagattagtttagatgtttacttgttgaatttgaggtaattttgagttagaaattgagtttgagctttttaaaatttaaagcccgagctttaatggcatttttcgtttacgggcttgtttttaatttctattacattgtgactgtagtatatatggtatatatgtgtcctgtgaagtttggaatgatttggataggttttggtggtgtttcaaagaatgcaaaatttaagattctcgtttcctgctacgaaatggtccactgtttggtacaaacgatcaactgttttaccaaacggtttgtcgtttttgatgatttcgggaagattaaaaattgtattttggttataacttttcacttgggtatccgttttagacgttctatataccgttttggagcttgcaacaagctctaaaatatagtgtatgtttcagatctaaaatataagttttattttagtgtatttataccgtggagttttgtaaaaaaaactctagattgtcttatacaaatattaagtagtgttttgggatagacacttattggtttactgtttttgcgatatacggccgagattatcgggaatatttctctacttgggttagcgagcatgcataaatctagattaaaggtaaaaaaaaaaagtatattatactgcatatcatgttatgttgcaatgcaattaatattattgagattaagacaattattattgttacgtaatgaaaagattgcctaattaggcaatgataaaaatgttgtcttattaggcaacaatgtaaagattgtctgattagacaatgatgaaaaagttatcttattaggcaacgatgtaaagattacttgagtaggtaatgataaaaaggttatctttttaaacaacaatgtaaagattgtttgattaggcaatgtaatatacgggctcacctgattaggtgatgtgatatatggatgacagactatggcatgagctttcttgattagacaatgtgatatatgaatactggaagaggtattcaggttgttcttgtgagacaaccatgataattcatgactgcaaactgaaaccgttattaagtttctcacttgtcggcgatcctctttaggtagcgacattgacatatgggtgttaggctatgacacgggctcacctgattaggtgatgtaatatattggtgttaggatagggtacgagctcgtctaattaggtgatgcaatatatgggtgctaggttatgacatgggctcaccttattaggtaatgcgatatattggtgctaggatagggcacgggctcgtctggttaggagattcaatacacgggtactaggttatagcacgggctcgcttgattatgtgatgtgatatattggtgccaagataaggtatatgctcgtctgattaggcaatgtgatacgtgggtgccaagttatggcacaagctcatctgattaggtgataaaatatattggtgccatgatagggcacaggctcgtctgattaggcgatgcgatacatgggtgctaagttatggtacgggctcacctaattaggtgatgcgatatatgggtgccaggctatggcatgggcatgcttgattaggcaatgcaatacatgattattagattaacacatcgacttgcctgattaggcaatgtgatgtaataaagatggttactctatgagataatatatataatttatattattaaatgaatataacttctattattaataggatgattttatattattgaatatctatatactgacgtttaattgtgaaaaaatatcagtagcgatttggatttcatcttatgaataatatgtgattgtttgattctgattgcctgagtataaatgataatatttgaaaaataaattatatgatttttgttattacttttcttgctgagtccttgggactcacatgtgctatatggtgcaggtaataggtagagacatttggacaaccatgagtcaagaatcttctccagtaaatgtacatatcagcttatccggcaattggtgttgagttttcaagaactgtatttcaaatgttctgaacttttaaatgtattttataatattattataatggcatgtcttgtaatattttaataggggatttccaatcgtaacaagggactatgtcatgattttatgatttaatttagttggtaaattttttattaaatcacattttatttaaactgctagtttatgattataaattagtttataaacgcacacacgtggcgaccctaagaattagggcattacacaacgagtcgctgaacatgatgctgagttggcagagcaaagaaaaatgaatagaaggatgcaaaaagcattgactgctatgaagcaggcaatggcaaccgcatgtatcaatgtggacccatatattgtaccacctatgcaggagagggtaggagaaggaccctcacggcctacagaaaaaaaaaagaaaaaaaaagaaagaaaggtagggagcctagccccatcaggtacccctctaaaggacctccatctcttaaggcgaaccctacaacagtacctaaggggaatagagagacactcgtaatccacgaagagtacgctctaatctcccaaaagggaaaggtctgcaaggggacaggtttcccaaagggagaactggcccacatgaccgtggggattgtcgaagtgtttatgtacatcaggaacccagggaagaagagagtttgtgaggagggacccttcagtcgatttaaaagtaaaatatcctaaatgaaggaatcctagctgagcttgctatcctccaaaaagacataacgagagtgtctcggaggcaaaaaagcaatgattcagactccgattgtgaggaccaagatccatgtgtcaggaacgtccttgaagccaaaactcccaaaaaacatcaaaatgcctaaaattatgcaatatacaggagacactgacctaagcgatcatctgtcacgattcaatagggtcatgacaattttgagagtcaacaatgacgccaagtgtttatgatctcattgactttgggaggatttgtggaagagtgttcaagaagttggaacttattggtataaattacaaactattttttgaagatagttcgtcgcaacaagaaagataaaccttgaagtcagtgccttaactaatatcaaacaattgcccactgagaccctacagaattcattaagagattcaaggaagaagcttccaaaacaaagaaggtcgacgatgggcaacagttgacattgctacaggctgggatctagaccgaaactccttatgagaatgagctccaacaagaaggtgcaactagcctgcaagattttcaaaagagggctgaaaaatacattaatttggaagaggagatcacaacttttggtggatattatcgaaccagatgacctggatatacgtctaggatatagtataccggaggatcgcatcccgcagctcccagaaccaacgggattcctagtatacaatttcaacactgccagcttactcataaaatttggttgccactccggcccattcagattgcgggttgcaaagtaatatcctagctctaggagtgtgcccataatatcctgctcaatccgcctcacttgcgaaagtgtagcaacaaccccccaagcctttcagagtaaaataatttacaatatagaatttaatgttcaaatcttctatttcacacgcgtataaaataaaaaagtcacgtgtgcaacactctttgaactctatttttaccgtgttaatgtttttataattttttaaaatcttgcatgatgccttaaataactacaacgtatacaatcataaaaaaataagactaatttcttttttctaaatttcgaaacaaataaaaatgtatcggtgcaccccttactttgtagaattttcctataaattttacgtagttaatttgatttttttaaaataaaaataaataaagtaagtgtgtataagtttgacccgcaacttctcacctcacctcaacccatacccacttcccccaataaacgggttcctaacctaatccaacccaattttattgatttttcaatgggtgaccagtgactttttttaagggattctttttaaaaatatacgtaaaatataaaataattacaaaaataacttaacaaatctcaattataataatatcttgtcacgtcattaagaatacattaattctaaaataatatgcctgaaatgaaactaatctcgaaattcctttttttgttttttaatttatagtgtttcaaaagtaacattttggttacttatgatgttgataataaaccaacaagtaactttttcataaaaaatatcatttttatattatataanntgagatacattttggttacctctaaaacttatatgtatacactttaataatcaattaattatttatgttatgttaatacatttgagtaacttttaagtttattttcgaaaataatgagttatcatccagtaagttaccattttagtaaattgtatttaaaaaaaaatatatcataaatgtttaagtcaaacatattttttaaatgtaaactaatatatgtattttgattagataaataaaaaatgaagttacaaatttttaaatcattataaatatgatatttttttggaccaattagttatgatttccataagatactaattggttactttgataaaatcatcaaatttaaaataaaaagatgatgatcataccaaatatcttataattagatatgtttatactcatatatgtcaaataaacttattagtgtattttggcatattgaaacaaattttcattatttgtttaattttttcgtgtaacctatcatcgtatatgctaataaatctattagtttattttgacatattaaaacaaatttttattttgtttcgtatattggaacaacaattcatttcatttcatataacctaccattacatatgtcgataaacctactagcatctgtttgttggaacacaattttatttttgtaatacaaagtaaactataatcaaacataataatatacaccaataaacctattagtctatttttcgtatattggaataagaattctttttttttttgtttcaaacaaaatgtgtgcttataaaataacaaactaattagtatatattttttttttcaagtcgagacatcaaatctggttgtatgcaaagtacatgattgtaacatgtcttacagacttacatagtaaacttggataacaatatatgtacttgtcaaagttttgaatatgatgagtacgcacataaaatgtctagctcataattttatttagcatatatgactatactatgcctatactcatacattttggcatattgaaaaaaaaaatttattctttgtttacatagtagcatttttatatagcatatcctattgtatatgctaataaatctattaatttattttgataattttttactctcaattttttaaaattattattatgaaaaataaaccatttttaatacactataacagaattaaatttgaaaaagcaaaaaaaaaaaaaa

SEQ ID NO: 116073 - DNA, 6634 bp, Cannabis sativa
  modified_base (6597)..(6598): a, c, t, g, unknown or other
ggcataaaacccaacaggaagatggattgcggaatcatcaattttaactcaagaattggtccatacaatcaagagaaggaaagggaagggagggcttatggctataaagttagatatgttaaaggcttacgatagaatagagtggaatttccttcatgaggttctcaaatgcaacagctttgatagtggtgtctgtgcgttaatcatggagtgtgttagtacggtgtccttatcagttttaatgaatggtgttccgcagaaaaagttcgatcctcataggggtcttcgacaaggagacccgttgtctcctttttatttcttctgtgccatgacgttctttcaaaattgattctgagacagcaaactagggggcagatacagggcatctcaatctctagatcagccccggtggttagccacttgatgtttgttgatgatacaatattatttgcacgtgcaaatgagagggtggcgacgaatattctggattgtatccataaatacgaatcctggtctagccagaagtgtagtttagggaagtcttattttccggtaatatgggaaacactcttgaaaataatatcccgagcatcctggatgttaaagagtgcgatggccaagagaagcagctctggaatccttttgtgtttaagaggaagaagagagaagagtatttgtacctaaaacaaaaggtcgtaaaaagaattgaaggttagaaaacaaagcttctttcctttgcgggtcgaactactttagtgaaatcagttgctctatcgatccccttgtatgcgatgtctactaacaaactaccggtctcttgctgtcggtatattgatagaatgataaggaagttttggtggacagggactacggaaaaagatcgttatttggctctggtaggttgggaaaagctttgtaagcctacggttcaggggggcctgggatttaggaaactagaacatatgaacaaggtcctcttagcaaagctcgcatggaaatttgtctttagatgtgatagaccatgggtgtcttgtttctcgaaaaaatattgcaaatcagagtctttttggagtattaatactcgtgatagagattcagccttttacaaaggaatcctgaatgccagagatattatctgtaagggaagcacgactttggtagggagaggtgactcggtagacgtgtgacacaaccatggatcccgtggctggattatgacgagtttactgagcttatgaaccgagtgaagccgcggtatccacatatctcctctgtggcagacatgtctaatcccaatggaagctggaatattgagcttctaaaagagatgtttggggatgtgttgggagagagaattggcaaaattaaccgacttcctcatgacaatagcgatttggtagtttggaaggaggcgagtgatgggaggttcacagttaagagcggttatgaggccacttttgggggcagctcacatgaagatggcattctgttgaagaaagtttggagtaagaacgtccattataggcattctgtcatgatttggagagctgtcatgggctgtgttccaactagagataggctcgagttcgttggggataagagttgtcgcttgtgtgatggggctattgagtcagccttgcacatcttctgggagtgccattgtgcgagagcattgtggtttagcagcccttttcctatcagctatgggactgggaatggtaactcagtcaaggaatggttggtctgggttttgtcgaccctccccacggatctcactgagaatttttctcttttactggctgtctgtttgaaggcatttggaaggctagaaatgaatgcttatttagaggaggattagttgacattgccttgattagaagctcaattatgagaagatactatgagtatctgatgttggaagatgctgatgatatagcacagcgcagaaatgttcttaggtccccagcagcggcggatggaagagttttgtgcaattcgactgatgttttttgtatgacagacgcatcttggaagaagggtaaggtgggtcttgctggatagacggaacaatagttctttttggtatgccaagtatgaccaagcctcctctgcagcagaagctgaaattatggctattaaatgggctctggagttagcggagcaaaagggtttccaatcttttgcgggagcctcggatgcaaaggtgctgatcaatgctctaaatgttcgacagtgtcctcccatgtggacattaaagccgttgtcaatggaggttttaaatttgtgtaaaaggtttgatgtttgtaactttttttatatttcccgaaaagacaattcagcttgtgatgccttggctagatgggctagaaatcatgtgttttgtaatgaatacattaatagggagggatcccctgttgtgattccaaattatcttttgcaatgaactatcttcagttctttaaaaaaaaaattggggtttttcttttctaataaattaatttgattatagatatgattacaaaaagccatctctgactgtatataaaattataatttaactaaaaatatatatattataatttaattagatttgtaattctagacacactaaatttatacccattttcttaagaggtaaattacatatatttaatttttacaataattatagttttgagtgtggaatatatcactttaaatcctaacaaaccatttgctagtctctgcccttttgttttgacctatcattctcttctttctacgctgctggactgcagaagtaatgtctcctcttttaaggtagaaactcttgaattgatcttttatgttttgtacagtaatacttttatggtttatgaatgtaatttgtatatgttgtgtgaaattttggaacctaagccgtaatatagggtcaaggaagagctctttatctcattatcaatggttgaacatctacaatgtacatatatataatttttatatataattataatcagaaagacagagataaaattacatacttgttaccccactgagcataaagattaataatgatatattttggtgttctggcatctcttaagatgtttacttttatgttttatttttgtaatctttctatttaatactataggtcatttcaaaaacagagaaaactgtaatatcagaaaattctcctaatgagattggtggaagtagaaattagtcatttttcttttttatatatatgttaaactaagttattcgaataatatatttcttgttcttaaaacattctgcattgcattgtagtggagttcttctttagccaagaaaaatatcagtggagtaaaaataggccatcgatgataaagataaggctttcattcactaagttttcctcataatgattacacaaagaggttggcataccaagtaaaatcccctctctaggataaatggcgctcggaagaggtgattttcaagaatgctaaatattcctcctattatggtaaatttcgatcaccgatgtatcatcaagaattagtttttttttttaaattgcagaatatgagaatgttgtaggaaaacctactattgttggacatggctgtagttcatcttcaagcgaatctcccaaatagaaatttgattctattgaaggaatgagcctggcatacaaatcaaagataaatctagaggacacatcacatttccagccttacaagaaaaggatagaattgacttttaaaaccttccaagttatttctattgtggggaagagaattatgaagatttattttatgtaattttttattatgtattgtattatttttatttaaaattttggaatttacaatatttgtacttggcgtattttttatgatattcatttatataagattacggtttaattaaattttatatataattcttaaaataatgaaatgtcaagtgtgctgtgaactaattacataatgctaccacttgacatgtgggttaatcataatattaatatgataaattgactaactatgaaatgccaaatggcaccattaatatatgccacgtgactgtcacagtagcagccatgcaggaagacatgtcatcatccacatcaacttatgagtcatcatctgtttgacaacttagcggggtccactaattattttacctaccaatgtcaataaccgtaggtaaatactctttctccacgaacttttacctacacatctaccaattaattattggtaagtaaagtaaattatctacgaataggcacatttacctacaattataattaggtaaagacccctttttcttgtagtgaatctagtgattcaaatactaagttctttcatcaatgtgccaatgctagacactccaacaataaaattaaaaaaacaataagtgacgatagcagtgtgtacaccagcagtagtgacattcttcagcaggtcgagctttattttgctgctatttttacttctcaaggtgttgatgagcaagctcttgaggcagtgtttgatacaattcaagttgccattacaccagattcacaaactgctctatctcttccttttacggctgatgaagtatttagtgccttaaagtctatgactgaagatagcagtccaggaatagatgagatgtctgttatgttctacaccaattattggcatattgttgggcctcttgttactagtactgtgttggatgttctcaataatggtagtgatccctctacattcaataagacccttatcacccttatccccaaagtcaagaagccaacaaagatcactcagtttcggccgattagtttgtgtaatgtattatacaaactagtctccaaaacaatagttcttcgacttcaaccttatcttgcaatggttatatctgaattccaaagtgcatttctatctcaaaggtttattacagataatatccttgtggcatttgaagttcttcattcacttaaaataaggaaaagagcgaatcaaggttatgcagcaatgaaactcgatacgagtaaggcttttgatagggtggaatggtatttcttacaatatgtgatgttaaaaatgggctttggtatccaattggtagagttgattctacgctgtataagctcggtttcttattctttcttgctgaatgattctattcaagggtcggttacacctcagcgtggcatcaagcaaggtgatccattatcaccctatctgtttctaatttgctcggaaggcttttctaggttgctgcaatatgaagaatctactggtgcacttcaaggtcttaaggtctcaagatcagccccctcaatttcacatctattttttgctgatgatagtgttcttttttgtcgtgcttctcggtcttcagctagagctactcatcgatgtcttgatctttatagccgtgcctctagcgaagtgattaatcctgacaaaagtgtgctctccttttcaccaaacacaagaaattcagatcaagagttctttcaacaactcctcaatatgcctatacaaccatgccatgaacagtacttagggctgccatcattttcaggcagggataagactcaattgtttagtggaattacagataaaatttggaaattgctgaactcttggagagaacaacttttttctattggtgggaaagaggttcttctcaaagctgttgttcaaggaattccaacctatgctataagttgctttcaattgccaatcaaactttgcactcaaatagagcaacttatgtcaaggttttggtggggttcgtctgcaaatggtaactctattcattggaaaaattggaaatttctttgcaaagctaagattcatggtggtatgggttttcgtaactttgttcattttaaccaagctttattgaccaaacaagcttggagaatccttgactgtccatcctcactccttgctagaatactgaaaagcaggtattttttgaatggtaatttcatagatgccacagttggtacacaaccatctctcacttggagatcaattgtttggggaaaggaactactgcttcaaggtttaaaatggagaataggttcatttgccattgtttgctgcaattcacaaccttggatcccaggcacctcaaactttaaacccctggtgttttttgggaatgatcctaatatcaaagttgctgaatttatcactgatctgagacaatgggatgttcaaaaactcaaagcgcacttctgtcaacctgatgtggatagaattctttcaataccattgagtttgtttccttgtgatgatgttctttcatggcattatactatatctgggacttatacggttaaaagtggttataaattggcctcagaagaaccagattcccctcttccaagcagccatcatacgtctgaaacatggtggcagtctttctaggctttaaaattgccatctaaaattcgaatttttgcttggtgtgctttccatgaagctttaccagtttgctgcaactctacatcatcgacacatttcagcttctccccaatgtactctatgttagttgcacttggaaacgattaaccatgcactttttgttggaatttatcttaccaggatcttagatctnntcacaagtatgtttattaacactctaaatatgaact

SEQ ID NO: 116074 - DNA, 3903 bp, Cannabis sativa
  modified_base (3738)..(3740): a, c, t, g, unknown or other
  modified_base (3859)..(3859): a, c, t, g, unknown or other
tttttttttttttttggtatggatattttttttttttttggtaagattttggtatggatattaatattaggttttataagacgcaaaggaaaggcagttagatacacacgtcgatttgatatgattttttggttttctttatttatttattttttttttttgaggtgatgtggagggaaaatgagttggataaatagagtccataaaaagcagtgtccttattagttatcagtttaaccaaaataatgtacgtactgaaaagtgaggtagactactggaccatacaaaaagtctaagactcggtatcaacctcttaattttaatccacaacgtacgttctttacttattggcatagattaatttggatttctttctccatctcactatcacacagtactaagtagcattatttattgttaacgttattgtttcttcattttccatgcttttttttttctttttgaaagaacaacttgacagttgtgggtatgtgtcatattttaaacactatgaatttcttattgtccaattaacacgtacactttaagtccacgtgattcttttacaataaattaatgaatagtagtgttgcattctacttatttatatatctctttctagtatcgactatgtttttgtcttgtcatatcatatgtaagttgtagccaaaacacccataatacaaattcacgttttacatatatccatacgtgcgtcctaactgattggcgatttcacatttggaccgaatcgttaatttgttgctttttgctccaccaaaactagattcttaaagcatctccaagtgaagtttttaattttttttagctaaattttagtttaaatagttaaaaagttataggggatttttttttattcttcctccaatcatatttcttattttagtcactactacaaaagaattattttagctaataattaaaaaaaagaagaagctaaagcatccatacaataagaagcgtagtaaaggacatatgatgtcgatcatttagtaataattgccgccatagatacaccgttggctgacacatgtcacttatggcagcggtaattaccatataactaacgctatagggttttataaccctgatcgaaggctcattttttcatcttcctcatttttttatctcagaccaaaatcctcaaaaccctcgacatccatcacccaaagagtcggcgtttataaaaaaaaaatctctaatatttaataccgagaaatacatattgtcagaattggataattttttttttttttgtatttgtgtaaaaaggagctttgaggtggcgcgcagttgtggtgattgtagctccagccgccagtattggaggagaaaacaacgtccattaaaataaaaatctaatctttaataattttaataaggtacattgcattattggtagtcaaattttagtaataaggtaaatatataatctttaataattaaatattgtgaatgaaagaggaaaacaaagattgagaacgagaagtaataaaacaaaagcttagaaactagtttttcaaaaatttgttaatgagaaataatatcaatatgttgattttttttttcttttcaaaatagtgtaaaggctataatttcaatataagatgagaaaaatattaacttttttatgtgtatattaaatttaattatatatatatttctatttttattcctattcatgccgtttttattttttttactagctagtaagtagttaataaatactaattttcatttctgatcatatatttttattactaactatttactcattagtaactagttagtaataaattaactagttactcataaattatataagtagttaaataatttaatttttaattttttagtattttttatattgtggttgtgaggtcaatttgtaagaatctgacttagttggtgttgatcgatttctagctagttagggtatacatccactaacttttgtgattaattaattatgaatgcttagaagagttcgaatatcttaaatattcatccgtaatgaagtaggttctgtgatataatgtaccgtagtcaaattggtggaataatatgcatgaatgagtttaaatatcttaaatattcatctgtagttaagtaagttttgtaaatacatgtactgcactcagatggacgatacatttttgtattactaaatgttgttgggattattttatcttattttggattattttttgttgttattagtagctaaatttttttcggaacattcaattatagtcgttatgttgccaaaattttaatagaattaggataactagtaatttagtactaactagttactagttagtaatttaatatactataattagttagtagttagtaatttagaataaaattagttgctagttagttataaattatataactagtaactagttgtaaattaattttttaatttgtagtatttttgtcttaggaggagttatgaaggagatttctcaagtaagtccctttcatccttttcctttcatttttttttttttgaatagttcagattttaacacgttttccgcacaggctggtgtgaaagtggcttatgcctactctcgcgccaagtcaactgctgtcaagaatcttgccacctccaacacgatgcaaagggacatggacttggccaggaaagacgctgaagagacgcggacccagctagaggtcgtgaggaatgaacttggggaggtaaacaagcaactccttgctaccaacgccagagttgacgaactgaccaaggagctgcaagacataccctcgaccgcgcaacttgaggcaaacaatgtttcattatctcaagaagttacaagtctcaaggatgagagggagggtctccggactcttcttaacaggttggaggaggatgctaaaaacaagaagaccagggaggaggaacttgtggcagaggtcggaggactcaagaaggaagttgagaataagaagtccaaggtagaggagcttgagagggagttggatgccttggagacagctggtctcaaggttttctacgatttttggaagcccaatcccaaagcgaactttgattaccttggcgcttccaaagatatctattttaattactgcattgccccaggccaatgaaaaccccaaggcgaccacttccaatgctcttattgaccagaatgttgatactccttccgtccagaatgatgatcctccagctccttcaaacccagttgatccacatcaaatgcatgggactcctgctgtttaattgctttctttttatacctttcttttgtatatatgtctgttcggccagtaggcctttttttttagacatggtgaccggccaagcagtctttaaacttagaatatattttttatttttcagacaactgactgactgggtagattttaatcccgggtttacatgctttgttattctttatgaatttcattccttgttatgatcattgtgcaactgtgtttgttttatttttttttggtgcttgttatttgtttttagcgaatgctttgtacgggtatagatgtcccccaagtgaccggaaactaaaattcataaaaaaaagggcagaaaaactattacgaaactaaaattcatccggaaatccagtttaatttacataaaactaatgtcctgacttcaatttttagatccatgaaaggaagatctcaaaaagttgaactggagttcccaaacaatccaannnaagtataatccaaaaaaaaaaattacatcaatactataataaaatatttatcctagtgtctttttattgttttccgaatttctaatggtgaatttgttcatattaaatcataaagaganatgtagatagagttacgtacgtggaaacactgttctaattttta

SEQ ID NO: 116075 - DNA, 2686 bp, Cannabis sativa
taaaattaaaaccaacatccaatgattacaaggtctaaacttgacatttacaaaccaaaagcatatcttgcaaatactattgataaacatgaacctacaacattcaagggtgatctagctagttctaagtggaatgttgcaatgtagcatgaaaacacttgtttaaggaacaagaaaacatgaacactggttcctagaactttagatatgattgtggtctaaaataagtgggtctactaaataaaattcaatgttaattgcatagttgagagatttaaagccatactttataggcattgatttctttgagacttataaccttgttgttgaaccttgcacaatcggaatcatgttcactttggcatctactaaaggttcggacattcagtagattaacatcaacaaagcattcccgaatggggagcttccagaagatgtctatatggctcaaccacaagattttgtggaccttcaatatccaactcatgtgtgcaaattacacaaagcaatttatgggttaaaacaagctccaagagcttggtttgacactctaaaaagcactctagttaagggggttacactaacagcaggtttgacacacgtttattcattaccaaagaaaatggtaagctccttatgatactggtttatgtggatgatattctcatcattggagaaaattcatctcaagtacaacaagtcatctttaccttacacagtacctttgctctcaaagtgcttggaccagttcactatttcttaggctttgaggtcaatataactgcctcccatttgcttgacacataaaaattataccagggatcttttggccaaaacacaactcctagactccaagccacagtctactccaatgtgttataccacaaagctcaatgctaagtcacgcacacctatgcaaaatccaacactatataaaagtgtcatttgtgctctacagtatctcacaatgaccaaaccaaacatagcatttgcagttgataaattaagtgagttcatgcaaactccaacctttgaacattgaagtgtatgcaatagagtgttgagatatgtagcaagtactctggatgctggtttaaccttcaaaccatctaataggttggacttataagggtttacatttgcgaattgggtaggcgtcatgatgatagaagattcacatccgactattatatttttcttggaggaaactttatcaactagtgctctaaaaagaagattgtagttgctcgatcaataatcaaagtattgtgttgtggctttggccacttcagaactgatttggatacaatctttactctctgaactcatcatctctttgcctcaatgtcttattctttgttgtgataatcttggtgtattctttagcttcaaatctagtttttcatgcacgaacaaagcacattgaagtttaatttacactttgttcgtgacagggttttagctcaacagttggatgtccaatatgttgagtcagaacatcaaattggagacctgtttatcaagcttctttcaacaatatcttttaattatttgtatgacaagttgacacttggtctaaaccagtgtcacttgaggggaatgttaaagttagtcatgctcttagctcaaagtggcaagttagttaaagttgttagaaattgatcgacttagttagagatattttctctaatttatttagctataatttataactacttttagtataaatatagtgcaagccaaccattgaaagttgagcatttattccactctttccctcccgtcctctcattctccttctttctttcttttttaatcaaagtctaactctaaaactccgagctcttacagatatgcatttggcataggcatggcaaagtgattcaaatttttggatcaatttagagcactggtccgaaacaaccgaatcatttataactgtcatgatcacttgctataaatttatccagatccaatttggtttcaatatgtcaatgaaaaaataataattttcatcctcaatccaaagttagaatctcatgagtttttatttttacattgatacgtctgtgtgttcaattcttcaatatttttgtcacataacttacatttttcaataaaaaagatttggatattatatttagtaataattaaactcaacgaaagactaagtcgggtcaattattactttttcttttcgttaaaatataacgatgacactattaaaacttataaaagatattgtgtaaaaaaatgtcgaatctaaaaaattagatctgacttgacctggataagctaggttgcttttaatacaatacgggtaagaaatctgacaatgtgaggtgaatcggatcaactactgatttagatcagaatagattataatcaaatcagattcgaccaaatctatttacattcctacattggcatgataattggtaaggtgatcaataataaaagcacttactaaagaaaaaacaatcatccgtcaccattttcgccaataataacaaaaaaaatatcgacaactattattatttattaggaatgattacataaggtaccattttttataaaaaaaattacatttttacgtttaaaggattttttttttaacattagaaacaacacgaaaacatcaagaaaactatataaaagtaaaatgaaaataacattaaaacaacaa

SEQ ID NO: 116076 - DNA, 3231 bp, Cannabis sativa
  modified_base (297)..(306): a, c, t, g, unknown or other
  modified_base (377)..(407): a, c, t, g, unknown or other
atatataaattttattttaatttattgttatttttattatttttgaataaaaaattaatttttttaaagagttgaccgagttgactgggtcaaccggccaaccggaacccgccatcccgtgacccgccaacctgccaacccgtgccctattagggtccgggttcggtttcatttttttgaacccgaaacccgccaacccgaaacccggtaaactcgcccgatgttcagccctactaatttacttttagccaaaacaagtattgtgactaaaaccacatttagtcacaacaaattgtnnnnnnnnnnactaatacttttagtcacggaccttttagtcacagtattagaatgctaattaataattagtcacaactttnnnnnnnnnnnnnnnnnnnnnnnnnnnnnnnaaaagtaaaattttttgtagtatctactaatgaacgtctaattaatatgatgattgttcatgtattaaattgtgtcattagaactttgacatgtattggattatgttctcgaattttgacatgtactaaattgtactcccaagcttttgttcatgtcagatatatacctgttagtacataaaattgaacagaattagaagaaaattcttgaatacaataatcttaatagttcatgaagaatttttaacaacctaaaaaatttaaaactacgacttaatatatgtaaaaatttaggaaaaactcttcattaacctattaaaatataagatatctatgaatattattgagagtggaagacatcaaaacatatttatatatatatatatataaataaaatgagttttttcacttttacattttaaaacatttttttttatttttttttatttttacggaattctacataaaaactcttattgcaactagcactgcaacttaaattgcaacaaaaaatcgtatagaaaatcttattgcaactagtgctgcaactactttagaaattcaaaccgtaaattaaaaaaaaaaagtaaaaaaaacaatatatagagtaattctccaaaatataatgagtatattctttttttaaaaaaaaaaaaaataaataaaattgatttgtcaacaaaaattcagaaaggattgaaaaaggatatcaaggtaaatttagacaagagaaattgactaagcataatgtattaattaaaaatataaatatacaagaaatgtatattggaacaatctagaactataaaaatcatgtgtgataaatttaaaaagaacaaaaaaaaaataaataaaaaacaaacaaacgttggagatagatacgtaggtttttattgtcggcacccactcattattatacaacaaaaaaaatggttaaatcaatgaaaatgatgataataaaagtcggtctattaatagtaaaatatcaccaattatagaccacaataactattattttaatctcacaaactcacatggggttactaaagtagctacgtggccaattgaggtacgtccacgttatcatgccctttaatggtgggcccatccatttgatccattaaccaatcagaagcgtttgacaaattttggacggctgcagataattattacgtggatgctgaccttgtcttgttatactcttacataaattccattataataaataagttatttaatttttgtcgtattttacaaaaagaattatatgtaaagaggaggagtcaaagtcaaacactaagtaatatcatagtatatttattatgtaatgagtggaagcatatcattggttggaatatgaaagagaacaatatatataagtagttgtgttgtatgattctattaaggtaattaaggtaaggttatgtgtgaactatacattagttaattacatagttgaatttgtatcgagtagttgtattgaaattaattttcatattaattccaaaaattacttgaggtttattatgataataaaataatacattcggcttgaggtttattaaatctaagttgtttaatattcatagtatagatacattttattatacatttcaaattactttttttcatttaaaaaatcacccaaatttattcagtaattttttctttttcactagctcgttttttctttctctttctctggttctcaccaaactcaatcactgaaaccaccatcgaacatcggtgaccaccatccacaactctccttctctctggttctctctagtgtgtggccgacgaaccacgaccactaccgtcgaacggacagacaaataatttgtagtttctttatattttttgtttatttttttaataaaaattcgagttttgataaaatttgtgttatgggccatggtatcctaataaatatttcattttctttcctttccaacttattagtcataattcaagttcttaatatatattgtaggaaaactcaattgtcctctatgttcatgatcaaatgaaaaagcaaagtaagaaagtcaaatataaacatataaggcattatgaattgaatctaaagttgataatggagattaatgggaaaaaacaagaagttaatttaaaattaattgattcagatatttagatacggataatttaaaaattaaaaccatcacatcagtcaagaaataccaaaatcaaaacatgatacaaaccaattactaaaaagtagtacatgaaacagaattaagttgaaacacataaaaaataataagatcatttaaactagaaaaatgagattgtatatattgctacataacttatatgaggaatgcgtacaactcataatcatttggccatttgatataagcattcattctatggattctctctcagcactaacacattaattcataataacaataattaataaaagtgagtgaaaaccaacttgagttgcccttccttttctatcaaactcttatacatttacttactttttaataaataaattaattaatttgatatttttatatatattataaatttataattgttctaaatttcataaaagcttcaaaaattcctcttagagaataataatgaagaaaagactaattaatatatatacatttttttttttctatttttttttcaagttgcttctatgtgggtccacctctacaatgctaagcaccactagatactcaatagcaattctctatcttataatgctatatatatagacagagagatatgattttgtcccgtgatgtactttcacggaatgtattccgtagtacattagatgggt

SEQ ID NO: 116077 - DNA, 2517 bp, Cannabis sativa
  modified_base (27)..(27): a, c, t, g, unknown or other
atacttgtaagtagatctaagatcctngtaaaataatttccaacaattctcccctacctctatttctttctctggtaagagttatttatttattttttttcttgggttgatccttcctctttctcttcaataggaaaaagattcagttgcttctctcagattttttttttggtgctgttacgacctgatatatacgtccagcgctgcctccaaatccgactctggctccaccccttcttagcttggtcatctctttattatttatttatttatatttatgattggcagtcatttactgtgggtattaatataacaatttgtttagaaaattatctgcaatctattttattcatgattatatatatcccagttgttattaaatatatgaatgatactatttttgcgtttatcttcgttttcagcatatttttatggacaatttatatatcttttttgcatttgtctcaattttgataatgaatatatttatgatacaaaatgtaacttgcaaagaaaatggttaaaatcattcgtgattcttatgattttaatatccatgttgtttgacaattgtaattatattattttactcttttcatattgttgagtcatattaatgaacttcggaaaatttatcttccaattgttcatataatcaaatcattctcttatttttatttcaaaatgatcaaaatcttcaaatttgcctacatgtacaagttttttttttcttccttggcatgctgagtacacttttagaatgaattaaactactctgttgttgattgagtcgtaccttctgcataatcttatcttcctcctatttgctcaagctctaaaccaagacagagaagctaagggtttgtaataccgcaaagcttccaatcgtaggatcctaaaccattatcattgtctctactgcactatgattgcttgtaatattcttttctcacttatgcaaaccaattatttgtgaactttttaaatttattttcttctttgatttggtaatgtctttttagtgcatggtttgctgagtgtcaaacatatttcttatgattttgtcttaggggtttacaatgctatttattccaaagagtatgcaaagatatctcaatagtacaaaaggtagtgcaaagtggaattgacatgatgaatgatcttggttcatttgttgtctcatctgaaactggcacgataattctatataaaagtgacctgaattcactaaaaaatactcaaaaatttgaatatattaaatgtatatatatattgttagatgtgtttccatagaatttaagttgcacctaaagttttgatattttgttttgtaatactaatttggtcagtaatattctttggtaattaatatatgtttttcagtttaaggtctctctatttgttgtacaatttttgctagatgttgtgacaataatttcttttcatgtggttatgaactcatactaaaattgatcatgtatattttgtataaacaggggcctaggaagttcgaacataccaacatcttctaataaatatcggtaggcggaataaattcatagtcatttaagcacaatcaagtttagcattgtggtctgccaacttattttttgccttattatattttaactttttttatttgtggtttcaagaagtttatcgatctaccgtgtttactaatgattttttttttgttctttcatgtagtgttgaaatcaatcatcatactatacctctcaacaaagtatgattcagatgagagtttgcactgtgactagctaaacattttagcaacgtctccttactaaatatgcgttaaaataagtgtattagtgtgtatttatatgtaatgtacacttgacaattttgtttggagaaagctttaaaaaaatttttagtcaaaatattaatacacaggcaaagatatgtatgtttggattctatgtattaatattcaaattcattaataaatttgaaatttgatgcaataaatttgtattttaattttcttacagtttttttgagctgaaaaattggtatatataaattttaaataattatttatttttttctcaattaaaaattttaacatttcaattttaattaagcaacgctttcataaaaggtgttgctagacatatttttatatataaaaatagtattaaattttaaggaaaaggtaacacttgtaaagtgttgtcttaaaaatttacttttagtaacagtctaggaggcaacacttatataagtgtttcctttatttattttttagttaaataaaagtgttgcaaatgatattttttctagtagtgcccggaggtcacctccaagtcttgtgtttgaggctgggccgggtcgggactgtaagcctgagcaagggtagccaagagctcgtgcattggcttagctgcttcaagaaacaaacaaataagtgttagaacgttgacgagaaactgtacacacaagaacaaagcagtaaaactaatcctacccagacaatctaattcagccctagca

SEQ ID NO: 116078 - DNA, 4032 bp, Cannabis sativa
  modified_base (3982)..(3995): a, c, t, g, unknown or other
ttatgatgacttataagaaactgttaagtatcttgacatttttttctactaaaaaacaacatatattaaatatattaattacatgaagcctaattaatcaagttactgttttctaactatttgtttgaaaattgagatgttatgttacataatcatcattgccatttcaaaattttggtattttgttggaagggatactgttgattataaaaatgtaatggaaacttgaactaaggtatctcttgcagtgattcaaccaatgataccaaaaattgttatgctcaaatttttacttttgctttgattgattgtgtatcagatccttaaattttggagtactcatttgtatcaagtgctctggagtacatcgaagccttggtgttcatataacaaaggtatggctcttatcatacttttactttgattgattgtgtatcagattcttagattatgcttactataatcttgagagttataaagaggcctcaagagtgaccactgtattagtcttagattagtttagaatcaacatgtgaagcttttaagtgataattattagttacctataatcatttgggtttgttaaataccgattttcttggggtatttttctgttggaaataaaatggtctaagtttttaacccggactttgagggttgagtagatcatttcattttgttaatacttttttatttgaaagcaatggtggttgggccatatttagtatcatcttgctagttattcaagtgaaactctaaggcatagcaatgtaaaacaaaatcccaaatcactttttttcatcatagattaggtcagtctcttgtagctataattgtttttttacaatttagaaggggttaccttatgatttgatccaaattttatgttaggttctatcagtgaagctagatgaatggaatgctgaagaagtgggcaatttagtttccttgggaggaaacactgcaatcaacaatgtatatgaagcttgcatgcctgagaattttaggaaaccgaaatctgattcctctcccgaggagcgttctgagtttattaggtaaatcaaataaattagttgtcataactaaaacaacgacatttgttttagaaacataacggttttctaagaaaaatgtaattctttgaatactcaggaaaaaatacgagctgcaacaatttttgaccactgctgatcgcatgtcctgtccctttattccttctgataagaaatcatcagcctcatcaaataactcaccaggcaccggttctcttggccaagaaaagaaacattacgacaaacaggccactagacatcgtatcggacatgcatttcgtaacagctgggggagaagagacgactttaaggccactaagaaatataactcgtcatcggtaatgacttatttagtacttcatatatttggttattttagctctttgcatggatgcagttttagtcctttggtttttgttagctaagaaaaacaacttttctaccaatcttttctttatgaatagttaggtgtattttggcatcgaaacataatagagatacgcctcgctcgtattgaactatgggtgcaaaatactttcaaattctaaggaaaaaaaataagagatagtcttcagttaatcatattcttggtcttagagagcataataccttttactgtttttcattaatatgtataggaaagcatatgtgttggtttagaatgatttcttttcggggaaacataaagaagagaagcaagaaaatgtttgcatgaaatatttctttgaatttttagcataatatagcaagagatcttactgtcccagttatatttataggcaggtatggttgaatttgttggattgattaaggtgaatgtggtgaaaggcaccaacctagcgattcgagatgtgatgactagtgatccttatgtcatccttgcgcttggtcaccaagtgaggccctttcccttcactaatttcttttgtatagaaataatgttccaaattttgttatacataattttgttcttcttcttaataatgattgttgcagtcggtgaagacgcgagttataaagaacaaccttaatccagtctggaatgaaagtctcatgctgtcaattcctgaacaaattcctcctcttaaagtggtaagtttttataattattaaatctcaaatttcagtaactcatttattaaatgtgaaccatttttattaatttgcttgcaatctatggatactattagaatgcggaagtgtatggttgaggaagtaggtttaggtgagtgtatggtataaggcgtatggggttccatctcaaaaccaattagcaataggaggaatagctcatgcatcttatatttggtatttagtttctacacattatcaatgtggcactctctaacattcaccctcaagatggtggctattttttttactcaccaatcttacatgactcgatcacaagtggctcttttggctcacagtagctctttttggctcactatccccgaatcacaagcggttccttttggctcgtctttttggatctgttagtcattagaattttagtttggctctgataccatgttaaaatgcaaaagtgtgtgagtgtgttgtataaggtacatggggttccatctcaaaaccaattggcaatgagaggagtagtccatacatctaatgtatggtatttaattttcacgcattatcaatgtgggactctctaacagatactaaaccatttttcttttactttctcaaagtaagttgtggactaggcttttatttttatttttgtatggttaaatgcagctagtctatgacaaggataaattcaagaccgacgatttcatgggcgaggctgagattgacattcaacctctggttactgctgctaaagcctatgagaactcaacgatcgatgagtcaacacagctcggaaaatggatagctagcaaagacaacaccctagttaaagatggggtcatctacctaacagacggcaaagtaaagcaagaaattagtctccggctgcagaatgttgagaggggtgtactggagattgagcttgaatgtcttcctcttactcaatagctttacccgaacggttaaacgcctctcaactatcattgtaattatgactatgactagcaggagggaagttgatattcataccctgcaaagtgttaatacatatttatttttcattgtacattggtgtagtaatttgtttcatctatggaatatgatttctatgaaacttcactagaagatttgtagattaattttatttgttgtctgtttatgtaataaattttaaatttttgattatgtagagctcaaacaaaccagtcagccaaaaaaattatctttggtgtgttatttgttatagttagacatagttcaagttttaccaaacttgaactagagaaaatacttgtcaaaatgaatgttcaacaaaggaactaagatttactcttagcaaaagcggtttctaccttaaatgttagaacaaatgaaatagttcaaagttgatcaatagtgttgtaaaagtagatttgtaccttttttttttttgttaattcagtacttacaacacgtgtatattagtttataagtgcttctctattctttaaaaaacatcattgcacttttagtaggtatgtcacatctttttatttattttaaggggtcgtttagtaggttgtataaaaattgtattgtattaaataacaaatagcactacatttaaataaaatattatattgtattaattattacgatcataaattttaatacaatatgaattgtattatttaatacataacaaatgatctgtattaacttgtattataatatttacaaagaattcaagattggacaccctgccccagattctagacccaaacttggacgagaaccctgaaccctggacctcgaccccgacctcggacccaaatccttgttggaatttattttaccannnnnnnnnnnnnnctcacaagtatgttgtttaacaccttaaatatgaact

SEQ ID NO: 116079 - DNA, 3355 bp, Cannabis sativa
agagtaagagattcagtaacttcagcctgagaaaaaaaccaaccatgtgccaaatagctaatgcacagacaaccctattatctcgaataactatactcataccacaaaaacctcctgtcacatctaacgtcgcatcaacgttaaccttaaaagtaaccaatcttaggaggtactccaaggcacaagaatagctaatttgacttgagagatttgtagtgggttcataaaaaagtagataaaggtaataaaatcactgcaaatagctaaaggatcaccgagatcaaattcacaaagtttttagcactataaaagagttgaacatccctacaaagcgtgattagtggtttcctcttgggcatcgcacaaggggcgaagaccaacagtcaacataccatgcttactcaaattaaacttggaaggtattcaattgtttacaatttaccaagaaaacattttaacttttggaggaatattgagacttaaaaacttcttccaccatctcgagaagccatgagactgagtaggtctatcactttccaaacaacgagaaacaaaccagcaacactcttaacagagtaaaaatctaatggatcatggtcctagatcaatttatcattagttggagaagagggccaagggatagaaagtatggtagaggtttcattaggagaaaataaacgatgaaccaaattcccatcccaactgcccaaattagatctccataaatccattgtgcttcaaaccccaagtaaattaggagagaaaattaagaaaccaacatctaacgggatctaattatctttataaataacaatatctttaccataccctactttctaaatttttcctaatcaaataatttcttaccccacagaatgttcttccaaatataaaaacctcttttagaagatttaatagttttaaaaggtttatttctataatacaaacttttttaaaatcaaagttgccaaagaaggatcatgataaagcctccaagcttttttagccaataatgcttgattgaaaagatgtagatctagaaaatctatactgtcatcctctttgtgccaacataatttgttcaatgtacaccaatgagttttcatcttgacgtcatcacccccactaaaatcttacacacatgcgatgaacatttttaacaaaacgtttaggaagtttgaaaagagacatagtatatgttgaaatagattgaatgactgctttaataagaatctctctacccatcatagaaaaagatttaaccttccaaccatttaactttttccaagtgcgatcctgaatggaattaaacatttctgatttagttgcccctacacaacaaggaaggcccaaatactttttatggcactccaccccaacaaccccaagagaagtaaccatactaatcttatctgccacaggaacattcaagctaaaacagacaaccgacttctaaagaattcacattctgactcaaagcaacaccataaaaggagagtaggagtttgaatctttcacaagccaaaactgaagcattcagaaagaacaaactgtcatcaaaaaataagataagtcaataatttgccctgaatgaccacatgaaattccacacaagagattattatcacaatcccgattcaccaaagtcgtcaagcctttagcacataatgagaataagtaaggggacataggatcaccctagtggaggccctttaaggatatttagtaccataaataccaccattcaaaagaaccaaatattccactgaatagatatactccatgaccttaccaatccaaacatcatggaagtataacttttgcataataatttctacaaaagaccactccactgagtcataagctttggacatctcaagtttgatagcatagtaccaaccattactgtgtttcttctcttttagcatattaatacactcagccaattaaagcattgttggtaatcaatctaccaagtaagaaagcacttttctcaataaaaatgacatcagataacacttccctcattctattagtcattgctttagtaagaatcttataaagcacattgtaaagactaatatgatgataattagaaggcctagcaggcgaatcagtttttgaaataaggcatagaagagttttattattacctttaagacttatttgtccattcaaaaaggtcagggccgctgcagtgacatcgttgcccaccttgtgctaattttcctgataataatatcacactcactttcaaaagcctaagcattctcataatgaaaacaagattgatataaaattttattaccaaaacgaccattaacagttgacaacacaataggtctatggtctgaaaaaagacaaatgagaaatatgtgaatcaggaaaaaaatttatccaagaagaattacaaacaaagagatccatcctttgttggacaaaagaagcgccttgatgcttgttgaatcaagtgaatttaggtccttcaaacctcatgtctctaaaaaaataatcctccaaagcttttcaaaaattatgcattaaaaactgaggctggaaggtacctccatccttatcagagttggacaaaatttcattccaatcccctcaacaaacccagggataagaattattgcgagcaattcttctaagtaaagtccagaagagatgtctcaaagaggaattgggtcgatcacagatccccgtgaaccgccaaggagtaaaataaaaaatgtgaattaacacatcaatgtgaccccgagagaaagaaaagagagatatatccaccttttttaaccaaaagaaacacatgccaccacttctaccaactttgtccttcaacaactctccagcaaaaccccaaacaaatgcgaagaagttccattagctttagtaccaagagttttagaaataaataaaatatatgggttcacctctcaaaaattggcatggagagctcggtgttaaccaaagataggtttctaaaagggggggggggggaattgaaaattttaactaattttgaaaatttaaaaaccccaaagacaatttatgcaaatatttaaatttaatgcaatcacatagataaacataagtataaacaaataataaacttaaaatgtaaggagtttagggacacaaattgcaaactctcaatttttacaaggctcggtagaactaaaccacctacgcccttggtcttcaaagctatggacctagctttgagttcaattattgagccaaattaacaagcttgactaactcttacaactggggattttttcaccaaggttttttccaaacctctcaagatagttttcttccaaggactatcaactagggttgtacatcggtc

SEQ ID NO: 116080 - DNA, 2451 bp, Cannabis sativa
aaaatataaaaaaatctacacttaatacaaatatcgaatgcactataaacaaaatagtacgaattagatcagatgaacacccctatataaaactatgttaaacatgacctactatcttaataatttattttattttaatttgatgattttcatagtcttcagcatgtaactaggaatgaagaaccttacaaaaataacaataacaataacaataattaaacggtagaaatgaagaattctataaaataaatcattcttaattttcaaaagaaaataaaaaaaaaaccacacatgatcatacatcacacaatttaatttataaaaacaagtgaagccaaagtgtttaattagatcccatttagattaagaaagtcaagaaccatttgagtattctttattttcatacaagtccatgcatacaatacaaaacaaatttataatccaagtgaaatggaccaaggttattttctctaagtagagacctcatatccttttgggaatggaggagtgttggcaaatttccaagatattttatgtataatctcatgttctctaccacctgcaacctcttcaactggcacagcatcagatatttctttcaggtcttgttctgttagtttcacactcactgagccaatattatcatccaagttcctaatcttagttgtccctgaagaatttaaaaccaggcacgtttagattctagctcagagacttaacacatattagactttagtccaactaggaaaggactcattggaaagcactcaccagggataggtacaacatcattcccttgttgaagaacccaagcaagagctagttgagctggagaacattggtgctttcttgaaagggtttcgattcgatcataaagctgtttgttcttgctcaagttctctctttgaaaccgagggtgtgaagcctatagccataacaaaaatcattggaagttcaaacgcttatgacatttatgctaaaatcactttgtattagaattgacttaacaaagacaactttttttttataccaaaagtccatctcccagctcattttcattgattgctttactcccaaagaagccacgccctagaggactatatggaactattccgatgcctagttccctgcataaaaatggtgtcaaatgttaaattatgaagctattttatttataaaggagaatggatacaagaaaaatcagtaacaaatcaagaacaagaacacaaggcactcaaataacaactgataaacaataaggaacatgaactaacaaaataactacttacaaggcttaacattacaatttagaataaaagcaggcatttcataatctaatctaaacaagcaaacctgcaaaggggaatgatctcttcctcaatatcacgactccaaagcgaccactccatttgtaaggcagtgatggggtgaacaacatgtgcccttcttatggtgtctgggctggcctcagatagcccaatgtactttattttcccctcttccacaagcttcttaagctcacccatctacactccaaacacacataacacaattataaactcttcgagctaaataggatatcttaatgaaatttacaaatgaagtagtaagaaaatgaatcactgacagtgtcttctatgggcactgatgtgtcaactctatgctgaaaatacaagtcaatataatcaacatcaagacgcttcaagctagcctcacagcatgaccgtacatattcaggggtacctctcactatcactgaaagggtttctctgtccagtccagctataccaaactttgtagataattgtactttttctcttggtaactgttttaaggcctaaaacatcacaagaatacatttttaacacactaaagcctcaattacattcttgctgggacaataatatagctttaacacatgatggaaccaaattgcacacctttccaactagaacttcattagcagagtcttcaccataagcgtcagcagtgtcaaagaaagtgatgcctttgctaaatgcatgttttatcaccaaaattccttcctcttcagaaacaggagctttataaactccattcagattcatacatccaaatcccaactttgacacctgtgagtaagattaaaaaaaggttaaaaaaaattgtaagaatttccacatggaaagtcaaacaaatatgaaatgtacacaaatatggatgaaaataaattgagagagaagaaattgaaatggaatttttacctccagtccttgattgcccagtttaactcttggaatctggagcttgttatcatcacccatctttcaaaattcaaagttcttttgtcaaaacgttagtataagtaggaagactgacgaagcaaaggactgtcatttgtcgttgcaggccaggtagatttacgaaaaaagacatatagagagagaaagaaataagaaaaaaaaaaaaaaa

SEQ ID NO: 116081 - DNA, 2228 bp, Cannabis sativa
ttgacatccaaacacaccttgtattttaaaatacaatgtaattactatacagtgtaattagtaccctagtaattacactacatagtaattacacagttgtttccaaacaaacccttatatgcgtatgtagaatgtcacaaacctcaaaagctaaagttgtatgttcttattaaactaatattttgtcttcttaatatatatctcataaactaaggcattttatatagcatagtgtttccaaccttatcggatgatggtgaccaattttgatcttctgttgatcaattttctgttgacaaaggcaagatccaaactccctgattggtcatcatctcaatgtctttccaatctttttgaaagaaagtaagatgatggtatggaagtgtttgtactttttgagaatataagtgtggagtgttaactttctgcactttctctcgttttttcacctctacttatgctactcttggtgattccatcattctacttccttagtaggctcacactctcttctctatcctattatgtttgggcttgtgaactattaaagcaacttagcaatggcccagttagtagatataaatatcattgtccacatatatgtttatttcttttatcattgggcttgtgtaaataaattatacactgagaattttggttatgaattgacaattatattgaattgtttgatatgtgtgcacattgataaattttttcttagttattattaattacatgtatgatctttataccaatttactttaataaatccaattagtgcgcattctttataccagatcttgcataattcatagcatagaggataataatcttcattcataataagctatccgagtggagttgtacatagcaaaagatcatcctttcttctagagaagaagtacatcaaatacacaaaattatccactgtactaaatacaggcatgtttcatatatagtgcatcattatatagtcatattgttaatttaggagacatttttttagaagtaggtgatttcttttattaagattagttgcatatctatttgtctccaaaccattgatttagtcatcaatggtgatgacctcagttgggtctttggcatgtgcagcatgcacccaaatgtccccactaattgtttgcattccattgggaatgatactagattgatcaagtagttgacgaatcttgaagttgattgtcctaacatcaagagcagagcatcacaaattctcagatttattggagacattgtgctgtaggaatttgaacttcaaaagctgagcatctcggcgtaagcaacctttgcattttccacttttttggagatttaagcttctttaacttctgtggacttcctgatggtgaagtgggttcttttttaggcattagcataaatgttggtgattgaggttctaccttcacaatgggagaatttggtgtgacaggggagggagacctctccacaggttgagatggggggtataaagttggatattcattaggcaaaacatcttttgaatcagaagattcttgtttaataagctttggaggaaaaagaacttgtgatagggtagacatttatgcattaaactgaattctttgatgagaaaaatatgtgctaggtgtgtgatgcaatgagaagttgtttgtgtatttatagtggtttgatctgtcataatttgggattgttcctatatattctttgtgcacatgtagagtgaattgtttttattcaacagaatgttggtgagttgtgtatgtgtgattttcacatgtgttaattttgttgaaggaaaaagtacacgtgtttgattgaaaccaatcattggactcaagaatggatattcattctttaatggtgaactttgcatttccaattaaccaatctagtttaaattgaaggagatactggaaatctctgtttcatttgaactattttagtacctgtcacagattacccttatggggaagcatggcaaaaactcgggccctttattctctaagcaaggacagaagcagtagggtatggttcacctactccatgaattatgctggtgccatatctctttctgtagtttctcagtgtcctccttattttaaggtactattatacttgttgttgacgcggtttttcgtcaacggatctaagaagatcgtaaaacgagcaagatgaacacaagcaatagttaatcaaagtaaaccggtttgcaaaaagaaattcac

SEQ ID NO: 116082 - DNA, 1674 bp, Cannabis sativa
tctcaaataagcccttgcttagtgaaattcataaataagacatagaattctaatcgattaataaaattaattaattgagtcaacaagacaaaattatctcaactaatatgaggaccatgaacctatatcatcaagctcccaacaagtaattctagaatttacattttattaattcttcttgacttcactatagattcggaatcacactcctaattatatagaatgttctataccaagttgtttcaatctgaataatcaatgatcctttattaataatttacatcgagtagggagaattttaccgttttaccctttaatgtattttatccttaaattcttagctacttgtaaatgatattctagtaaactaatataattactgaaatgtgtacttcaccatttaaacccgtttagccaagctctaagagaactatcgtttcactccagcttggtggacacttgcaagaatgtttataaaacgacctctaatatggtccatcatagaaaacccccacggacacctcacgggggaaatttcaagaaacacccgaaccaaaggtatgaatatcacagagagattaacattccaccaataattgcaagcatctgaaagatatcgagatgctagttagagtaggccatcttgggcaatgagttcgaattcccatcatatatctcagacaggtgattattcccgaacagtagggtaccataaatctttcgcagggggtaggtcaccctcaattctcaagaatgcagcttccaacactccctcctcctctagctccgactgcgataactatatcgtacgtggctccagaactcatatcctccagggctagctccaccaccagtttacggacatgtagcaacgatttcaggtggactgcacctcgtaggaagcactaggaactctcagaaaaggtacttaaaagagctagacggggaaggagaaaaatgcacgttagtacagtctcctacccaatgtcctcggataatgagtttgcctatcaccttcacagaataggacgcccgacacttgcaaataaaagggtatctaggatcctagtggattaaaatacaactactcactttcaattcacatagattgtaactgttatgtctaatattttgtaattgaattggatttgactgattcagtgtaattggatcgatttagtgtaattagatcacaaatcagatcacaatctttattgagggttaggaagagaaagttttgatgttagagtaaaaatatttgattacaattagatttagtgtatcattatactttattttgcaaaacactatacgcaaattatagtttaactaaatagagagaacgaccaataattttaaaatacataaccaaaatttatatttactattatataaccgcgcgaagcggaactatatttattagtatccaataatctaaaactaaaaatatcgatagtcataaattcttaatcaataaatatttcccttacgtggccatagacatttttttttaagaaaagcgtgcaatatattagcataaatcagttagacctgtcggtcattataaaaaatattgtcgggcaaggaggtcggaggcaaagtaccaaacctttgatgggaaaaagcccacttggccacattatgggccgtaaaattacaaagtctactaacatg

SEQ ID NO: 116083 - DNA, 1159 bp, Cannabis sativa
  modified_base (36)..(43): a, c, t, g, unknown or other
tgtgtttaaattctattgttttagaaattcatattnnnnnnnntaaacaacatacatggtagtaaatttagatgctggtaaaataatctccaacactttcaaagcaaggtatttgatgctccggacagcaaagggacgttcaatcagtcacatcgaatcaagggtaaaagtcaaacatgtgtcacccatttgatcagatcatgactgaataagtccacgtgcaaccaagaagctcccgcgcagactggggggctaatgttatccaaatttctatacaaggtcacatcgtatccatttgggtgacacatgggctagattttgtgacttgggcagaagatttttctcacaaggaaccgtgcagagagatctaatgctcatagtgaggagttgaatgtccgaacagcatgcaagaacacccgaccagcttccaccacgtacgtggctcgcatacacccaagtttgagattcggtgtcagggtacgaggtaagtgttggggctaacacccaagtttaggaaatggatttctcaattttttaaaacatttaggtaatatattgttatcggtatctataatcaatgcctattcaaccttcgcagaactgggtggaataggcatcgttggaaaatactcgaatatgtctattcccaacagtttaatatcattggctatagtgagccactcgacgattttaaattgtcacattaaaaaaatatagatctggtcagaacaaaacaactctgaccaaatttaaaataccaaacaatctacaaataataaaaaaaaatatatataatcaaaaacaatctacaaactcaaaatataatattaatttgatattctaaacataaataaacaatcacgataacacaaacacaactagaatttatgaagaaaaaaaatcagatctcaagatcctcgaagcaccgttgtccacctctgctaccaccacctgagaaaaaaagaaaggaggagatgagagagagcttgagaatgagaatagaagaagtgtaccgttgtgtgcaagatctcttgaaaatttgagttcggtgtgggtcttcgacgagagggagaagagacggtggtgacggtagggttcttcaacgagagggaggatgagaggtggcggcgatgtggtcatcgagagagagagagagaga

SEQ ID NO: 116084 - DNA, 2063 bp, Cannabis sativa
  modified_base (47)..(49): a, c, t, g, unknown or other
taacaaaatacagggtccaatctgtaatttttgcaaaacacagggtnnnaaatagtatttaccctttaaaataatatttacccaaacttttatttacctaagaccaaattttatgctaaatttggtacaaaatttactgtatgctaaatttaactaactttttagtacactattaaagtatattttttattaaatgcattatattttaactttttactatttatttatacagagatgctctaactgaaatattctacctataaagaataaaataattaattacttttttattattccccaaattcccgacccccaagaaaactgaaacgtagcaaagcttcaattaaaataataataatagaggggtaaaatcgtcatttcgaatggcgatgatgatgatgatacatggtatacatggtacatgatagaggatggggcatgtggatatggggatatgagagtggatctagatatattccaggcatgtgattgggccacgtgtcagtcaagctagatttgactgttgtggatcaagagcttctctcctattggtggatagatcatgaaaatatctaagagctgttgggtgcgtcttttgccagatatttatgtcctgaccgtaattgctgcccgatccttcccagccactaattacctctcaacatggttcccgggcagacctgcccgttcttgcaacgtggatgaattcgcgatcatcagagatgcttgcctcgattaccacgttaggctctctcatatttccaccaactgctgctaccttacatttattaatttaattaatttaatcattattcatcagatttgccacacgtagttttaattgtaatcaacggccacgattcagacacatcattctcatatgtttcaaatgaaaaataggtcatcttatagattaatttttgacaaaaacacttaaaaatttaactgtaaataaatatttaaaatttaatttttactacaaatatacataataactaattaaattgaacccttaacatgcttttataatcagaataattaattagaaaaataaatccattttaaaataatcaaaaataatattttattatgctattttcttaacttttcgaaaagaaaatcacaatcatattattttgtttacataaataggaaagataatcagaatgctttaatttgataaaattgttattattacaacatggaatcattttctgtttatagatttaaaggacataaaattaaaattaaaataaactaagttaggaaagagaaaaatatttcttataaaaatgggagtataacatttctctttattttctcaagtgtggacctcattacattctctttttctaaaatttagtaaacaattgtatgagaatcaatatcataccattgattcttatttcctttaagtaaacatgtcataagagtaatattatgtctataaatactatcttttattacaaattatatgtaataactaactaaattgcatatatattttttttcattttttagggaggacgactgccccgcctcgcttttatgtggtccgccctacctggtcgttacgtgtcaagttattatctacgtgttattttcttattagtatatttgaattaatttttatataaaaaataaaaatttaatgacctggatcaatcaagtactgtcatgtggtcattaacttaacacttaatgaccatgtacctatcgaagtttcaaaaatataacttagttattattatcgtcaaaaattaaatttaaatatttatctacaacaagaacataaacttagaatttataccgcaaattaatcttaattataaataatttggtttagcatctttaaattcaatatacattattataattacaaacaatattacaatcttttttaattttatttacaatttaacacagcaatatcaatagagatcaatggagagtaaaattttagggtaaataccattttagatttcgtattttgtaaaagttacagattggaccatttttttttgttaaatgacaaaatagattctgtattttctaaaatagta

SEQ ID NO: 116085 - DNA, 1857 bp, Cannabis sativa
  modified_base (759)..(759): a, c, t, g, unknown or other
aattaatctaaaataaataatattgatatttatatatatttaaattaatctaaaataaataatattaatatttatatatttataaaattaattatattaacaccgttaaattcaacagaatattaattttctgttaaactaacaaaaactgttaaataaccacatttcatatataaaaatatattcgtcatatatgtaattgattgccatcaaaattattaaaaaaataattatgttgcatgtcctttatacataatttgttaattattattttttaataaaaataaaaataataaagtttctagccatcattacaaaaattcttactcttagtctataataaaatttgtaactaaaagtaaaaattgtgactaattataaatcatcattcttatattatcactaaaagatctttagctaaatgtattagtcacaaaaatatcaatttgttgtgactaaatgtgtttttagttacaatacttgttaaaacaaaattaattgtatcgaaacgcactcttcgagttagtgccaaactccaaatgcactcttcgagacagtaccaatctcctaataaaaatattcctaattgtaattcatttccattcattttttttgatcatttgtgaaatgtcattacatatttatactagctatataatattaataatttactaattaatccttataactttttatgtaacatttgttgttgactaaaactaaattagtgataatttgtatttaaatattatgttttantcacaagtaattttttattgtaattaaaagttacaaaaaatttatattgcgattaaaaaattgtcactaaaagtaacttttatgttgcaacacattgaatattgttggtattagctagatgtatatataaacaaaatttacctgaatttcaagaacaaggttgtggcctctaaaagcaaaggcaataataccaaatgcattgagaatttcgaaaagcctagccacatttgatttggcattctcaagtggttcataggacacaccattggttctgcctttgcttaatgtgaatacccaaatcattgttgagtagcttatggctgtaatagctccaatcaatgaaaccccagctattgaattgaggtttggaagctgagcaataagagtagctatacaagtaaaaaccaagtaccattctatggtcgttaagtttttcacattgcatgtttcatggcacaccagctcaaaaaatatcttcatggtaccacctccgatcataatcagcgttacgcatgtgccaccagataaatacattattggaaaaagggttactaatttccctatcttctcacctgttcatcatcatcagccaacaataaatgttagaaggggcaaataaatattttttctacaaaaaggatctattaataaaaaaaaatattttataaaaaagaaaaatataaatttttggaggacataaataaatatgtgagaataaaaataattttttttatagaataactatgaaaatatgtgaaatacaaatgaaaattataattttacaaaaacagaaataaaaatatatgagtaaaaatgaatattttcattttgtacaggcatatataaaaatatataaaaaaattatacagcccccacatgacatgaccccactcccctacgtccccattcatcattgtcgtcttaataattaagatttaatttagtttgtttaataaatgtattctagtatatctcactaattaaattaaaataatataaaatgtccactaaggtcaactgtaatagggaacttaaatttagtgttaaatctacattaaaaggatattatttcaatactaattttttttttaattccaa

SEQ ID NO: 116086 - DNA, 2672 bp, Cannabis sativa
attcttgattatcaaaatttgaatcgaattgaaaactccattatttttaacttattgtttgcttttaattattttgttcaggacaaaggctgatggaggtagtggtctttctcatgtggaatgagaaatatattatatatatatatatatgtctacattttatggtattaataattagatatatgatatgaccaaaatgagctatgtttttggctatgaattcagtaccagaagcaattatcaagtcctgttgtcctgtattattcagcacagagtttacaactaaatagaaactacatgggttttttttttttttcttacctcaattatccatttattttgttttcaatttttgtatgaaaaaaacttttgataacaaaaaaaaaaatgaaaggaaatgattttgaaattgacttattaaataaagagaataatagatagagtacccatttcactatcttaattctcctcatttgtaatcgcaagattcctcatgtaggcatctatctttctcatgcatacatgcaacaaatcaatatatccttatttgctattaattaatcaaaaaattattatgtattatttaaaataaaatccatagagttcaatcttacaatctttgtacattctaaatttatcactcaaaaaatctcccaatcttggaatatgaagaatttcatatgaataattatacaaggacaacaataaattatagaaattctcgacaaacgcaacatataaaacaataaaattacaaaattcaaatgttacgagctcaaaatgagaagaaaaaaaattacacatgactccatatcaaagaaaataaaattttatgtaaaaatttaaacttgaaaacggatccaatcctacgcgagcattttcaaaatgaacaaatcaagattttgaaaagatctcaagagggctaagtatataatagtattgatgtgtaaaaacttccaataatatcacatttgagtacttagtattctggtttgtttcatctaatacaaaatttaataaatccatacacataatgtttagaaaattcgaaatttttaagtgtgggaaatatcacattatataaaattgttgttgaatacattttataattttattattaattaatattattatgagatcaaataattaaggaataatacaggacaagaagaggaattgaaagcaaaaaacataactcattttggtcatcataatatatctaattattaacaatttaacataaaatatagccatatttttttccctcattattctaataaattttatttatgccatatatttttttaattataaaaagtacaaaacataacttttttttaaagcaaaacttcataataaaataatatgtataaaacaacaatatacacagcagtagtgatagtcatacataataaattcgataaggaaagccttcccatttatcaagctcaacaacataaggatacttgcaactcttactactctttttctttccattattattagtacccgaattcgaaaaagacttgacaaaagcttgctttactttcttcaccttactataaaatctcgaaacctttgactttgacttactcgaaacattatcttttttgagtttcggagttgcttggtaaaattttggtggtgggctccaaaaagagtttgaataataggaggaagaggagtatgagcttgaatagtgtgaaggggtagaattagttgaactgaaaaagaaaccatgatcaaattctaacttggattttgtctcttccatcatacaatacaatttttatatctatatagagcaagagagagagagatattaaactataacaaagaaattgggaatgaaagaaaaactgtgtgtgtatatatagtgttggaatgaatgtgaatatgacttggaattttaaattgatagtgaagtgagctatttttgcttattaccttaatttcggacataatttgtgttaatagttaataataacttaaatatggtatgatattagtatattacatattatgggttttgttttctcatataataaattaaccaaattatatatttatatacatatattgggggaatgcaattgattatattatatatggtattccatcttttattatgcattaatgttaattcatttttcacctattgatcaaatcaaatttttataataaatgtttttattatggtcaacctcgtttttaggtattagtctatggggtacgtacgtagttgttttttatttatataattaattattatttgtaatagatgataatatatattatatatataaattcttaccttttataactctcttacttttttgccattttttaaatgtctattcatatcaatatattatgtaatctttttccgatgatggtgctgtttttttttttttttttttgataaaccgatgatggtggtgttaattaattaatgttattacatatgtttattcattattttataatattataatggacattatattcataatgagtatggttttttcaacaataaacaaaattttattgaaaaaaaatgttgagtacatttgttgagaattatggggttccatctcaaaaccaattggcaatgagttggctcaatacttttacatttaatccatgtgggacaatgttctccaatatccccc

SEQ ID NO: 116087 - DNA, 705 bp, Cannabis sativa
tggcattgctaaaatcgtgggccagaaagaagaaaatgctatattcacaaaattcgaaatctttaataattttttaataaagaaaatgagaaataattatgaatgcttctttaataataacaataattatgataaatgaaatcttttgaagaaagaaaatctcaaaaattaaaaataaagacacatttaacagaaaaattaccttatctttagagctagaagcactccactcaacaccccaatttacagtctatagtaattgaaactataaagagataaattttacacacatttatacacgtataagggattgaatgccatatgccaaaatcattatgaagaaaaatgtaacggaaaccaatgtgtcagaaaaaaaacttattattgtaacagaaaggaatattgggtcaaacaaagactcaaacgtagtgaattgacaaatattagggcaagaagaggaggaaagagagtttaccagtaacacattgatagagtgaggtttgattatgggtcaccttcaccaccaccgacgatgatggtgattggcgagtttaggaaaatcactaaaacacgcaagttatcaaccttccattatcaccgcagcacacaaagtctcagaacttacttccctatggatgaatatataagatattcaaactcttctactgaattatatgtaatataacaattatataaaatatacct

SEQ ID NO: 116088 - DNA, 3010 bp, Cannabis sativa
  modified_base (2444)..(2445): a, c, t, g, unknown or other
actgatccgatccgaatgaatggatctttttgccatgcctaacgaggtatatgtgagaatctctgacatttatcacatttcttgacaaattcgtaggtgtccttatttatagttggctactaatatccttgtcgaataatcgttttttataagctttgccaacctgcatggtccccaaaaaagccttcatcgatttctctgatgatctcgtttgtttctgcgggaagaacacaccgtaggagaggcattgaatagcccccttctatataatttgccttctacaattgtgtagcgaggtattgaatacaaaagttttcgtgcctcgtttttgtcagttggaagttgtccgtcgagaagctagttgactatgggtgtcatccaggcagacgagctatctatcatctcgacttcttctttctcatatatacttggctcgtttaacatctccactggaaccaaattcagttcatccaattcattctgcaaggctagttttgctaaggcatcgacattagagttttgttctcttggtatttgttcgattttgaaataatcaaacttttccaagttttttcgaatcttctctaagtatttttccattttaagcccttagcctggtattcccctagtatttaatttacattcattcacgtatggcatataagatttttaactttcaacacttcagttatctttaaactagcgatcaaggcttataaagagcattttttctcactaaattataccaaataactttattttttttagatctttgtatgtaaataagtggcaattaatcaaaactaaaaaacacaataacaaatcatgagagcggtaaatattttttaggtacatatataattgccttccaacacaccatttagaaaacagaatcgatcataattatgttgataatttttatcctacattacatataaaaaagaggtatatatagtaagattcaaacagagaaataattttttattaaataattaacataatgatttttttttttattgagttatcaaattatatatcccatctttgaattcaaagtcataatcattaaacattgcaagtggagaaagcctccaaaaccaccatctccatacccacttgcttaacccacccaccccgtaaaaccttctctttcatcaaaagttcaaactaacatgataaactagagtaacctaatatcattttggacacttatttagctcatttaattctaatttaaaattagctagtatatttttatatataatatatttatatttgtatgtatatacatattgcatagtcgtagttacataaccacgtgaatgctgacataaacatacatatattatgtatgtatatatacatacttggtttatactaaaacaataatatgtttcaattttaggttcaaatattgtagcaaatctttgtcaatattgtaacttgtattattaatttttttcttgaacaattgttttattaaaatttagaccaaccatacatatatatcaatatgcttattagtataatattaagcttcattttgctaattgacgctctgtttaataatgtgaaaagatatcacaatcttggactcaaccttcaatgattctttatatatagacgtacaaattaatgcattggactagactatttgaagatataatattttaagcaccggaaacacatgaattatacatctacgtattttcaataatgactttagaccaaaaaaaaatatattgtttaattgttttagttcctctagaaaaattatgatggcatgcggcattgactcatcaacttgaagtatataatattgttgctttggatccttaaataatctttttcattattatatgtatatattaattaatgagaaggggtatgttttataattttcaaatctttttattttattttatttgttactatttctattgagggtgctgtgatttttatggatggtattagtggatttttacttattacatttgtggacaatcatttgggtttgatggaaccgtgttttctgactaattcattaaatgacttacgatgccatccacttcagattaaacaatttgtttaaggaaaggaaaaaaaaaagagccaaataatataaataaatatcgtaatggacatcaatctctgtcatcagttaatatataattaattacatcagtttaagttagctaatcattattgctaattaaaatgatataattatatggagagaacaccatatacgccataataattacagttaattatgagattaaaggcgaaggccgatctacctagctaccactgtttaggtcctctcataagatccagcaactggttttagtttcactttagttatcttttaagctaagaagaattaaatgatttgattaaataaagagaataatgatcaaacatggatatatatatatatatanntatatatatttatatatatgcatacaaaaatatgtctatacattcactaccacaaaagccactcgacagtcctaaaaattcgttttttaaaggaccgtcgctaaaaaaattaaatgagtgtttaaaatcgtcagaaaaaattagatatacccgacagtcttaaacactcgtgatgtattcctgacagtttttaaatgtgccttaaaaattgcaaaattttttttaaaagaaaattgctgactataggccacggttttaaatcgtcgagaattagtttaaatttaaaaattttcaaataacccgttttttctcgctccaatataacgcattttagatctaaattttttcaagtctataaattttcaaaacggcggtctatcactctttctcatcgacggtggtccatgagctccatcactctctcatctcaaatctctcgctctctctttctcgctttctctttgacgagctccaccaaagactaaagcacgttcaagctccaccatggtcggccacgaccacgagctccaccacgagaaccaccgttctctctctctctctctct

SEQ ID NO: 116089 - DNA, 2423 bp, Cannabis sativa
gagtttttatgaatgcaaaaaaaaaaaaaaaactgatttaaagtgtaaaaatgaaaaagcccctaagttttatttattagacttttattttgttttatacttttattagtatttaataagaataataatgtttatgatagcggtattatcttaaatatatatttatggtaatatataatcttctgttctgactatattacatttaattttattataaatatgagtattaataatatttattagtacgaatctttttttaaataggttcttataatggtaatttattttttgatacattattattatttattatctttgggttatttcctcttaaatatttattttttggtgcaattattttggctaattttaatacgtgaataagtttatttccttttaggttttttcctcatagatttatttcttactttcatggttgttatattattttcttgtaaatttattacttggccattaatttattaagctaatttttcgatatttaattgatattgtcagctattactataatttcgagcgatttttttgttaattaattttgtaaactcttttaatatgttattgcctctttaaaattagattacattttataattattattgttgttagtttgtgccttatttttatagtttgtgccatattttttggttagtttgtaccattttatttggcttcttgtgtcatattatttggctattttactctatattgttggctcgtttgatagtgaatacaacctcaaagagtgctactacaaattttcacagataagttttaaatcttacttttaattatatttaataattttgaggaatttacttttttttttttattttattttatatcattaattttatcatttttgctagctaattgagtttgttatcttgtttagcaaaatagttaattttagttgagatttgatttattaaattgattaatctctcaaatttatgtatggtgcagatttaatcgactagtgtatttctaccttagaagactttgctctaatagttggacataataaattagtttctatataatggtgacatgctgagtgaaaaaagacttcaaagataagttttctcgttaaaataataattgtgttttattcttaatttaaaaatttacattattatcgttgtatagtgtgctaatccacatttttatatctatctattttgtaggtagttttggtccaattggttgtttatatcagatgcctcttgaaggtgatctcaagttgttttgtctaaattttcgagataactcggtcttatataagttgctttgcttggagagactcatattctgactttgtatatctttggctagacaattagcttgttgactggaagctcctccgcgtcgacgattgtcatagtgtgattcaaatcactctctaaaaaaaatgtaaccatgataattacaataaaaatataaccattaagtagtcacccatttataaatatattacttattcttcattttttttgaatgtagcctaatgcaattacatatcaactaatagcttaggaatcttaagttcaaactgacatcctcttcttttttcccacccctccctcagtctaagttagtcttagtgacttgacttattcttcaaatcattacatcatatatttaactaataaataattatataaattttagcactaattttttaattttattaacagaaaaattaaaaataaaaataattattgcagcaagaagttttcaaagaaacaaattttctttgttatgcatacattataacattgaacaattaaataaataatgcaaaataatgcatgcaactacaacaataataataataataataataagttatgattatataaaattgaatataaattttgtcaaaaaatacataataaatggacaaaaatttttacactaaaaaaatatctaaatagtctcatctaaatttaatgtagtgtatgacaacttttgataatatgagatatttcaaacgtactaaacgatcgaattgttactcttgtaaggacatgatttattttatttaatttttaaattaatttgattattttaaacaataatatatagaacaatttttatattataaaaatttaaagcttgaaattatcgtggtggaaagtcttacatttttcattattaatatatatatatatatattgatggttgtattacataaagtgtaataatgaacaataaaataacatatgcattaataaatagagttatttgcggcacaaccttcttaactggccagatttttgcaattaatccctaattctaaagttttggtggtaaaacccctaaactcgtgttgtgttagaaatttaacatttttatccatttttagttgttagctaccatggtagaatgtctatgtgtac

SEQ ID NO: 116090 - DNA, 2075 bp, Cannabis sativa
  modified_base (2037)..(2040): a, c, t, g, unknown or other
gatgtgattgacacaggagcttctttaagtgttccagtcggcagagcgatactaagacgaattttcaacgtacttggagaacccagtgataatttaggtccagtagatactagcacaacatctcctattcatagatctgcacatgcctttatacaattaaatacaaaattatcaatttttaaaataggaattaaagtagtaacttcttgctatattgtaaatgattaatttccaaattacaaacagtattatatatcaatgctatatactatattaatattaaaaacaaaattagagaagagatattaaaaataaaatatttttttaggatttaaatcattaacttttataatatatataagataatttaattattatatcaaatttattatttttaattacaaatatatattatagctaattaaaaaatatattttttcttaattttcttaattatcatgtccgtccacagctatagatatatctattttttaaaaaccaaaaaaatgttatgttttttgctctcattgctcacttttatttatactatatgtaccgactaatggtaaacgtgtcacagtcataatttggtgaataaatgcatatgttcgttctataatgaaaaattccaagtaattaataaaaaaaaatgttaaaggacactttatgtccatcaccgtaaaagtgatatattgatattaagttaatattagtctcatatattttaattataaataatataaaaattcactaaccatttttttttttttgagggaaaataattcactaaccatttaaaagtaatcacctacggctaaaaaaaaaagagtagtattgaaaaaatattaaatcaatatttattactaaaatttaaactaattataatagactaattattaatttcaaacgtatcaagttaattataatagactaattaatttcaaacgtatcaagttaattataatagatttatcctaaataatagattaattaaaattttttcctttaaatttaaaaatataacaaattaatcacttctcttaaattttttagtcactaaaaattcttcctaaattattgaaattgtttacggacatttatccagttttatttaattttactaattttgtggttgttcatgtactaaatcatactccctaatctttgatatctattaaattatatctttcgaactttgacatgtaccaatcaagctcgctgaatttgtatctatgttagactttctttactaaaattgaaaaaaagaaaaaccttaaatctaacaatctcaattgtttaaaagaatttttaacggctttaagttcaaaagcatgatttaatatatgtgaaaattcagaagtaaaaatcctaatatattttatatatatacataatttttttgaaaataagtatatatattatattttatatttataatatgcatgttcattatttataattgttgaccatcaatttatccaaccactactcctacacctgttaattggatttaattatagctcatcatatatcatttgtgcgaatttctttagttttattttctttgttaactctctctattttcttatactcaggcaaatttattttatatgctgcatagggtggaaaaaaggggtagattttaatgaattaaacccaggaaaattatttcaagtatgtaatgggttttaaactacacaaagattaaagtaaatttcttaatttgatattatatattgagtaatgataaatgcactcacatattgtatgctaattagcaatttttctttccgaatttcgacatgtactaaatcatgtcccttgaactttttggccgttaaaaattttctctgaactattaaaattattaaatttaaggacttttatctaattttagtaaaaaatttctaacatggatgaaagttaaggggcattatttagtacatatcaaagtttgaggagaatgattggtagatatcaaagtaaagggagcatggtatagtacataaacaatcactgaaacaataaaattgaatnnnnttagacaaaaatctttaaatttaataatctcaata

SEQ ID NO: 116091 - DNA, 1223 bp, Cannabis sativa
aattatttatctctattcagccaagctcgaaggaaatcatcgtttcacttgtaaatacttataaaagttatagattccatacctatgatcagcgctcccacactacaagaaaatggggtctttacctactaattttaagtgtaggaaaagctacacaattggtagggaataaggtttacctgcaaataaaaatctgtagagatgtgtagctaaaagttcgtggggaaagggtcttcacctacacttattcatattagtaggtaaagaataaagtggaccccacttagttatgaatcagatgatgagccatcaggtgatgtgtttgatgatgtgtacacttatgtgggatgacatgttataatatgtggcagatgacatggttgccacgtagcacacacgtggcacacatcactcggtccacatggcatgaatttattggtccacttggcacgaattaattagttcacgtggtttatattgattagtccacttgtcacaaattgataagtccacatggtgtgaattgataagcacacattgcttcaaatggttggtccatgtgatatcaaattattggttcacgttgtatcgtcgatagtctacatgccaattgatatttttgtcaattttaaaggttatgtgtagctagcataagccacgaaaagttcaagtcaagattttatattagcatccctttgttctcttttgatttttttactaaatgtgaacactcgtgtgtatcagcacttaattcttatttatatcaagcactcctaaaataaaatattattttgaataagtttaacatttataattttaaaactagttgcagtagctttacaactcgatttgctaaataattctataacatttacagaagcagcacaataaaatcaaagaaaatgagatgaaagtcacaacaaaaaagaatagtgccacatgagatagtcgaccaccacatgatcttagaatccaaatcattgactttaaattcttgtcaaactaatactatatatgagcagagacatgtgctacatatatatgataaaataataaaaaataaaatctgtaatgaccactttagtaatttgaattagtaaagacaattagcactaatttcttttaggcttatgattatttatgaaattaattatttgtggaccccaatattagaaatgagcattagagttataatttctcaatttcagagattttattaaact

SEQ ID NO: 116092 - DNA, 1885 bp, Cannabis sativa
  modified_base (36)..(36): a, c, t, g, unknown or other
  modified_base (1826)..(1846): a, c, t, g, unknown or other
gtatgtaaaatatatatatatataagaatagaatanacatttgatctattaagttttaaaatataattatattatatgtatattttctttatattagaatattatttgtatatataatttttttaatttttttttataaatatgtgtggattgtattaaatcggttacttttacatgtcaatcaatatttaatccgcacaagtgtggattttgaattttctaattcaatccaatccgcacaagtgtagatatccgcactttatagattagattggattggatcggctattttataaacacccctaatttaaatgttattgtggaagattgtgttgataaaagtattacagttcaatctcttgttattgtcctgctagataaaggattcaaacattaaagagaggaaggaaagaaaaaccattatttcaatacttacttttctatttgttattattaattctattagaattatgttcttggtgattttgtatttacttggtttggttaatatgaaatccgcattgaaataataaagatccagcaatgttattttatacaaatatttcagaggtggcttgatagaatagtggcaatatgagtcagttgacgcacatttcttaagtgcttaatatgagtatcctaaaactgctatcttaaaggttcttgagttttgatataagacttatgagtactctaagttcgctttatgactcatattatttggccactttagtagaatcatctaaactcaagctgtatacatgattttaataattttttaaaagacttgagagcaatatattttattagattttatgtatatatgttatctaaaagacattttgttctaattatagaataagtaaaagctacttataatacatctaaaatacctacaaaaatcttgtatatccagtgtgggatgtgcaacaaatataataaagcttcttatcttgttcctaaaacttttgtggtattcacaaatagttttttgaatgtaaatcacaaaagtttttaaggagtgtgctgagtttgctatgattaaaaagaaataaccaattcacacagattaaggggtatcaaaataacaattgctcaagtgtaaataaaattccatggtggcaatgtttggagaaaatagtgattttccgagcaatcagcttacaaagatgtaaaaagaaatagacaactttatgcactatttactggatgcactcagtttatgctatttctaagggctgttgcacaagatctttgactataaagtataaaaatgcatatattagaagtgccatacatattatttattttaataactattataaaatatcgttaactatttataaatatcacttttaaatactaaacaccactaatacctaatatctcaatccttatttcatctatctaaatacatcagtttccacatacaaagtagaaaaaacttgatggttaagttgtcttacaactcagtcattggaagtttgattcatccaataatctgtgagactagataatggccaaatagttagtagatctatgtcaaattcaagaaagactcacaacattttcagattacactattataaaccatacaaataaaaaatgatgcatatcattattgataaggattttatttttaatttttatcttttgaacataaggaatgaacccatgctattttatttaacttaagagtacttaccagtaatggttattttattaactgttacaataattaattttaaaattattcaagtgggcaaaggagatgtaggaaaccagcaaatataattaaataatatatatttatgggtaaataccannnnnnnnnnnnnnnnnnnnnaaagttactaattggaccctgtgttttgttaaatgacaa

SEQ ID NO: 116093 - DNA, 1999 bp, Cannabis sativa
gtttggaaaattagaaaaactgcatgtgcgggttggtttgaaaaaatggttaaaaaccgcaccacccgcaccgcgaacacccctaatatatatggtcgtgagggacagaaaattcgatgtagttgacaaaacgtgggccccctttcctctttggggaagtgtactttttggttggtgcttgacaagttttggactacgtcgtctagctggattgtgtcttctaggacttcaacctctagaattttttgtttgtgggcttcgagaccgcaacctcagtattgggggctcgcgtttgtccttacttctttcaggtttcaccaaagagttttcaatcctcttatgcggttcagccatggcgaagaattctactaacgactcaggccgtcgtgcctttagttctttctaaaaattcgttcttggcagggcacttgtaattaacatacaaaccagcgaagactcggggccttctcggcttttgttattttagcattaaattgtttaaaataatcttgtaagaactcacctacatcttgcttgatattggccaaagttgtgtatggcagtttgtatgatatcatggctttgaaatgcattaagaataaatccacgaaggtttctgaggttgatatcgatgcctcgagtaactggctaaactagtcgtgagtattgtcttccaaaatcacagtaagtatttgacacttcgctaattgaggtacctggtctacttctataatcgtattaaatttatcaagataatcgattgggttagtggtacctttatattgaacgactctgagaacttaaagcctttggaaagtctagcttgtcgcacctcttctttaaagagagatgtcccatgaagcttgtaaatgagctttctgtactgcctgatcagtctcaatgctcgcaagaggctttcttgatcgagtcctcctgacaatatggggtggattttccaagttacttttattgcaagcatgtgttctatttgattcaaacaaccaattcacatcatgatctctattcaccatctcttttaacaagtaccaagtggcctacttaaattaatgtacaattaccactaacattatttataacataaaagacaagctagagaataataggagatctaccaccagagaaatcccccaagatccctcaaagaagaaaagaaaactgatctcacatgtgaacccaagccccattacaagcccctagccccattgtacagcccattctcaaaccccattcaacatctcctgtgagtgagagctctaaacccgtgttgtcaagaatctattgaaggtgctcatacttataatgcgaacaaaataacattacaagatgtttctttatataatctttaagaacaaacccataactttcaaagcgaataagaacaaaataaaaaagctatcatgtcttttaaacaataaagaattccaccaaaaaaaatataaaaggtcaaattagtctaagctcgaaacctcaaaacccagaatctcatatggagatatcctatataaacatatatataattataattataaagagatagagatagacaaattaaaaagtaccattttttctaaaaattaccaaggctcgactaggattgtccttcatcacaaacgagccagaaacatgtagaaagatgcagacaaaaataacatattaaataaaaacgaatagaaaattaagggttgaattgaaaatgaattctggaattagaaataggggttcatattatataatatataaattttcatggtttggatagagtgactgaaaatgggggtttacattatattgtgcattattttatagtttgaacatggtgattgaaactacattttagaaacggaaaggaaagagggatttatggcatgtttactaatcaagattgggagtgataggtatggtaatcactccttttcatttgtttactttatttaatggttggaatactctaagggaaaggcataaaattaggagaaaa

SEQ ID NO: 116094 - DNA, 1229 bp, Cannabis sativa
ttgttgtaaggtctctgaccattactcagtataaataaaaggtccaaagctcaacattattcagttgagcaattccatcttttcatcgatcatttttctctccattactccatttctactctctctctttctggtcaattcctctggtttataagtctttacagtatgtgataaaaattataaaattatactaagtttttagcaactaattatttattattattaatattatttttttgttgaattattaacaatacttgttttataattgttcaagtgaaaaagagaagacttgaaaagaataccctaatttatacaattacattctaagagagttatcaataataatattcaatgaaaatatagtttacaaatttatttaaaaatattatgattggtacagtaagatcatacttgtatttatacatatgttttactttgaaaagtcaacatcatcatttatgagggtttctcgattgagaatatttttggtgtagaaatagaaaattttaaattcaggatctacttaattaacgacgtcataaagagagggaaagttgtggtgtggtttgaattgggccgaagatacaacatggactagtatcaatgggctttcgagcacttaaaggcccaccaaggtgtatgtgctttaagttgaaacttcagtgggcttcagaatccacgggccagtgttaatgggctttcgaaaactagcaaaaggtgggaaggtaagttgaggaataccactttttgtatcaattaatcaaaaataccctcatattatatttttatgagtgagttatctaatataccctttccctccacttaagtgtagcacgtgatttatattaatctaagaggtataatgggaatatcatttataaaagtgagtatgttttaaagaatatgaaaatgaaggtaaaaataagaacaattaaagtaaagtgggtatacaatgcaatttctacaaagaaggtgggcttggaaaagaggcccaccattctgcctttacaatccataggcttttcaacatataaaaattgcattgtatacccactagaattgttttaacttctacttctattttcatattttataacatatacttatttttatatatgattttcccattagaccccttaggttaaatgtaaattatttgctagatttaaatagggaaatttacattgtatactaacttttaccattttttacaaaaatactgctag

SEQ ID NO: 116095 - DNA, 1915 bp, Cannabis sativa
attaaagtaagagatttttaatatgaaattaccaagtgcggtttactatatactatactctagtgtgtgtgattttgattcagatcacatatgtggatagacatgtagtaacgttgctgtgaataatttgattatacatggctggactgatatgtaataaaatctttcattaacatgttgtttaccgtgaaagagttattcatatcacaacgatgatcattagtagatcagtttgaatctcgattatacatagactcctatttgtgttcattgagttctttgattcactcgttaagtttcttagagaagttgattgttacaattccattttgggaacttaataatatgagtggctgggaacatgcatgttatacaatattagaatccaagcttttcgaaaggatcaaatattagttctcttattgtgttaattttgggagtgctcacagttggaacaaaatctataattagaatatagattaactattcacattaaattaatggtatataatttagaataatttatagtactaaaactataatgtatatttaaataatatggtatatgtgtgcttatttcgtgaaataaattattttaaatttaacaaaaatttacaaaatatgttaaattattataatgtacactgtcatatgaaaaatactctaaaattagaattatacagatgcaaaaatataaaaatggtgcatggatgcacccactttggagaggagcaccctagaagaacctttaatgaaattatggtaaaaaaataggtaaatattatttaggactatatattttgtaaaaattaccaatcaaactttttattttgtcaaatgacaaatcgaactttatattttttaaattggtacaaaatgtataatacttctagcttaatttttcgtcaaatcttttattataacaaacttggagcatatttgtaaattggccagatgcgaaattaaaaatgtaaccagtatggtcaaaacagcttaaagtcaagttattactaagttttattttgataaaattaaactgggtactattttatataattttaaaaaaatacaaagttcaaacatcatttaactaataatagagagttaaattgataatttttacaaaacataaatgttaaatatggtattattcaaaaaaaaaaattatagaaaatcttagtgatattttttataatattgaggtaaaagtattttaatagaatgctaaaaaatattaccttatagtatacttagaaacaatattactccagcaatgttctaaaagagtggtaatttgaagcatattaaaagttatgttaaatttttatatatgatatagtattgtgataaattagcttgcaataatttttttttcttacatatcttagtatattaccacaattttaataataaaaacataaataaatattagtttttatattttctcaataaaatattaaataatgatgtataatatatgtgtgatttttatgaaattaatataagtgattattcttacttattttttgatttaatatatatatagtaactagcttggtatatataaataaaatagtaattcttataatttagaaaaattataataagtacaataattttatattagtatatgatatatgttaatattttgtatatatagatatgatattataattatatcttttcatacaaatattgtaatataataactttaattatatatacaaataaaaataggtattttttaatacattaaagcactcaaaatatagcacaaaatttatatgaagatgaggtatatatgggggaaattttactgcaacatcttaaaagagatataacgatatatctctatctgttttagtatctaaaataattttgtagtcaatttttttctcatggtcatgtaaattat

SEQ ID NO: 116096 - DNA, 2247 bp, Cannabis sativa
taactgcacagacttatttcatttgttaaactccacattaattaattaatcctcttcttgttccaacgtttttaaaagtagcttcataatgtgcttctcttatttctttttgtgtaaaattttgcttctatttctaacttcaaattaatatttcaaaggattggtctgaagtttttagaaatactagaacaaaacttttggttaactataattaaatgatatatatgtgcttcacttagtctttatgagtaaatttttcaaacatgtttaatctttatagttctatgataatttataggtagccttattggattttattctctatagtactcctatgtgcttctattttggtgcctttgccttttaaggctattgtacttttgtggtaatgttgaaaatgttcacaataagatttaggaaaatatttaagggcagccctattatagtgggatccacattacaatttaatgtttgtgaagctttgcctgttttagcattgtattatactattattgctagttttcttcagttatgataagttaaccaagactcttttagacttttgttcaaaaaagcaaaaaaaaaaaagaagacccttttagactacagtgatgacaatgattatgagatatttttctgattaattattgttttacagacgtaggtggaagttgtttggatgggggccaagattttgttgatataaatggaacgaggtcagtcaagttgaataatataatgttttgcagtcaagaactcttagaaattgacttaccaccctacctaatctaaagtcaataatttcatcactgacaagtgacaattaattgatttaggcatatattttttgttgttttaactcattatttttcccctcttagaactagaaaaatgactggcctattctatactgtaccatttgattttagagagaaagagagagagagtttgcctgttagatgtacatgtgggagccttgctttttaattgtaatattgatttttcatttgtgttgtttttaagttggaaagtgttttgattccatctccaacccaaaactctataatatttgtatcaaaatagtataagttgaatgtagcaattaagttctcaatctcactaaacaacaacaattaaggatgtcatgaagtttttatccttttttatttatttattttcaatttcattgttttttttttttgtattgagagcaatagagaagagaattaaattagatgttaattaattggccaattaattgtttttcccttctacattagtaatgtcattctaatacaatttttctacaattctgagggctgtcatgccatttattagtatataaaataaagaaaatttctattggacaccctagggatgttttgttagactcctgtttctgttttggtatttagaaaatttttagaatttttttttataatcatgttatagttgtttaagataaattttcaaaaaacttatagattaataataaggcctgtcataatatataatgtaaattatttaatttttttaaaaaaattgataaatattcttaaataactaacatactgaaatagataaaaaatctacttcatcattatatatatcttttcatattcaacttattgcagtaaacaagaataataatctgaacattaattgaagtgaaagtaaaaaaagaaaattgtgaaactgtcaatctaaataatggagatgaaaatatgctagtgtctaaaatcattgacttttgaagtagggagtttttgtttgtatttagagtgttttttttttttttatgtagcagattagatatacccaacccaagtccaatcacattctatacaaatcttttaatttgtcggtggtgagtggagggttttcttatgaatctacttctactttaatttgtttattcttgataaataataatagttaaagaaaatatttgtgcaaacaaatttattgcactgtctacacacgtgtctggttggtgttatttgtgctctgcttaactcttacacggttacaccaatttacaaaaagagctaccactcatcttccccctaaaactctttatttatgggtaatttattaatgagaagtgctattttcaaccatttataataaattttcagttaatttctatatttgaaaatatttgattttttttttcatgacagtattttttaagttatagagtatcttttagtagtatttttgttttttaattttttaatcataaaa

SEQ ID NO: 116097 - DNA, 1926 bp, Cannabis sativa
tctaaaaaatataatttgagagtggtaaaatatatatcattttttttttatttataccataatggtaattttataaaacaaaaattataaaattctattttatttgatactataccaatcatcacaattcttattcaattattgattctataaactttaccaaacaaaagaatagaaatttcattccattctattcctattcctattaccattcccattcctattctacttttattttgtaaccaaacgccataacatttagaaagcaaaattaatcaacaaatataagaactaaagtcatgataaaaagaaatacaaccctaacaacaaactccaataagacagtaattaaacattcagcgattgtgaaagttctttttttaaaggagccaataacaaatcaaacccacaaataaccacccatatatattattccaaaaaaaaaaaaaaaaaattgggaaacaacacatataccattatgtagacaaaaaataatgaacaaaaagaatgtcaaaccatgtatagtcccctagataataaacatctaattaaagatcatataacacatgtaacctaacccttatttctctccaaaaacacaaattaataattttgttgatattaatatattataaaatagagagataaaaaaaatctagaatcacctaaggtgtgtcatattattaaatattttaattcaataattactataaaaattaactaattatcacctgacttattaggtaagtaaatcaatgtatcaaataactttatgtaaatgtcttattatatgtaaatcaatgtatcaaatagctttatgcaaatatatttatataaatgtaaatatattttgagtatattaaaaagtgtttattgttattactgtttttttttttgaaagatattgtcattattgttacttgagagtgttaattcataattttatttacattaatatctctatttatttataattatttttatataaaacttttacagtatatgtggtacaattaatagggtttttttttttatctctagtaatatgtataatcatttctaaccatattgatataatctcatggtacacacttcatcaaaattaaaacataattaagtctctcttttcttcttacttaatttctaccaaatttaatatttccagctaacaaaactaagcctaaccaatgtcaaaacagagaaaaaaaaaaaattagggaaattacccattgtacggccttttgcaacttttttttttccatttttacgttctctttttaaaattttcaattttataaatttacataaatatttctttattgaatttttaataaattcatttttacattttatttatacttagacaatagttatacctagctagaagttaacacaacatattcaaactttaactaaattaaataaattttataataatcaatttaaacaataaaattgctagtatagttagtaaatgtccttagttaccaatatgtagtctaatccaatttaatttatttgcaccaaaatgttttgtatttggatcttttactgaatgtgaacatttagtttttaactaattagggttcgtttagtacactgtgtgttgtgttgtgttgtgttgtattattttgtattactgtattgagttgtattatataatattatgtttggtagtgacttgcattaataggttgtgtaacattatattatctactataaatttgaccccaatcacgggccggaccccaaccccagactttgtagcccaaactccgaccctgacccggaccccaacccagacctcggactttggcataagtacccaaagttttataaatattagatttacgccgcttacaaacttaaaactttgggtacttatgttgggttttatgccctaaataaaacttcatttcaatgtaa

SEQ ID NO: 116098 - DNA, 5642 bp, Cannabis sativa
ctctctctctctctctctctttagttttctaaggttctagttaagttttgcttgatttttgggagtttgggtgttgtagctattagggttgtttgattttgctttctaaagttgaattaagattttataggttgaattgaggtggatttaagggttgttgtagtgtttgagcaagctttgagtttaagaactcaagctttgctctttaatattagattttgattctgagcttatttagttgttttgttgcttggaatatgtttattatggtaaatatagcaggtttggaaagtttagtagagtttggggtttaattgaggttgtagtggtattttgtgttattcctgcactgaactagaattccagttcagggggacctgtaggaactggtcgactagttggtcgtcaagaaaccccacataatcagaattctggttggggaaccggtctactggttggggatgtttagggaaccctagtttttcttatttttgcaatatatagggtatctccatgtcatttatcgatagggaaacttttagtttagagttttaagtccccaaaaagtgatttagcgtgttagtcactagttttacaaataatgtgatttaggggcctgtaattcgtcgagcagctgttccactcaggtttgccaacacacttgaattcggtaatgaggtaagattagtataatgatatgcatatgtatttacatgtttagcgtgcgtgttagttaagtctgttagattacattataatagcgatatgagtatgtttagtattatattggatatcgataaatatatgttggcttaactactattcgacaatgtcacatcggtacgactagagtacgtctagcgtactgagtataggttgatatcatggtcggtagtactatattacttgagagtatcacatcagtacgactagcgcgtcgagtataggctgatgttatggtgagtagtactgtggtacaaatgttctagactcaacaccgtgttggccacgaggatagggttacggttgggtgtatgggcgcctgattataatctgggttattggtatgtaataattcttttattactgagtctgtcgactcatagttattgtttgcatgtgtaggtaagggcaatgctaaggttgagcagtcgtgagagcgagcagatggagattgtatatgtcggggcggttagacctggagcgtacgatctttgggacagcagggcttattttgtatagtcgctaggtgacaaacttttgtaacttatattatgaaacagttgtaaatatattgtaaaacgagatccctatttattataagtatattattttagtgttaataattaaataagtaaagttttcataaatcacgattttcaataaactcgttgattagcaacgagctgcactgttaagttaaaaatcactttaacaccgcctaatctagtagggtgctacaagtataatggtccaattagcacttagactagaaaagactttgaaagaaggaaaaacaacaataaaaatgtttacctgggctctggaagcttaatgagagggtatgcactctcttcattgggaaaccaatggaaaagaaccagtgttcccggatgtttggggagcgtaaggtaaatcttctggggcaatgttcatctgagtacctctctaggttataaaacccaatcttactacaattagtatgcatgggttgaggcttcacgccataaaaatacaggatctcctctggggtaggcacctcaattttgttgatcttacagaagatgtaccacctggctaagagcttataattttgaggtatcaattggaaggggcctatcctgattagtgcaatgaatttcgtgaagtaagtcctcaacgggagatgtgccccacttacaatgtgagcccagcttcgagcactgaacctatctgtgatcacagaagcagactcttacgcaatagatactttgtgtctcgtcatccatggaatataagcactccaactttgatggcataaagatccaccattccatatgaacagaagctgttaattttctgatccatcttccagatggaagcattgaacacaggtgcaggaggtggagcattggctttcccctttcccttggattttatggctacctagaatggatcaaccctcagagtagtctctaggaaaggtcttgttgaagttccccgataggagcctctaccaaaacttcttcagtagccatctccttcgcgagagcaactattgaattgtcttcaatatccactaccttgaggtgaaattcctcattcaaatccatcactagaaaaacgaaaagaaaggagaaactaagcaattagataccaaacatccaaatgacaatatgggcatcagggaaggcctccccaaaaattgcttggagaagtcctcgctggacccatcactcctagaagcatgtccttactaggtgactcaaagtgacaaattgagaaaccaagggaaaattactagaataagatttaagtgaattcaagaaattgggtccattcagagtcctaataactccaaatagacgtgcagaagatggacgaacctaacactcactcaaaagtttgtcctacctggtccagaccctaatcttagaatcctaagtacatgcaaaagtctaccaggttcaaataaccataccctaattttccagacagcaccagcactcccttggcaggaaaatttcaacatatccatatcctaaaaatgtaactctacatgcatcattttgccattcacatatatcagatatcctagacctagcttaaactaattatttctatcttatatatgaaatagcacgatcaacaagcatcaggatacttacttggtatatgagtataaaatgaaagattgttgtggaaatccacctagtagttgtgtacccactcaatcacgcaatcaaaattggcctgaacgtcaaaatccttgtcgagctgagggtggaatagtttaagttttagtggctctacgtctagagaatgggctaaacagaggtttaagaagtactggatcaggcagtcaaaaacttcttgcattcaccgcttggaatgattgcaaggataagatatttttttggaataagaggctctggtttgaagtttaaagatagaggttttgaaaagtctaaagtagtgcaaaaggagaaactaggtttgatgaagctatttatatctcggctaaatccatgcaatttgaaatgaatagatcagatcctccctccaaaaagcacgatttgatctaatagatgagaagctacaaagatggcatttaaaacttgctcagggcattcattttttcattgcccaccttgggtccagcgtgaattaaaaaagggtcatttcaattgacttgccataattgccatttctttagaaagacgtgccccctacacgtgtgtgttgtcagtggatgtattaaagacgcagtatgtgtgccacgcctgtgacactattagttcctggtcctttaatttgagatatcttgaggaatgcatctatgatcccgacaatcacgacatgtcatgaactgatctctgagatccagaagaagactgccagctccaaccactcgaaaagtcccaggagcttgggcggtaaatgttatccgtgtttttagacgggtgacttgtggcataaaaagagataatctcacgatctcattaactaaagccccttaattaaaccaagtcttggagaggcttcactaatctgggaaaggttagggccaagaggtatacggagatccaccttgccttattttggcttcccaaacacagaggacttattacaaactcaaagtctgcctaaatgatacatggatgggtactcaaaggggctatcacggatgctgaccacccaaaaggattgcttatgtctaccttggatacaaacccagattgcccagtgacagttatgctttttttgacacatgatcagatcttgtcccctgtgccaagacatggtagtgtgcacacctcacacacctttcttccagacagctattgcaagcatttacttttcaaggttaaacgtcttggcgacacacgtccattacgtacagtggtcccttattatccagctacttcagcacataagcacaaattcttccaagggacccagctgtcagctcttttttgcatgtattttaccccattattggacttttgcagaaaccctaggtgggtcatgggcatgtccatacccaccattagcctataaatacccttttatttccatacgaaggggggatcacaacctagatagctaaagctctgctaatattattctaagctttcttctttttcaagagaaacatagaatacaaagttaggatttcctgcataaacactataaaaaaaatcatatacgccttctaaggctaatagattgactcgtggactagggttaattaacacctaaacctcgtaaaaatctccatcttctttaagaatgctatttattatttcttggctcttattattttactttccaaaaatcatagcaagtattttcatttagaactaatttttgagttattgtttgttatttattcttactcattttttatagaatcatttatgttttaatttatgtatcagtgtttttaggactgattaactcttttttttctttaattataactagtttttgagttattatgtgttatttatttttagttatttttattgtgatgccagttctattttaatttatgtcgcaactagtttttttatttaagtaatttcaaaaagaggttcttgatttatttatttcaaaaactagttttcgatttaattaattcaagaactggtttttaatttagttattttgaaaatttatttttgatttagttagttcatggaatcagttatttaattatttatttgctttatttaactagtttttatgtgtaagtttttatcttagttgctttacggaaccaatttatttgtctcagatttttaactagttatataaaaccgatttctttatcttatattttgagttattgtgtgttatttattttgttagtgaaccagctcaatttagatttatgccttagtatttttgaaattgatcccaccttttttaattgtaattagtttatgaggtattatgtgttatttatatttattcaatttattgtggaactagttttatttttaatttatgtttcagtattttaggaatcattttcctttttatttttttaattataaccggtttaagttattctatattatttatttgtattcattatgttatggaacatattctattttacttataatcggattgagttcttttgtgttatttttttatttgttatgttataaaatcggttctattttaattatagccgatttgagttatttcgtgttacttattttatttattttttttttgaagaaagttacttattttatttcagtatgttatagaaccaattttattttaatttatatatgagacatctgttgggttttatgccctaaataaaactccaattcaatgtaatccattttatttaacatcaataaagttacagaagttatttttcattcatttgtgtgtgttttggttcatcttatcaattgctt

SEQ ID NO: 116099 - DNA, 4252 bp, Cannabis sativa
  modified_base (4192)..(4218): a, c, t, g, unknown or other
cctggtaaaatatatccaacacggccatgggcccggctattggtggctggccagctcttgagagggagttggtctgtcacttgttccttgtttgagttctagggtcttcgtttgctcagatgcggacatgaccatccttttatcaagttttactgccacgtggcacatgttctgtccacgcaagcatgccacgtcatgaggatacaaattgggataacattttcccctcaagtccctatgcagacatcttgttgggattgttgttacctttactgaataaaaagtgatgcattttttgaagcactttttcttgacagtctgatctcattgcagtagagaaataactgctttaagttcctttatgatgtgttggcgaagtaagtgagaaaaagggggcccacatgtctacattagtgagttttagggggaaaaccctcttttcactttcatttttcacttttactttctctcattagtatttggctcttgaaaaagctcctcctctctaggtggccaaaccgtgaagcttcatttttcttacgattttcacgctatttcaacgatccaattgatttgatttatcgaaatcttgttgtgggtaagctttatattactgctctttcaattgatttgatttatttttccatgaatgcatgaacattatttcttgttttgaacatgctttgattcttacattatattgtagtccattcggtactttgatccgcatgatagccttaggatatacaatgtgtgatttctagatgaaaaagaactgaatctggcctttgttgttattcttggctctttgagtcacgaagaacacaaagaacatgtttgagttcttcaaaaattatgtgtcttgatccatgctcatgctagccagccaaggaggctttgtttgaagcctagctgaccatgggtggctttcatggggtctggctggccacggggattgtgtccctaggttggctggcctatacttggaactagggtgcctagctagcctctaaactgggtcttggggtctggtcgaccattaggacctggaaccttgcctggccaaggccaaggctccaagcgagtagccagctttctccctctttagaccacagttaggcagcattggaggcatatacaattgtggccttatgcgtggtttctcttagaaactatgtgtaaggctagttaatgagtccattatagttaattgtgcaacttaggacttactgtgtgtcttggtgattgtacccaagacgatacttggtcgttgattgaccttgtaccctttggtttacttggaagatacccttgggtgtcgttgacttgaatatatttgtagctttgtgaagttgctcacctccccttatttcttccatgcagacactgccaggtgttggtttggggacgtgacagttgtgtaggtctcttaaattcccttgtagttatggttgatacgaaaaagaggatcaatagggcgaccccacacaaccctcaaacagccagaatagctgtacggggtcacactaagattgtagaaagggttgccttgccacatgctgacattagctctggaattgaccatgagaatgaaagtcctgagcctgagtccaattgtgaggaagttgttttagttaggaggaagggatgcaagccttgtgtcatcttgtccaattgtcccttaggtcgctatgatgatgatggttatctgctaaacaggctcgatgagccttcagtacttggcttggaccatgtctttgaccaatcgcttaagcatgaaattcttgatgcaagttcacaagggaaaatttggatttccactgggctaatatgggatatctattttaagatacctcccccggattaactagttcataggttggctctcaactagatggcgtgttcagaatactacattgatcaaggagccgtactccctcttcattcgtacttttgtgatatttctgcttatttcaggatcaatccaacacaaatcacctttgaaggtatcaggtacttttcagcgttgttcgttctctataaggagctaggctggcctccaacccactccttatgaagtcagttactattttaatctgaagtctactccgcagcaacatcggtttggatacttctattttaacaaagtgggccactaatggttagatgattccaacatctcatctatgccaagggttgatgaacatgcaaacattgcttaagatgttaaaagagttccattcttcaagcgttccatcctcaaaatatagataagggatagagagaatcgcatcctttcttcccggccgagtagaggaacctcatctagttaactagtgtagataatttctggatttatggcttgtatcctcctgctcctagagctgcgaggatgatagcaacaaatgaggcttgccctagagatgggcaaggccttgactgggatgatgatgatgtacctttgtcttgtattgcacaaaatctcgagaggagagagagagagctctccataggtgcctagcccgtgagggtccagtaggtgacacctcctttcgtcttaggcctaaaggcccaacttctgatagacctacacgccctgtgctcataactagggacaagggtaaagctgtagttgtgagctttaatagctcttcttctaatgatgatggaatttgatagtttatagcaccatgcttttattcttgtattgaatattattgaatgcattttaaatttgttactttcattttccagacatgtcttcgaggctgagaggtcttgcaagtgggcctttagataagcctaccagacgagtgagggccaaggtggccagaacctcttccggtgcagatgctagtggaccatcactcctccccctccactaggtcctacacctgtcggccaaggtactaagacgccaagtagaggagcgggtcaactattggtaagaaggctgttgagttagccacttagcgtatagagagggctattccattcttggatgaggctttgcaggagttgggtgatagtatgcctgataagctgtactttgccagacttcgggacctttctctagtgagttatgctttcaagtttgttcatctttttagcattgtatagcttgtcggacatagtgtttcttgcatgtggctggttggccttgggcatccatacaggggtctggcccaccatagcattccaaggaggggactggccgacatgatttgacttgtttgacactaatgttgttttgctttgtttttaggccctgatgaagctgagtttggctcacaacagctaagggggtcttcagacgcttttcaagagcatgtgaaggtcttggaggcatcccttgccacaaaagacaaagcgaattctgagctggaggtccttctagcagagaagcagagaatggtccttgaattggagattatgttgagtgccaggaacaccaagaacaccaaccaagccactctcatctatgggttgcagattgatcttaagaatcacaagcaacagttgtaggaggctcttgatggccaacatgtcattaaggaagattacattgacctgtccaccgaacttacttacgagttttgcctgcgcaaccctaaagttgacttgtcatacatgggaatccagcctttatggagagaacattggcccatgggagggcattgtttgaaagctagatggagagggaccagattgctgcttattgagacgagtcatcattgtgtatctctggcgaggtgttggcggaccctccagtgggacggtggccggccaggatgttgcccactaggcttgctagcatgatgatgatggggccaacctggactctgtggatctcgacctggcagctccaaattcatctcctgctgcccctgcacacatgtagattgaatttttattagtactcagcgtcatgattgtattgtataaactctattttcatgttttgcgtagcctgtagcttttttatggcatgtggtatcttagcttaggagcattactcactttgccttccatgtggcctatggcgtttttgaaactttatgtcctatgtggtttggatcctttttagtgcactattttcatgtcctatgtggctcgaggcctttttagaacattactttatttttagccctaggatcttctgttgggaatattataccaggatctagatttnnnnnnnnnnnnnnnnnnnnnnnnnnnaaatatgaatttcctaaaacaatgaaaataaaca

SEQ ID NO: 116100 - DNA, 1962 bp, Cannabis sativa
aaaaaaaaaaaaaaaactgtttaatttaaagtgtaaaaatgaaaaaaaaaaaaccctaatattttttctattttcttttattagagattattaatattaattaattaaaaattaaaaaaaaactatataaccgtacataacaactaataatttacttaattaatttataacagaataattcatctatgtataaaagttagtacttaccgaatattgtttgatttattttatgtacaaaataaatttactaaaaatgatattaatgatgactacaaattagacacggttatgatagttgttttgaagagatttctttacgtgttcttttttatgtaataaattgtatgatgatttctttttctttgcgcacttttttttttatataagaaactttgtgatgattttttttctctagaattctttagagtactctatgtatatcgatttataatttttttaagaaattataaataaaaatgtaaagcccgtacttgaaaattaactaatttgaaatttaaacatattttataatatttacaaaacttcataagtcgagatctcgaatttaaaactgttgttgaaaatgcagataccataaatatagctacataatgtattattatattttttttttcaaactacaaagcgacaacaaaatatgactcaaaatacagtacgaccggaaccctgcatgatgcactgcagcgatatgtacagtccttgctaagcccgaactcactgctcctctaccttggcctttcccttacctacacaaggtagcaaactgatgagtcgacagactcagaaagatatgcataaaatacatgtagacaatgcaataccaactttgtacttaagccaaccagagccaaattctaaggctcgccaaatggttaagaacgttctcaacggaagtacgaccactgtatcacatgcactagagtaccgactccgtactcgtgttggtagggccattattgtactttcgggagttactaagtgttgtaccacatgcactccgtaccccctggtactcgtgttggtaacaccgtaactacccttaaataccctacactgtactaacacccttattactatgactataccagtgttagtagtgtaaataattaataacacacattcattcatgcacatatatactttatgctaatcttaccttatttttaagttcaggtgtgccggtcagcctgagtggaataacagctcgacgctttacagggtcctatatcaccataattgtaattttgatgagagaacgctaaaatacttttcggggacttaaaataaaatctaaagattttcctatcgatagataacaaggcaataacctaaatattacaaaaacaagaaaaactagggttcacaaattatcccaaccggtaaaccggttccccaaccacaattctaatttagtggggtttcctggggaccaaccaatcaaccagttcctacaggtcctactgaactggtcgaccgatttagtgcaggaaccaccaaaaatgtccccaatacttcaaattaaccccaaactctttaataatctccagaacacctgtatataccataatagactcatttcaagcaacacaacctaacaatttacactgaatcccaaatcaccattaaagcactaagtttgagttctcaaactctaattttgctcaaacaacacaataatcacccaattcaacttaaaacaacataaataatcacaacctaactccagaatacaaaattaaacaaccttaatacatacaacaacttaataccgaaattcaaacactaaaacttaacttgagctttaggaaaaccaaagaggaagaggctagggagtgataccttgaattaacacacacaaatcctgcaagaactctttgaaatgagctaagaaaattcaaaaccctagcttgcttcttgaaaatttgagagagagagagagag

SEQ ID NO: 116101 - DNA, 1565 bp, Cannabis sativa
agagattctttgatgggacaaagttttatggtcaagcagaaataatgccacataaatctcacagatagatgacaaaccaaataaatagcaaatcacaccaattatacttaaagagtaatatgacctaagaaaaatgtcctaacaacaatctgaagctcccctttgagctatcttaagttacaatgctccaattccaagactcgatggcctctggattcaaagctaagtatagatcaaacaaaagtcccaagaacagggtacaaaatataaataagttccacgaaaggctaaccaaacaaagtcaatacaaaaaagtaaaacacacacacattggaacccattagaatctccaccacttggtccctagccacacaaaggaaaacccaacccaacaccatgtagagtcaaaggtaagtgacacacctccatcgtctcccttgctcgcacttgagagaaagagggcacaaccaacttcgccaaacctgacaaaacctatgcacccacttcatctcatggacaaactcccacctatgggaattaggatgttcaccgacagagtaccacatcccatctccaaccctaaaaataattctatctcttcgtcacgcgtcagatttgagtgatctcttcaaccctagattattaccaacgcatcactatctcgtgctagatctaattgagcctcacaataacatcctctcagcctctcagcgtaagcgaaatcatttcgttaagaattattgctaaaaaaaaggtggtaagaaatcaatggtgcatcccttccaaaatgagagtatgataaaataatattgtggtaacttgcattttcaataatccttatatgatattttatatttatacatatttaatactctaaactcatatttaattaaattgtatttatacaatcaaaaagttttttgttatacgagatttagttaaattaataaaattttatttaaaaatattaaatatgaacaatttcaaaatacaaaataccgaaagagtattatcgtaacaaaaattattatttgaaaaaaaatgctccattaagagagagaacatattaatattgttaaccaatcgcaagcttgtattgacatcactggtgtcttttagtaaactctcttccaaaaaagaatactaagcgacacatttaggtgccaagtgacaaacaactattagtacatttcaatatcgagtcttgttagaacatatttatgaattattataaaataaaaaagtgcattttgaattccttagaggactagtcccatattgcttggaaatatttatttataagtgtatatataggttagatatgagcaattaggttggtctccaagaggtacacacttttgtagaagaggagggagtcatacaaagactcacctgaaaaccacacaagcgcgtgttgccaccgtctgaccgaccttggctagtgtggtgtgcaccttatttggagaaaattaatttataaatacctaagtttaactaataattctaaacttaagtatttatgtcgtaaattactttattatttaattaattaaagggataattac

SEQ ID NO: 116102 - DNA, 2289 bp, Cannabis sativa
  modified_base (2231)..(2256): a, c, t, g, unknown or other
ttctttctttaaactttgcatgcctatgaattcttttgattttgcttttctgaattataattatatgtattcatttttttttctttttcttttttgaattttttacgacccaattgtatgtatgccttttcttgtgttatgatgctggcaataaagtagtagaaaaagaagacgactaagatgaaggcgaagagtgttctttctgtcagggacgttattcagcgagtgaagttttgctatttgggttgtttaaccttcttagggttccccatctattgtaaatattttaattaattagtattagttgaattggaaaggaaagagttctttttcgatcagtaattatcatcatcatcatcataattttggaggttgggggcgaagagagtggggtctgatattaagtgtgtttctgtggtggtggttgttcctaattgtaatttttgaatttaagtgcgtttctcttccatgctcactgagttggaggaaattcatagtttggaccgtcttggcattgtataatgccatgattagggggaagtactaatactgtggaagatttctttagcagctctagaatggaaaagagaacaaaataaggtataatctctttctcattttggcctgaagtcctgaaacaaaacaacaacgcagtttgaaattatttcaaacactttagaatgaggtaacatttattgtttatctccgacttttgatagttataaggtaaaagctaccaggcaatgctttgttctcagtcagctgttgagcggtcaagttcattttaacttcactagtcatctgaatcaaatatattctgatgctttgagagctgtctttgcaacactattctttgttcaaatggggatttgactttgtgcatcaacttcattgaagttggtttagaagtttgctaccttgtgcatctagattaaatcttgccttcaaaatggcaaaaaatttaacactgttaggttcatatgttgtgttattttagtacacaaatctccttagtttagttgttttggatgagaacacaatgcagaccaaaaagaattgagtgccacctgagagattacagttgaatatatgggaaacactactacgaaaactttctctatcatgtattaacatttctttttgaacaggtggtaatggcaatgagatctggaggtggggatgaggctgtatttcggtccttgcatcgtgcacgtgaattataccaaagtagattgcgggaaaatgctgctgttgaccagctagcttccttgtttgctgaatgtgcaatagctgaagcccagcctttaacagatgaactgccacctaattctgatggtgaagcattggttgtgcccgatgctcatggaacctctatactggctgaatcgggcaggatgcagattgtgttggatgcattctcggatgggagcagctttatctgtttacaatgcggaggtcttgttagcaacaaccgcagagatgagcactatgcatattggtgctgccaaatttgaattgatgagcatgcaaccaaggaggggttgtttgttcccctcttgttctgtggtgcaacatgaccacatgccctttttggtatccgagtgaatagcttttttgatttcagctcatctgatgttttacttagatggtcgggaccatgtattgtcctgaagggagtaaactgctgaatttttgggatcttttgatcctcatattagtcattactgaagagactgtgacacgaatatgatgatatataatcatatattagtctgttttaaaggactataccattctatatcatattattattttattttattttatttatttttttttttgcaaaacagcaaaatataattttacatttttaaaattttcacaccagaccttgtaataacttttgactttatgtccaaccttaccaaaaaagaaaaaacagaactatttgacgttatgttagttaaagtgattattaatattattgtttgaattttcttaattatttctttaaaatttaaaagaacggataaaaaagttttgggaaattctataatccatctctttaaaagagatatattgatacatctttatctgttttagtatccgaaataatttttttatcaaattttttttcatagtcatgtaaattatatttatttaatacgttgaaaattacgttcaagcagtgtgttgtacgcatgattattttatatgcgtataaaatagannnnnnnnnnnnnnnnnnnnnnnnnntaaattattccgaatttttcaaaattttgtagg

SEQ ID NO: 116103 - DNA, 2674 bp, Cannabis sativa
ttttttttttaattttttaaaagaaattttttgcttcagtttataactgaagtagcgtcaatccactaattttttgcttcagctatgaaccaaagcaaaaacatttttttttctatggttcgtaactgaagaaataatcaattagcgtaggttcataaatgaagtaaaaaaaatcactatttgcgcttacgcttatagcgtcgggtacaccaacccatgcaaaatctttatatgtcacttaaaaaccgaaacaaatttttttttttatagtagcgctctctcagcggtccaagcccgttgttgcttctagcaatctcgggggtccatgctcgctgttattgattatgcaatcttgacaatcttcgcccgtcaaattaggtacattttgaacacaatttagcactttgacacacttatcttggctggcccgaccccttgagattggtcgatctcgatagtcttcaaacaacccgccgagatatgctaatgctgtaattttttttaatttcccttgctattaattaattatatatgcaaatttataagatataattttagtacactataagaagatatatctaatgcatctcataatataataaagtattatatcgtaatatatgttgtaattagttcataaattttgacaataagtataattagtctttgctaataaacacaacccacaacacacaataaatttttttcttatatctccaaaatacacaaattttcttgaacttcactaaaaaatagaagttttaaccttccgttatcatcacaacacacatttaatctctaacattattattatatcattgaacaaagaaatgagtaattctaaatatctctaataatgaaccatcaagaaaatttgatttcactttgtaaagttgtacagttttgttgaggtgatatatattctaaactttttaagccaaacttttctacgttctaacaactaatgtgcatatccaaaatgaaacttgtcaattctaataaattaaacaaaaaaaaaaaaatttaattaataaattacatttactatatctagaagataaattattaaaaaattagccatagtttaaccctacaccacacaaaaaatattaaaaaaagtttttaaatcatatcatatttatagagcttataaactaagaaaatagaaacttataaaataaaaactatattaaagtaacaactacacaattgtaatacaatatatactatatacaacaaaaaaaatcatatacatatttgtaaaaatactgtttgagaaagataaatttttcaagattccaccaaaataactagattgaaatatatttatataagtaatattttaattaaatacacacaaaacaaaagttattattttgatctaaacttacaaaattagaaaaaaataatggatgtgacaaaaaataaattttacaattttctaaaaaaatatttattaagtataagtcatagtatatatctcaacatcattttaaaaaatacacactcaatatattattattaaattttcggccaaaaataatataaaaaattaccctaaaatatatgtaaatgatttttcaagttattatagggttgtttaaactttaaagagtacccactatattaacctcaaaaatatagaaaaagataacaaaacataaccaccgccattttcgacaaataaaaaaaaaaaaaagaacaaaaaaattaaaatcttacacaaattaagctccaacaaatttccaagcgtccttagtgttgtacgaagcttacccaaatgagtttgaatctataacatccaaatataatttagcattttgtaaatttactcaaccttttaaactaaaaaaagctacaaatttagggtacaaatataaagaaatatacaccaataaaaattatttaaacttacattttctttgtagtgtagtagtaattaaatggagataagaaagctagattttggatgaaattttaggaatttttggatgaaacttttcggcgttctcaaactggttttgagagcagaaaagggaaaatattttgggaagaagaagagaatgggaaaaaaattgggacgtttaataaaaattttaaactgtaatgaccaatctcagcaggctttaatgagcctgcagtgattggggtattgtatttggttaatggggcggcacgagacaaactagggctaggtttattgttttttagatcaatctcgacgggttaacttacgacctaccaagtggaaggcttcagattggaatggtattgtggataatatttaaaggaagttacatggttgggccagccaccgtttatcttttacaagtagatctctgttagtgcattttgttctattgggtatcaagaattactggatgaacatttttattttgcctcaaaaagtaactgttgaaattgataaaatgtgtagagattttttttaggataagttgggaaatagaagtaagatgcatttctcttcttggagccatgtttgcttgcctaagaattatggtagaatttattttaggaaaggtataagaagtggaatatagttttaattattaggatttataaaacacttaagaaatatataaatcacagatctaaacatattcctaaagtgcttcaatatagaaaaccctaaatcataaataacctttgctaa

SEQ ID NO: 116104 - DNA, 1477 bp, Cannabis sativa
gtgttctatgttatatacaaatagatcttgggtttattattaatttttctatcatatcatgtgaatgtattaatatgtgtattgaaattgtttatataaacggtggatatccatcataaggggactaaaacaatacgcattcccatatacatactcactttcttcattaaaaagtaaccattttaatttttaaataaataaactcgcatttctaccaatcaccatttattaaacccagtagaagtaggacccatttaaacgaggtcaatttgaatcgaaagatttcaaactaattgacttggaatccctattattatttttctagcttggctacatattatatatacaccatcatctctctttgttatatttttacatataatacattcatgtttttattagttattgatgcatttttagtattggtttttttactcttcattgatccactctatcatcttgcttctttaataatatattattataatttcaaggtaagtagatatgagttcttcatcttcatcatcatcacggccatattcccttagtccacaacaactatttcatgtaagaaaaggaaaggatgatgatgatgaaagcaaggataataataataataataataacaatgacaatcccaagaaactactggagcagccaactgctcaagcactatttgcaccaaaacccaaaaataataaaaaaaacaaggtacgtacgtagtagtgatcatcatcatctatccaattttctttttattatatattttgatacaatctttgtatatttgttttatatatatattttgattaaatggcgcatgcatgcagccagcagtggtggcttcgggctctagtaataactagtacgaggttatggaatcagcagcagcatcagtagcagctttttcatttcaaatctccattattgtaataatataattaagttattaagaataaatatggtttcagctgttgaacttttctttctatattttgataaaatgactcagcgagcggtggcggacaaactagaaactacacttgtccgccactgcttcgaacgagctagctagctagtactcgcggctgatgtccggattggcatttttatttcaaatggatattgtaatcatatataatgagttattagcttttgaattaataatatgggttcagttgaacaatctctttgttttttttcttctatattttgatagaatgacccatctagcggtggcggagaaacgaggctcagataatattccttcgccaccgcttccgcctcccataaggcggttattgggtgttgtgaacgagctagctagtactcggctgaggccgccatcctaactgcttccgacttctgtttgggatcggcattttcatttctattatatatagctaaatgttaaagggtaccagtgttacttaataatagcttttaagaagtatcgctagccaatcgcaacgcgaca

SEQ ID NO: 116105 - DNA, 3684 bp, Cannabis sativa
aaatcaaacaatcttaatagtttaagagaatttttaacggccaaaaaaattcagggcataatttattacatgttaaagtttagaaggtaaaaatcttaattaacttttctttaatgacctgaactaattaagaactctcaaacattaacttgactgttaacgatcagctatctatgaaagtgtccgagtcaaaaatataactttttaccataaaaaaataaacttaaatatctatttataatcgaaattaattagtagtatttacggtgtaaattatactaaattttaattagtatatagtgaaggaaaatagagagaggagcggagagaaatgagaggaaaagaaacataagagagctccactcctccacatattcctcttcttctatatccatggctactctctcctcctcttactactctcttcaacctctctcttatttctcttcttcttcttcttcctcctcttcatcatcatctctcattgtctccttccattctctttcaccaaaatcagtaaccccattactgtctcgctgcttctctgtttcgctcagacccaaactctcaatccaaccaaccaggctctttgttcccccaattttcctttttgctggctttgaaacctccatagatacccagactttccttgccactatcagtgttctcgtcaccattgctctttctctctctcttggtttcaaggtaaaaaaaactgcgctcactctcactctcaccttcatttttcttttgggtttttgttgtttctagcaaagtaaagaaaaattgagtgaaatgaggttttcttttatgctttttgctgggttatgattgatgggttttgttttcaattaatatattttattcttatttgcagggtgatccagtgccttgtgagcgttgtgccggcaatggtatggattatctgttttgttctttctttcatttcttaatgtttatatatttgttttaattttacttgctataactgaaattaacaccatggtttgccgcattctttgctataagaataatttttaatttttgttgagtttttttttggccattttgctcgccgaccagcgatatggctctgataccatatcaaaaaacatggggtgccatctcaaaatcaattggtgatgagtggagtagtctatgttattataaatggttcaatacttttacatttaattcatgtgtgacaatgttctccaatataacagagattttggatatgacaagtcagtttagatgtttgaaagttagatgcaatgcccaaaaattagaagtaaccaaccaccacttagtctatcaatagcttaaaataacttattttgaagagtttttaactccttctagttgtctgataagctccaagtagttctaccatcatgcagtaagaaattcaatgataatacattagaggctgccattgaaatttgtaaaatatgaagacgataactagatcttattattttcatttcaagagatcctaaaacatctatgcaccagttgaatctgtactatgaatgaaacacattggaagagcttatgagcaacagttgttgttaggactgtgttacatgctttatctagctgtaagacttgccttttaataatagtgagtagacaactagaagacatttctccttgtttcccagatggtctcccttgttctgctctatagtaaatttatttgaagcctagaaaagaactaaagcgctacttagtagttagttgggaacagttaggaaattgctaaggttcctaaatgaaggaatagatgtgtacattctattaagtagcattaaggatcccctctttagtgtcagaaaagaagccgatgtttaatgaaccaaaatgtatagtgtcaagtggaatggcttctttacaatatgccaattaaatgattgttgtcaagaatcaagatcacttggatattaccttggaatttggataagactgccttcccccacctaactttgttattgtaaaagtggctctgtctgtcttctcggtcgatttgagttacctttatctgttcttttttaggtttcttaatccatgacaaggtttaaaagaaaaaaaagaatactaatttgaattatgctaggcaggagggacaaaatgtgtattttgtaatgatggtaaaatgaagcaagagactggattggttgattgcaaggtgtgcaagggtgcaggtactattttcttatatatttataagctttttctttttcctcttttcatgttgtttggattattatggtaacctaattgttatggcacagtaaattgattattgtgaattattatatatttacatggcatatccaataatataccttaatatttatatttattaccatgtgctacactgtcaataaagaagaaaaattaagcatgaaagtgcaaaaaaaactgtacatgccattccagtctattatgttactttacactcttagaaacacacatgttttggtcattttaatggacctttgcatttaacataaacgcaaaatgaatataattttagttctctttgaagattatatcctgatctttggtgataaaaattcagattcaagtgccatacattacttagtcctttgggcaataattagtcatgacctgaaactttcttaaaattttatgaagatatcagattaatgtttccatattctgtaggattaattctctgcaagaaatgtggaggttctggatattctcgacgattatgaactcattttctggattttcataccattagccagtcttactcttcgactcgttttttcttctaattgtatgatagctatattctttcttttttcccgaattctaaatttgtaattgtttcttcaagaacattcctacttctctctacatatatgtaatattataggttctaaaagaaagcaatgaaataaataatgatgacaaattatagattctggttttggtgcacatgccaatagctcatgagatcaacaatcatgtgtctaatagattgatacatagttcttgacgatgtgcaattatatgtgaggtgattagaaaattgtgacttgactagtaacttgttcttgaagatgtgctccttgaggatctcaatgtgttcttcgaggaccatgacttggatgagctcccacaataccatgagttgccccttactacctaatgacattgttgagctctatgaggaccttgacatagacgagctccctgagtaccatgaattcctcccatcgaggttctctgagggccatgacctcgataaactccttgagttgctcactaatacatgaggactttgatgtgtctctgaggaccatgacctcgatgatctcctcgagtccacgagtaccacgagttgctccctaaaagggacaagtttgacctctttgtcgcttgtcactagccatcttgagctattaccatgagcccttaacccaaataacactatggtagaaagaatagatggagggatagtgaggaatgaatgaagtaggagtgttcgcggtgcgggtgttgcagattttgactattttttaaaattaactcacacaagcgatttttctgattttctaaactgtacccgcaccgcaaaactaaaaaaccgcagaaatcgtaccgtaaaaaatagtgcggtgcagtgcggtttctacggtttggactatc

SEQ ID NO: 116106 - DNA, 942 bp, Cannabis sativa
  modified_base (27)..(28): a, c, t, g, unknown or other
attttttgaacgtaaaaatgtaaatannttacaaaaaatggtgccttatgtaattatttcattaaaaaattacatgtgtttttataataaaaaaaatgaaaaagttaaccatttctgcgtttaattaactgatgttgtgactaataatgtagttattttaaaagtctatttagactttttttgtttaataaaaataaataatttaactactatttattaaagtttttatatttttttttttttgtagtgttgttaaaatgtcttctccacaaagatgaatgtagtataacagctacaaaaggagtcgtcacaacattacctgttttcaaaaactaaaaattgaggaattatataaaaaatgttagggacaaaattttctacatgaaatgtttagattagaggtgattttaataaattttgtgaaagtgaaatttataccttaaattataatgatgtaaaagaaggtcatgattcatatgactaattatttctataattaaatatttatttgtcttactgttttgcaataattaaaatgataagtaccatatgaaattggttgtgcagtcgcgcgattgttttaaatatcatgtgcctagcgcggtcgttataatcattgaaatataaaatttaatttatgttttttttttttatttaaaaattcatattttaggtagctattaatatttatacttaataagtgaaataatataataatccatgatgattgactattttctaattatttttaaataaaaaaaatcttttaattcctattttattactttttttcttattgtttgatttaattattagtagatattattattagttactataaaaaaaaaaattgattacctattattaatttaaatatatttatattttactctatcaatatatcaatatgtatactttattgtggtatatatatatatatat

SEQ ID NO: 116107 - DNA, 2902 bp, Cannabis sativa
agagagagagagagagagagagagagagacttggctcaaaaagcccatcctcactcaaagaaaagtggtaaaccattgactaaccctgcaaggggcaggagtcataggttaacacgatacatgcacaccataatagggtctacgtagctcatgaagccaagagtcacccactaagggtgccaaggacctcatggcgtaaattctaaaagatgaaaatacattgttaaaaaaaatgacaaaaagggggccttaggaataagagcgtagaaggctatgtgaacattgaaggggtccaaagctcgctatgagcatcttgaatgtaaccagaaggaacgagagcaacccaaaaggttcaagatccttatgaaagatctccacctctcaacggtccaagacctaaatgagggaccttcaattctaaagggtccaaaaccccaaagaagaatgctcaactctcaagagttcgagatcctaaaggaagacattcaactctctagagtttgagaccccaaggagaggtcctaacccctcaagggtgagtcactacctttaacaagaccaagttgctgacaaagaaccaacacttatggaagattatcgttttatggtcctgaacgacataagagtataaccaccttccacaagggccaaatgcttagcgaaaaaacaaatattacctcgtgaaaaagtctaagaaggcccgtggagcaaacactcattcaccgaaagtatcatttatcataaaagagatttcttaaaaaaaatttcttgctatgtaccataggagaagttttgaaaatgaactcttatgatagggaagaagagctcattagagaagatctcatgatgcaagaagaattgagctacaatcacgagagaaggctcaaggtaaaataatttaatgggatcacaacgatttgtgcactaggcaaggtctcgtaaacattcttactactgtcaagacaagaattagaggctatgagaatgagagtccactatagcagcttcaatgagaatcaaacttatgctctatatattttctttagaaaatatttaattgcaaggcaatgattatagtagcttcaatgagaatcaaacttatgctctatatattttctttagaaaatatttaattgcaaggcaatgattaccaagccaagaaagacttttgcaaaagaagcttcagcacccctaaggaatatttacattaaagaaggtcaagatcatgacccttaggccaaacattgattaaagatgaagataagctcgcgagcgtgggttcgaatcaatgcacataaatgattagctcatgctcaacatgcaacacattacaagaatcctagcccaagtgtgcttattcgaagatgtctcacgaagtgcaagaattcaccaatgcaaaaaataaggagactagaatacaagagttcacaaacacacttagaaagtatactcatggactcgggcaagtgttaaccccaaaaattcgttaagaggaaatatagggatcacatcaacattggagtaaagaaagaatggaagaggcatgaaaccaaggagcttgttggagctccatggcgcgatgcccccatcagcaagagaatctctcgctaatcattagtgtcgtgccacccccttcagtgagagatttctcgctgtctttgtgttgcgctgccccatcagcgagagaatctctcgctatcttcgtgtcgcatcgccccctttagcaagacaaggtcccgctcattgtcacctcatcacaacgtgctaccaaagcaaacaactttgaataaagggatctcttctaaaagccaaaagggtgtcaccactaaaaggtcgttgccaccaaaagggtgttttcttataagagttggaagagaagccattagagatggaattaaagggaggaagcaagcaccttgagatacgatgagaaattctaaagagaaccaaaggcacgcctaggaaaggacaggtcagaaagcacgatcacgaaacctgcaaaagttgagataaattagtggatatacaggggcgtgcattaggtacaggtaatgaaggcatgctcatgtcagtaccatctgacacctgaccaacaatgtctccatcccactaccaccaacaatcagaatagtacatggtcccccataaggaccacctacaactcattttgtgaacaaggccaatagagcccaactataaatacccctccactctattagaggaaagagggggttggaaccttataaactagagggaccattttctaaatacagggcatttcacatcttctctcttactcactctctcttatatatttacattaagattactacaccatttttatcagttattactcaagatttttatccataatatcattaatgagttcttaccgtcaacaataatgatgtgagataaggtagagaaaaaaactattgacaaaaagtgaattgttttttaaaacaaaaaatagtattttgttgttcttaaaattcttactttttgtaatttaatttttggaactagtttttaaaaaataaggccaaacacatctaattttttttctttttaaaaaaattaatgatgccaaacatgcacttaacttctaggattgactttgttagttttcgttttatttttagggaggctaattatcttgctcattatttagcccatatgctcttgattatggagtatgttatttggaataagaatattacatgcatttaacaaggtattaggtaccagtagtgcttaataccatttcactacaaaaaactgtcacttatagtgacaactttttagtgacgacataatttttttgtaactaaatatgacttttagtcataacaacatgttacttgtgactaaaacatagtatttagttacaagttgttactaa

SEQ ID NO: 116108 - DNA, 3568 bp, Cannabis sativa
ttatttctttgtttttatagtaacaaagttagttggccaattactctctctctttctcgggccaactacctccaatgcagataaatagacactaacactcaaaactcaagtcaacataacacctacatgaatctctctcgagcttagaagaaactcttctaatttaattatttccaagaaaaccaaagtgaatgaaggttgtaaatggatcatgtgtgtgtttgctcatatgtatcccaatgtgagatttacgtaaatggtgttaatcaccatagtcgtgtatgattgagttgtaattttaatttgtaggttcttgattcatgtcaataaagatcattcaattctccatttattcaagctaagttttctagttttattgattttctagttttagaattttgattactttattttagtttgaagtagtgggtgtgttcatgatcgtggttctaatcaaacagtgaattgaatccactacaaataatattagagctacaagttccaagatgaggtttcaagactagtattcaaaccttcaagaaccacattaaaattttcaagattcatacttaatctttcaagaatcaagactaagatagctacaataagatttgagaaagaccagttcaatggcttgaataattttagtttatggaagattaagatgaagacatttctagttcatcaaagcatatcaaagacattcgattatgaggcaatgagtcttactgaagaaaggaagaagaaaattaaaattgaggcaaaggcacgtagtgccattcttcttagccttggagatgaagtgttgagagaggtatcaaatgaggagaaaatccttgggccttggaacaagttgtccactatttatatgaagaaatcccttgcaaataagttttacctcaataagagactttatacacttcggatggatgaaaattgagagtttaggaaacatctaaatgactttaacatggtcatacttgatctcaccaatcttgttgtgaagattgatgttgaaaaccaggctatcatactgctcagttttttttcaaagatttacaaacattttgtagacacgatattgtatggaaaggatacctttaccatgacaaaagtgaaggtttctctcaactccaaggtttgttgattgttaaaggaaagtatcccaacaaggaatacaagggaaactagaattccaaaagatacaaaggtaatcaatcaaagtcaaacacaataaaattcacatgtagttcaaactcttgaggaacaactagaaatagtgttattattgtaagaaaaaaggccactttagatatgaatgtatggccttgaaagaaaaattaaagagagataacagtgaagggaagaacaaaaaccaaggagatactaatgttgcaactggatatgagtgtacaagtgtttttgttgcatctagtttagatccacgtggagggtagattatggactcaggttgctcattccatatgacaccaaataagaaactgttgggctcattcttagaggaacataatagaacaatattatcaggaaagaacaaaagacaaggaaatcaagggaatcaggattgtcataatcaaatctcatcgtgacaaatttagaactctacactaggttagatttgtacctaaacttaaaagaaatctgttatcttttagtatgttcaacaaacttggatactcaataagtattgatgatggtacgatgattgttaaacaaggttcacatatcctaaatgcaagggaagttaaataatggtccatacttcctagaaggagagacaatgacaaggtatgttgcacctgctattagtatacctaagagcatctccaatggagatgcaactaagtgatacaaagccaaaatatagctcacttaggaaaaaatgtgctccaatagtatgccaaaatatgatacaaatatggcacaatatttgttatgacataaaatttacatcaccataaatgcacaactttattattaacttttatgtcacttttattatttattagtatatatagttatagcattgatgatgaactatacttatattccttttttttttttgttgttttacattataaaaaataataataatgatgataaagttattgtatttttatacttttaattaaaaaagtattaaattttgtattaagttttataattgtgcattgaatcacaatgctaaaactgatgcaaatataacacaaaatatcttttcgtgctaaatatagcataattttcacatccctcattgtaaattgtaacaccctactagtttaggcgtgttaacatgatttataattcaactgtgcatctcgttgctaatcaatgagtttattaaaaatcgtgaataattaaaattttatttaactatctataattatcaaaataacatacttatattaaccaggatcccatttaccaaaaatatttataaaattttcacagtgcgtaatataaaagtttgtcgcctagcgaccatacaaaatatgcccagctgtcccaaagaccgtacgctccagacctaacttgcccgacatatacaatctccatctactcgccctcacggctgctcaaccttagtcttgcctttacctacacatgcaaacaatatctgtaagtcaacatactcagtaagaaaagcatagataatatcatagcaataactcggattataatcaggcccccatacatccaaccataccctatcactgtgtccaacatggtactgagtctggatagttcctacgacagtactattgaccataatatcagcctatactcgatactctagtcatactctagtcgtactggtgtgatagcgtcgatcccgtacttgagcgaaacatgcatctatttgtatccaactttatgtctactgataccgctatcaatgtaatctaatagactacataaacatgcacgttaaacatgtaaatacatatgcatatcattatactaatcttacctcattgttgagttcaggtgtgccggccaacctttgtggaacaactgctcaacgaattacaggcccctaaatcacattagccgtaaaactggtgagtgacacactaaatcacttttcgagacttaaaattgaaactaaaagtttccttgtcgatggataacatggcaataacctaaatgttgctaaatctacctattctatctgtccagtctgactggcgtaaatttcaagctctagaaccttacctcatcaaaaatggcatatcccatagactatcttgtcccaccactcatcagcaaaacggtactgctaagagaaaacatagatatctaatagaaattggccttacattacttgcccaagcttccatgcctcttttcttttaggatgaaattgttataacagcctgctatgtgataaataggttgcctacactagttatagccaacgacactctgcacaaattaattcacaaacaacctgattactctactctcaaagtgtttatttgtgcatgttacccatgttggaaatatattaccaggatctagatttactaccaagtaagtttcatta

SEQ ID NO: 116109 - DNA, 4157 bp, Cannabis sativa
aaaaaaaaaaaaaaaaagattacagctgttgactaactaactaatctcttaactaacagctacttagctaagtgacaactcattaagttgttgtttaacaccgccttcaaatgaaaaggggtggaagttatttttagtttggacttgagatagagaaacctgtctgtagattgagctttagtgagagcataaacaatgtgatcatctgcaagacaaattgaatagacaattctttggccataatgtgattcttgacaatgtgtaaattaatttctatgtgtttggatctagcatggaagacaagattaatagtaagagcaattgcactttgattatcaacacacagagtaggacactactgaaaagagaactgaagtttagataggagagacaccaaccattttatttttgcatcagcattagctaagacactgaattcactctcagtacttgatctggccactacttgttgtttcttagctgaacaagatattagattaccaccaagatacatgacatagtcaccagtaaaccttctatcatctatacaagaggcccatgaacatctgagtaaccctgtagggagatcaaattcttggtgtgaaatgtagtccataaaaaatagtgcctttcagataccttaatagccttgtacaagcctcccaatgaattgtagcaggagcatgaataaactggctaagtttattgatgacgaaagttacaataggccgagtaagggtaatatattgtaaggccccaatagtacttctataaagtgttttgtcttcaaatggttcaccctttgttagagattgtttagtagctgagctagtgagatttggacaactttgggcaccttccatatggagcttgacaagaatatttgtgatatatttgatttgagagagatgcatgccaatagcatctctaaaaatttccactctaaggaaataatgcataggacctaaatcttttaaagaaaatgacttgttcaaatctgagataagttgatgaatgagctgaggattaggacctgtgactaagatgttgttgatgcggttttttgtcaacagatctaagaatattgtaatcaaccaagatgaacacaagaaatcgttaatcaaagtaaaccagtttgttgaaagaaaatttgataaagatgaacacgaggattttatagtggttcacctctttttgtcagtaataggctagtccacttgagttttactagtctcaatgcttgaggagagttctccagagttatgtcctctaaaagttcaatcctcaagtgaatttttagaatgagagagtgagagttcgtgaggatgagtcgtccctctttgcaattgatatcttctttatataggttttcatctaggactctcttagactttaaactctcttaaccccagacacaacttccattaactatggtcgggttagatttttaaatacaaaatgatattaacaatcatatttcaaaataaatatctataaaaaataataaaagctgaacatatcttctatatacacgtaaaacttctttttgtcatgaggaacacatgctgagatcatgtcgttggccgagtaagggtgatatattgtaaaggcccaatagtacttctataaagtattttgtcttcaaatggttcacccttgcttagagatagttttgtagctgagctagtgggatttggatagaaagacagaaaagagagaaagaaatggaacaagcacattgatgaggagatgttgtcactgaagaatttaagaaacctaatggtcaaaagcttgtcggatgcaaatggatattcagacacaaagaagattaacactagaaggacaagatcaggtagaaagccaggcttgttggcaagggctttacacagaaagaaggtactaattttacataaattttttcacctattatttaacaagcatccattcgagtaatgatagtcaaagttgctaatgtgatcttgagattgattaaatggatgttacgataatattcttacatggaaagctagcagagaaaatttatgtgacacaaccagagagatttgaaaatggagagcccaatcaagtttgtctattgttaaaatctctatatgctctaagacaagctcctagacaataaaatctcagatttgatgagtttgtgaagactattggatactgtcaaagcaggtatgacccttatgtctactttaatcaacatatatatatatatcacttattctatgctaatgatatgtggttaatcgagaaaaatagaactaagatagacaaacttaacgggaaacttagtgtaaagtttgaaatgaaagacctaaaaccaaccaagaaaatcctaggtattgacatcaagaggaacatacctagcactatctttctatctcaaaaggggtacctagagaaggtgttgaacaagtttgatatgcaacaagctaaacctgtgtcaacactcttatctccacatttcagactatctaaagaccaatcacctaaattagagtaagaaaggtctcaaatggatgacataccttatggtagtggtgttggcagccttatatatgcaatggtgtgctccaaacttgatatcgggtatgataagaacatggtgagcatatatttggcagattttggacctcagcattacgtagctcttaaatggatattaatgtatctcaaacacactcgaaacatggtaaccatgtttggaaatattcattcataaaagagattaccactggttgtgtaaattcagattatgcagggtgcattgacacaagaagatcactgtttggttttgtttttactatcttaggtggctatgtaaattggaaatcaacattgtagaaggtggttgctctatttttcaactgaagcagaatacatggctcctatagaagctattaatgaggctctatggccataggaattcactaatgaacttggtctcacctcagaaaaaatcactgtacattgtgatagtcaatgtgcactttatcttatgaaaaattccatgcatcatgagaggtcaaaacacatcgatatcaaattgcactttatcaaggacataatctcaagcaaccaagtcaaagtaaagaagatcactatagaacacaaccctacagatatgctaactgaatgtgtgacttaagataagtttagacactggctagacttgctcaacattgaaggaaactgagtcacatcatgatgagacatgattggagtagacatgtactcattacattcttctatagtatcacaattaaggttgaaattttcgtaattaagacactaaaccttgacacttaagaaaaccaacccactaactatcaaaatttgttagttgtttgtccctaaccgattatatataacctatccttacacctattcaagttaagactttcattattgtaactagagagattgagagaaattgagagttgaaaaattagagtgtgattcttggagggttgttaaagagattgatcactctagaagtgacttccctcaggtaaactgcatttgtaatcgagcaagactcgcaagtgtatcatctttgtaatctcttgactgatgttaaaggttcatcaataaagtatattaacttctgcttccttggattagattatagatcacattgatttattgattaaaccacataattttttggtgtgatcttttcttgatttgttttgtttaggaaaatttgcgtcaaaaatctccaaaaaattcactttgatgcagattagtccccaagctcgatcaataatggtaataaggtcacgtttcttgcaagtccgttagtcctcattttaatagattcgtttacttattcaaaaataccacgtgttgaaacataattggtccaaattattgtttaatttaaataatataaaataactaaataatttaaaagtcataattttttctttttttttctttaatttcttttttattttttcatcttctttgtctatccaccccgaccctcacgaaaacaccccccgccacacccaatcctcacaatagcctcaccctaccctcacaatggacgattgtgctctggccaccctcgccccatgttgggttttatgccctaaataatactccatttcaatgtaatccattttattcaacat

SEQ ID NO: 116110 - DNA, 1568 bp, Cannabis sativa
ttggaatgtccgaggagccaataatcaaactaaacaacaattaataaagaattttattaatgctcaaaaggttaattttgtgggtttcctcgagactagggtgaaggctccaaagcttcgagccttgtactctaatgtttttgatggatggtgcttctcttccaatattgcttggcattcgggaggtaagattactatggcttggaatccctatagatttactattgatatcatcaaatgtactagccaactaatgcatttgaggatttcaactactgagggatttaatagtttgctcactatggtgtatgcttctaatacccaaggagaaaggaaagtattatggaaggatttatgtgatctttattctgatggaaactggtgtgtgatgggggacttcaatgatattttagctaaggaagagagggtggggcgtagggtgagatcttatcccgactctaatttcctcaattgtgtgaatttctgtaaactcgaagatgttaaagctagtgggaattttttcacttggactaataagcaaccagtggctgaccgaatttactctaagatagataggattatagccaatcaagcttggattaataagtatgaatttgttgaagctgtctttcttaatgagggactgtttgatcattctccagctatcctctcctggcatcctcatatggtgggggggaaaaaccgttcaaatattttaggatgtggaaatcccatcctaagtatgattctacattaagagaggtgtggagcttgagtatttcgggtagcctaatgtttcaagttgtttgcaagttaaagcaacttaaaggtagattgagggagataaacaaggaagcttattgtgacttacagcaacaggtgcatgttgccaaggcagacctcgagaggctccaaaaccagctgcaacagcagcccttcgaggccaatttacaccagcaggagaaaacagctcgggaaattctggctcaaaaacaacaggattacactttgtttttgaaacagaaagctaagatggattggatacaagatggtgattctaattctgccttattccatgcttgcattaatcatagactgaggcaaaaccgtattttatccattgaaaatcaagagggcagcagagttactgaaccagctcttattacagtagcgtttctagacttctacaaaagtgtactgggaacttgtagagatcaaaggaagaaagtggaaagaaatattcttaacaattgccctttagtcactacaacacagccagattggtgattgtaggaattcacaaaggatgggataaaaaaggttgttttcagaatacctggaaataaatccccgggtccagatggcttctctagtagcttctaccaagataattgggatcttattggagatgatatctgtggggctgttcaatctttcttgacatcgggtaacattctgaaggaaattaactctaccataattactttggtgcctaaaattaagtgtcctaattctgttaaagattttagacctatttcttgttgcaatgtgatttataagattgcaac

SEQ ID NO: 116111 - DNA, 2107 bp, Cannabis sativa
  modified_base (2045)..(2073): a, c, t, g, unknown or other
aaataaatcatcataatttaataattaaacataaataaataattctcataattaaatcctaattatctactaatttccaaattaaagctaagcggcctttacagttaaagtcttatatatgtggactatcggaatactagtggcaaaaggtattatgacacgtttactacccaatattcaaaatcagaataaattaatagaaaaatataacggaataaatgaagaataatcggaataaatatttgtaatatgttatctactaaaactgcttggaaatggaatgatagttatttatcttgtttactttgtcaagaaacgtaatcggaatgcttaaattgactaaataatcctttttagttaaactataatatacggtagttattttataagacatattttaaaggataaaattatcattctaaatttaatattaaaaaataaaataaaaataaataaaagtcgttacctataatggcattccttagaaaattggtaaagaagttctctctttcttttctcccttatttaatcaagttctcattttcataaatttaataaattaaataaacaaatttaagggaatgactctcttactattgattctcattgcttaatagtaaacataccattagattatagaaggctttaccaaatcagaagagccaaaaatgtcagtgaacgaaaaagttcacggttatgatacgaaaaagttacatcgtctctttttcactttccctctgtcaatgagaaaaatatcaacatacacgtggtcaagccatctataatctaatacatttggccactccatacgacctttcccataacaacctatacgatctcccccataagaccataaaaacatgtacaatctctcccataagaccctattaattcatgcaaccctaacaaaaattgtgcaactacattacttgaaaagaagctcctataggtggaacacatttctaaaaaagaaaaaaagaagtggttgtggtaaagtaatgaaatgggataattcaaagtaactgagtaactatagagggtatgtttaggaaactcataaagttgtaacgttagaatagggagaataagattttgtctgcccacagttatgatacacatacgtattgaacttttattgtgcttttttttttttttgaaaaaaatggaactagttgaataatgtaaaaaaaaaaaaacagacgttgaatacatatctaataaagataagaaaatgaattggcatcgtgaagtgatgaattagattaattgtaattcagcaagttactctaagttaccaggtaactatcacatgtaagctcactttttaaaaacaactccacatattgacaaagtttaacctcgtcacgcagaaggcacatccaatcacgttgccttttctcttgtaaagcgatgaaatgttgcagttctaagtaaccggttaactctgtcatgtacgtttaagaaagaaagtgactcgtaaagctataaaatcggagaatagagtaataagttttgtaagactagagttttgagcctttttttttaattattttttaaaataaatgaacatcagacaaaaacacatatccattaacgccaacaacacccaacattgtgaagtgataaattgggtaaactgtaatttaccgagttagtctaagacatcaggtaactatctcaggtaagtttattttttaaaagttcgtacacctattcgaaactctaacctcatcacacataagtcatatccaatcacgctaccttggctctggtaaagcaaaaaattgggtaattcgaaaaactgagtaactctagcaggtagaaggtagctcgtaaagttgtaacattgggaaatatgtttgataagtttttgacaacctatagttatgacatacttatgtattgaaaaaatataaatattttttttttagaaaaaatggttctagtggaacagtataaacaccagatgtagaatgcgtatccaataacactatcagggctcgtttggtacgcgtataatggttgtattgtattaaataataaannnnnnnnnnnnnnnnnnnnnnnnnnnnntgtattaattattacgaccaaattttttaataca

SEQ ID NO: 116112 - DNA, 2583 bp, Cannabis sativa
tatggcttaaagcaagcatctaggtaatggtttgaaaaattctccaatgctcttgaagaggaaggcttcacacattttgctactgatcattccttcttcatcaatcattaacaaataggtttcatagccttacttgtgtatgttgatgatgtgatcttagcaagtaataacttgaatgaacttgaagctcttaagatcagattggacagcaagttcaagctaaaggatatggaaaaattgaaatactttcttggtttagaagtggctagatctaaacaaggaattcttgtttcccaaagaccatatgctctacaaattttggaagatctaggatacttgggatgcaaaccaatgaatactcctatggaagccaatttaaagttgtgtcaagatgctaaagatgatgatcttattgatgctactttatataggaaaaatattggtaaattgcaatatcttaccataacccctgacttgagttttttagtcaacaaattgagtcaatacttgggaacacctagagcatctcattttgtggctgctcaaagagttctccagtatgtgaagggcataccaggtcaagggatcttcttttcagctcaatccaagatcgaattggaagcatatactgatttggattgggctgcttgcctagatacaagaagatcgaccacaggttttgtatttttcttcagaaatctttgatttcttggaaaagcaaaaagcagcatacaatttctagatcttcagctgaagctgaatatagagctatggccaatactacttcagaaatcatatgattgttgtcaatgcttaaagagcttaaaattgaacacaaaggaccggttttgatgcattgtgataacaaggcagcacaacacattgctgcaaagtcgttctttcacgagagaacgaagcatattgaaattgattgtcaccttgttagagaaaaagtgcaacaagggataatcaaaacagctcacatctcaaccaaagagaaaatcgcagatctactaactaaagctcagtttcttggacagtttaagaaccttaaagacaagatgggattgattgatatctactctccatcttgagggggagtgttaagaattgctttgttgtaattggttgagtttgttaattagaaatgttgttgacagctgctggtttgttgttattgttactactggtttgaaactggttttttgtattttttgcttcagtagtacataagcttagtcgagctaacttgcatcaattgagatccattcattaaagatttcattcattttctctcctaaaactaaaataagatgatgaaaaattcaagaattagtagttattagttgataaaacaatcaaaaggagtgcaatggaagggagcaagggacatgtgtatttcactcgaggggaggataatagttttctcagagtgcacgttaatgatgatgataaaaaaaacacatgttcagttaggcaaccaacttcctgagaaaatagaaaaatgcacaatttgatatcatcaccgtccctggcaacgacgacggttatgtatgcataagaagaccaacaaatattggaggctcgactacagcaataagtactcgatattggtagacgatttttatggtttgaccaacgactcgttgttcagtcttagggatgatcaaagcaaaaatgaaaaggtaatctattgtgtgagaaacgacaagtattgtaaggcttatagcataggcttagtgcacgactgtctcaatgccacaggaactaccatggccgatggtgttgctgtgcatgtgactaatgtttaatccgccctgcaccacctcattatctactgtgctttatatatttatactatcatctatgtatttctctttatttactattattgcaattgtgtcatttactataatttctttataatcttacttttgtcacctttgttctatgtctattctcttcttactcttcttacttaatgaaaagaacaagtcaaatggtaataactcataatggttaatttgttcttattaactcaattgatttgttaattattgatatgtgagtctttgtgaatttcaaagaatgtttactggccattcgaattatttttaaacaaaacctctaaatgtattatttagtcaattatataaaatatagaaacggtcttaggttctgttttggagacgaggttcgaatccaggactggggttgagtttatagtaaaaatagtataagctactacaaaaggcattattcttgtcggtcctcaaatttgctttttttcaatgacgatcactaataaaattaaatgagtatttaaaatcgatgatagttgagaatacacatcaattttaaacaatcattatgtattagtgtcggttgaaaaccactattcgaattaaaattacccattataggcaatggtttacacctataggcaaaagtatagacgacattcttaacagtcaactatactttagcctacggctacgagtacttataaatcgatgagtatccttaatttgcattttatataccctaaatttttcagatctcatattctctctctctctctct

SEQ ID NO: 116113 - DNA, 1894 bp, Cannabis sativa
  modified_base (103)..(135): a, c, t, g, unknown or other
atgaactttacagaacatacttttattgtctgtttttaaaattgaaaaacaaaagtagttacagaacgtgtttttgtttttcaaaaacaaaaattttactttnnnnnnnnnnnnnnnnnnnnnnnnnnnnnnnnngttaccaaacgacacctaagttttatcaatagtattggtgaatctctacaaaattgatccaaaaaagtgtctctagtcgtttttattgtagtcttggttttgtgtacaattcaaatttaatgttgtgagataattttacataaattgcctaagatgatttttttgtcacatttttacggactataagttatttttttgcgggtataaataatatagaagaataaaatctacgtatgataaacaaaaaatttgccctaaggactgtgctaggtttctccttttccctctgaaattgtcagtgcttttttttttctcctaccaaggctcgccagccatttttggcctttggtgtggttgtggccaggcatcttcaagagtgccctagcttatggaatgggtttttcttcttcttcttttgtttaggttttgggttttcagggtctatttcttagggcaagggttggggtttcgtggtttgccggtgttggccatttggtctttgcggtgggtgtccgtggtgcttgatcgagcttcgtgggtgtggatatggtggcctctggtagtgggtgagggtcaaatctatatcttttgggtctggtttaggcattctggcgttcttgctgcgtggtgttggtggttaacgattggagttttgctttggtcggagaggaggttgatggctggagtgggggtttatttccaaaaattgaagctaaggaaatgagattgtgggggttttcagactgttgtgtggcatctgctatgattataatgtcttcaatttattattgcttttttgttttaagcttattttcaataatggtattgatacaccatcttgctattgttttggtagtagggctttgttcattcatggcatagttttttgtcttgcttccttttggaatgtgggagattctcaattgactcaaagaattattctagtgtaagtagcatgattatctttttccatgttcagatctaaaggattctcatattggccccataatttatggtgcaattgttattactatgtttggtcatttgttattgctagagttgttattacccaatttttattggaggatctttggatgatagtcattgataggtgtgatttgtcacatgtatatttataattagtgcggtcccatgcttaagaaagagagagtgagaacttatgatcagttagatcaagggttgggcttgttggtggagaggcagcgctgatccgttggtgattcgaaagagagaagagacagggagagagaagaggagagtcttggggtgttggtcctttggggtttgacaataggtgcgacggggatggtgttggttcgacgatgggtgtgacgaggtgggcaaggtctgacgattggtgcgacggggtggcgtgtggtccgacaatggggtagagagagagagaatgttaagtttttatattattaggtttagttaataaatgggcttggcccatatcatattgtaattttttttttcaaaaaagtaagcctttttatcatcggttgtgcacaaacgtattttactgtcggtttaacaacccatgggaaagacctatgcattagttataagccgatgctagcatgcattggttacaaaaaaatcttacttttagtcacatgattgaaagtaaaaaggttgtgactaattataaatcatcattcttatattgtgactaaaaaatccatagctaaagatattagtcataaaaatgacagtttgttgtgactaaatgtat

SEQ ID NO: 116114 - DNA, 1234 bp, Cannabis sativa
aagagacacaccaagtcccccatagcaattgaaaacatcattttgttattttctctattccatctatatatcttaaaacaactaactaatatattttttaaaaaaattacgtttcagtttcaaaacaatattttataatcataaaattttcaaactgatatttcacaattattgttttcattaaaacccaataagccgacaaaatagagaacaacattttttttttgctcttcgaatggcatcaacacaacaaccatttacctccacataatatacaggttccataagtcggggggttgccataagaaaagatgaataagcaacacgtcgagctgtgggaatgatctgaccagatccccgatgcaatgactcgggggcaatttttgcatcaacaatcttgaactttacatttctaattggctcatcgcagagaggtccttcacgagcaccccactgaaatctgtcaaaatcatcagattgttgttagtaggcaaggaatacgatccacaaaaatgggatcagggaaaaagaaagacttaagatactattttgtttacccttgaactatggaatctttgaccgcatttagcaagcccttgtcgacttcagttgaaagtgtatcatccaacaggatattaggcccctaaatgtttgccatttaaaagcaagtagtgagacaagacttggggatgattacatgcaacgtaataaatcaatttagatttcgtccataatacatgtccgcgtgttttttctttttccttttttcctttatcatttttaactagggatttattactaacctgcttatcaggaccaaatgcccatatggaccgtgcagcaagcacatcccattcatatcttgtctgaaaaaagttaccaatatctttccgaggccaatcaaggcttacaacactgttctctatgtcctctgcaagtcccctctccagtggttctgcaatctaaaatcatacaagaataacttaaagattgtataaacatatattagaagattctcagtagtgcttaagtgaaatatagatcagattatttcccctaccatggtaattttattctttttgttgggtgtttcagcaaaacatttcatagatgaagactccaccactgtttcacagaatgacacaacaggatctgccacctacaacgtttggaatcgaacctaagtgagaaagcataataaacagaaacccttggaaaataaaattttaaaaaa

SEQ ID NO: 116115 - DNA, 3076 bp, Cannabis sativa
atttagggcacaaaaccaaacatcttttatttcatacctttcaattacaaaagaagccctttatcaccaaatatcttggtttgccacaatgtatttctcatgctaaatatcatgcttttacctttctcaaagatagagtttcctctatcatctattcttggccccataaatggttctccaaagcaggaaaagaaacccttatcaaggttgtccttcaagccattccttcgtatgctatggcttgttttcgcatgcctactaagatttgccatggaaatcgaatctctcgtctccgaattctggtggggatcctctactgaaacccataaagtccattagaaaaattggaggtttgtctgccaatcaaaatttaagggaggtctaggatttcgatctttaacccattttaatcagtctatgctagcaaaacaagcatggcgtatctttaaaagccctgagtctttgcttagtataacccttaaagctagatactttcccaacactttgatcctcaaggatgcccctggccatagtccttctttttctaggcagagtattctttggggtcaaaatttgatgaagcatggccttatttggaaggtgggtgatggcaagagcattcaaaccttagaggatcactggctccttgatttcaggttcaaattctattcatcttctcctcctcttgaacccaatctgtccttttttgtttcccatctggtgcctgggagggatcctactaagctccgccagttctttgatgatcatgttgttgatagaattcttcacatgccaattttgagtaatagttgtagggatgagttaatttagggacatgaccaatcagacctctataatgtaaaaattgcttaccatcttgcactctaatctagagatctgccttcctcttcttcttttactacaagtaagcaattctggtcagaactttggatgtccactgccccacctgaagtaaagcacttggtgtggcatgtactttcccgttccatccctattgcctcttcgttgttacatcatcccctcgcctatatgccccttatgccaactgaaggcagagacagttgaacatgctatcttgggatgttctagtgcaaaaaaaagattagaaacacttttctttttccaccttctatatggagaataaagatcatgatattgatatgtttattgccaaagcgtttgagatgtttgataagcataacttggctatgttattttgtctaatttggatgatttggaatcagcgtaataatctatttcataacaaaagaatcatctctcccttggagctttttgatcatgttgttagttacttgtgtaaatatgttaatcctcatcaatctgagtttaaattatgccctcaaagaacagaaacaagtgaacatgtatcttggctcacttttggcttttggagaatcaacacagatgctgctctaaataatgtttcaaagaggcatggccttggagtggtggctcgagatggtggtgacaacattaaagctggattcgtcatcccaattgatggggtgatttctcttaacattgctgaagctaaagctatccttgttgcgatttttttggatctaaactgtcaagctcctagtttcttttattgaatcagattataagagtgtcgtggataaacttataagttgtataaaaaattcattgttgttcggtccgagcctacatatcacttatgtttcaagatagtataacaatttagctcatctttatgctaaggcaggtttaagattaaataataagtttgtttggaatggttctctgccttctattatagccttaacatcttgtatcttgttctttttttaaagttcaagttttttttttttttattaataataacaataataaaatttatttttatgttcccaactagttatgagtaaatataattttggagttaaaaaaattaaaattttagaaacatttagggtgactttattgagttatgtgatatttgtaaagctcttttaacattaaaatatttaatttaatgcattgagttatagggtagttatctaaaattttcaaaagtaatcatccatggtaaaaaaaaagtctctatgttataaaaataaatatgtgtacctacctacaccatatatatatatatattaaaaattgtagtactattactattttaaaaaatttaaatttaatttatcatttaagaaaataatattccaatccataactttatagtcaatcctttattattattattattattatttttattttgtaaggagtaatggacaattattaaaataataaaaaggcagctactttttttaaaaaataaaaggaaatggaattgacacggaggcaagaataacgaaaggtgtgaatagaaagtttaataaattgatgacttggtcattgtatagtacaaacttcaataaatgtataattagacattttataattggttagaaagggaagagaggagaagagtagactagagacataatgtctagtgcctacacagaccaaatatcttcccacttgtatattatgaggcgtacagagtttgctctgttcaagaacaagaaacaaatcaattagaattagatcatgaacatggccaacacctcatcattaactatattatgtccgatcttattcttgatgatactcataatagaagtagcatattgcagcaacaacagttccataccaacccacctaagtggctgcaacaaacagctatgcggggatttcgaaattccgtatccatttggccttaacgacggctgtttcatggaacctcgatacctgttccagatctcttgtacggattcaacaccctacttgtttagctccggtttcaacgtcagtaaaatatccgttgtagatggcgaggtaactatcatgctggctgttgctaaagattgttacagcaaggatggcaaacagttgactcctgatgtctcggacttcacgcaaggcttgaatgaatttttcagcgtttcctttgtcaggaacaagttttactccataggttgcgataatttggcaaccatcaatggct

SEQ ID NO: 116116 - DNA, 1532 bp, Cannabis sativa
gtacctacggaagttccagagtagtgacggaaggtattttaccgtcaaaaataggacttaggtatttatctgctactcggcataaaacttaggtatttatgccgcaaattactcaaattattataaccatatagaatttcattggagaaaattagacagcaccaaaaatacgagcattctagcaaagcttaaatactcacaaccaaatatgcaaaaaaattccaagagtggcaaatgttcaaacgaaaaataacgagtagtcaaatgtaaacaacagatatgtaaagaaagacaagagaattatagcggtgcaggaagagcttcatctgcttaatctacttttggaagagatttgtgattagttttatttaggtgggatcattcttttatatagaaagcaagtgatccttcaatttatacaacctatcagacaagatcttattacattataactacatttaattcagtacaaactattgacacaatttttcgttaaatgatctaagaagatcgtaaaagataagaggtttgtgataaattaattgagctaaatgaaacacattaaatagaaaaggacaccaatgatttatactagtttactcccattacgcgatggtaataggactatgtgtactttattgttagtattaaattccaacacacaatagttatgttcctaagtgtgtgtggataatagtacaaaaggagattttaaggcaaaatatatatttaagcttatgaataaaaggctcaaaaaccataaacttcataataatggtagttgtaatgttcttggtaacaatagactaatgaaaacatctcagagttgagtagtcccgagtcataatagttgacttgagagagatccctagccatgtgcccagattgactccgcgaaactccaaaatgggtgtttggatcccgccaagttatatccaactcaatatctttcactattcaataccatcaagacatggagcatccaagtctaaggcttgaaagttgaaaatacacgaaacaacaccacgaaaatcaaccaaggcaattagagtttcacccagcgcccatgttgacaatccaactagtgtttccgttttcaggactatcttagtgtaaatgggtcaaacttagtactaggagatgaactagatatgacatatttgaggcatcaaaatcaattttggagaacttttatttttgagcactcgaagcaccaggccctaagcaacaagtgccccaagcacctagcgcccaggttgacattttgtcagcctgggctacttctaagcatcaaactaaaaatccatctcgagaattttcttctacatcatcaaaaatggggaaacaagtgctttggggaagaaacaaactaacttggaggccaaaataagggaccagtgcccaggttgacattttgtcaacctaggccaattccaaggagtttttatgaaatgtcttgaaggcatattactaaaacaataatataaaataattattaataaaaaaaatagaataataattaataattaata

SEQ ID NO: 116117 - DNA, 2641 bp, Cannabis sativa
  modified_base (204)..(209): a, c, t, g, unknown or other
gaaacaatagtctttttttaatttttttctatgaaatattaaataatttattattaaaaaaataactgattcaaaataaccgatccaatccgcactattgcggattggattggattggatttacacttttatgcggatcggatttgatccaaaatatgaaatccgcacttagtgcggattagatgttgtttgaccaaaaaagtnnnnnntggatcggatgaacacccctagctgatatgggttatgagtatttttcattttttaaatatgcatgtacgcccaatagaagacgattggggttgatagtggcacaaatagttatgttattttttatttatattatattattgtgtctgatagtgatatctacccgatattagtatgatgctttgttacagaatgtctaaattttttcttgtgtgtttttttcctgaagaaaagacctcgacgccttatactttcagtttcagagcatttcacaggtcgtgtcacttggcatgatgatagtttttactatccgaagattagagaaaaattcgaggaatttaaattatttgatagggtgaaagaatctcctttcaaacaattttttgagagacaaccattataattttttggggcattgatccatcagttattgttgcacaagatcaaatctgagaaacaagacgaggtccacttttattttgcgaagaagagatacaggttcagctggaccgaatgtgctttggtgatggggtcgaacttgttaccctgacctactaaaaaagaaattgaagagaaaggaaattcgaaccgattaattgtgcagtacttcaatggtgatccatccatcagctttggccaactgcgcaaagtttttaagagttgtaccgaacctgatgatgtatacaagttagggataaccttatttgctatgggcgtcttcactggtaaggaggagaagactacagttcctccttttgtgataagaatggttgacaaccttaaatttttctatgagtattcgtggggaaaaatttcgttcaacaagttgatggaaacttgtaacaaagactttatagaggtgaagaatcgaatgcataagaagattgagaatgaagcttctcagaaggaggcgaagtactaatatagtaattagttactgtttataattttttttttaaatcttagttaacattcattttagaattaagttaattaaattatatgatattatacgacaactaattagcttttaaaataacaaaaaaatatataaaataatcggtatataaaaatagtagcttgttatattatatgataactcattagtttttatttttttttaaggttatttaaatgtattttaaattatattctaccatgatataacttaaaaataactaattagttactaagatgtatatgaataagtttttcgagagtaaccaaagtgtatatcaaattatatgatataaaaataatttttttttatataaaggtaattaattggtttcttattaacactattagtaaccaataaatttaaaaaatgcaggaaaataaaaaaaataaaaaacatcaaaaaacgtcaaacaagtcagaaatgtcataaaacgtcaaaaagtcagaaacgtcaaatttaactaacgtaatacgtcactaataataataagattttttttttgaaaagaagtgttatttattaagaagagctatcgccgaaaagaatagacaacaactctgaaggaactaataataataatattattatggcaaattagatgtaaaaattaacttccctaaaatcaaaatatatttatatcaattacccttattaaaatacgaaaaagtataggttaaaaaaaaaacgaaaaagtcatagattggtaaaacttaaaagaaatagtggagctaacagctaagtcacacaccaaaaatttctaaaagatgacatatgcttactacatatatattataaaaaagtaccagttttgtccttagaggatatttttattattattttttttaacatttgaaactgattattttatatcattaaaacttccaaaaattataatttaatttcatttttaaaattttcaaaaaaaattatattattaagaaatagaatttaaataattaattgtctcttaaaaaaatggtcgtcccaaatttacctcaacccatccaatttttccatctaaaaaaagaagtatatatgtatataaaaaaaaaagtatatatgcttataacattttatttttatgattactaaattaattatttaaattaaataattaattattatactatcacagaaataattatatctttgcatattattattagttcacaaggccacgcttaggaaataaattttattagaaaaatatttaaacgagcaagacttcttttgaaggttaatgaacaatatctaagtgtatgtaacctgcacaattatcacaaagaaaataatataaaaagtacattttaataaaacactgaaaacttgttgacctatagttcttcacacaatcaaaactctctttaaaacttgaaaaatatttgtaaaataatacactaagggttcgtttggaacgccgtattatgtcgtattgtattgtattgtattatattgaattgtattttatgcaat

SEQ ID NO: 116118 - DNA, 1755 bp, Cannabis sativa
  modified_base (1363)..(1367): a, c, t, g, unknown or other
aaggttcattaacgccccaaccacgtaaaaatcattctctaattttcttacagctctataaacttataatattttatcagttgccgaaaaactcggtcaacaattagttaaataaatttttccaaaaataaaaaaattaatatcttgtgtcatgcatttagctattaaattctttccacgtgctttaattaataggataagttgaggaatacttcttttttctatccattaataaaaaatattctcatattatattttattaaaaatatacatactttgatgagtgagttacctaatataccctcactttctacttaaatctatagcatataatttatattaatgtaaaagatctaatagggacatcagtatattttaaagaatatgaaaattaataaaaatcaaaattaaaacaaataaagtgaatttcacatcatttaacttaatttaataattatattatagaaaattactatttatttgtaagagatatatatatcatctcactattgcctgattataattaatgctcattttttgaatatggatgactattaatatcattgtacatcatgcttattatggataaatcttttcttgttttttctttttttttttttttgagtatatttgatctctatatatggcgtcatatgtatgggtcaaactcaatattttgggtgggtttgttgggtagggtcaaatgcaataagatgaaaaattaagaagaattatatctgagctgagcctcaaactaataacaatctataccaaatatatcaaaatatccaatgccaatttttttgaacaaccattacaaattcttttattcctctttgactctgctgtgttgacacatttatataattcttcctataattatatataaataaattgaatatgatgatagactaaaccgaaatccagattaagaaaaaaatatataaatggctgtatattgtatatgatcatgtaattagtaatattctcatatgtatatattactaaaatctctcacattatttaacttataatattctggatgagaactcaacaattaaaacgcccacgcgctctagctcttgctaagtaattaattttatttccacctacttataataagcattatagtcttcggattttacgttattatcaataattatagaatttaaaaaaaaaaaaactataaaataattaatttactttaatcaaaatgatcattttaatataatataataatattttcgtagttggaatattactgtttttttgtctttatttctgtgccatcttcctttgagttgagccagcaatatattgcactcatccccatctcatataaatttatatataaatatatatnnnnntatatatatatatattatgtatagctctaaacagcacatcgtgcccttgaagccaagaaattattataaactgctaatatataaccttgcagtagtgccgtacaggcaacggcgttcgcccagcttaattatatatataattaaaaattaatatatttatccaacacatacgtacccactgtttatatatttttataatatatataatgtatatgcttacaactgtattatctaatgcggtacatgcaaaattaattagtgaaaataattcataattatggggtgattctcagctatatatatatgagccataatttggagattttttcatatcaccgtgtttgaccagcaacatcaatatatatatacatagagagagagagagaga

SEQ ID NO: 116119 - DNA, 1663 bp, Cannabis sativa
tttttttaaaaaaaatttttgcgggttcaccagttcgggttcggacgggttgctcgagttcgggtcaaacctgctcaaaatgttcagccctacttccaccttttcaaaattttatttatcgctctgttagattttattttataatgaatatgttaatggttcactaagataatgttttggcctcctttggcctttgagagaaagaggctaagatcttggtacaacaccagccaacaaagcatccaacatctgaggagttatgtattggcaaaatcatgttgaaggcctttgatttaggaagtcatcgactcatcatatagcttgcagagtatggaggggttactatgccaagggcccaaggtaacactatatggtaaaaaaaatatgttttcttgctataatttgtatgttgtgaacaagtaattttcttctttctctaactcatgtgagtatgttaacaatccctattttgtttgattgaattgattggattgattggatttttgtcaatgtaaaataaaaaacgaccatgctcaagccaaatctaaagtgcatagcgaggatttattccaaaactaaacaaaaatctatgttaatatggtttttcgtaatagatagcgttttctagtgtttcttgattccattaatagaactgcaatttttgtttcacaattatgtttcttagtttttattatttaaaagtaattagccttaagaccgtttagcgtctgttaagagaaattgtgaaagtatgagtaattgatgaatcttcttttgtttcataccctaccatcatcattatgtttgtcacaactttaagtagatttttgtggcatacttggtggatgcctatgatgaggagagatttgcagaataaaaaagaaagaaagaaaaagaattggatgcacttcaattcaatgctgcatcataggacgagttgcgataccatcttggcctgcccaatttcatcttgcccttgcaaatgttccattccgtatcttggggaacaaaattgacatatactttatgctgcagcagagaacgaattgcgatactatcttggcttgcccaattttactactggaaaaggtaaggtaaacttatcagactcaaatgtctgtccattggagttgttcatgtgcagcatagtatgtaaaatgggatatgtggcgatggttttaagtggcttcccaaatccttatttgtatgcaatacaaaggtataatgtatatatctatacttgttacatattgcagcataaatttaatacaatattcaaaattattattgtacgatcatcaccaatttattaaaaagaataaagggtgtgacaaacaaacaattcactattctcacatgatagaaaattaaagaattatcctattaaccatcaataaaaaaacaatacaattactataatgttttcctttaatttccttcttttaacactataagtattattttctttaatttttcatatgttagacattgtttttcttaaattttcaaaatttaaagaagtttaaaaatgaaacaatttaggtgttgtttttgtttgatttttcaaatattttagatcatcttactgttagacttttatttgggcttacattaaattttattggttttattaaaacttgggttgattggatagttctttgct

SEQ ID NO: 116120 - DNA, 5760 bp, Cannabis sativa
  modified_base (1729)..(1729): a, c, t, g, unknown or other
  modified_base (5694)..(5714): a, c, t, g, unknown or other
attaaagattatatattgtgtttttttaggcaagagtgatatttttctcatttttgcactaattggctcttatgcatatttacttatgattagcattttcgggttgcaattgctcaataacccaaactcaactctaacatactatattttggcaattcaatggcacaaagcaacataccaagtcttatagatccaaaacaaccaatccaacaacagttgattttgaacgaaccaactcctcctccatgcacaacaactcaatcaaacgatgaggtaaacaagtagaacttcaccaaatatactcgagatttccaaagtctatttgatatattatatagcttgattggtgttagtagagctcagacataaatgggcgaaattataattaaaatattagtataatctcgactgctcttagtagagctcgaccaatgtagtctcaaaagtcttgaaatgttactgtagagcttgactatgcggagtagagcttcaccattcatggttaagatgtagtctccaaatttttgtaatgttagtataaagctcaactgtcttgagttgagctcaatcgttcatgggtcaagcttgattatttgtttgtactcgattgatataatattacctctttttatttaaatcagtcaatagaaagttctgaagaacaataaaaaacaaatggagaagaaaaatcagaatcaagtggacaagaagaaatagaatcagatggagaagaacaagcagaatcggatggagaagaacaagcagaattagatggagaagaacaagcagaatctaatggagatgaacaagtaaaatctgatggagaaaagaaagaagaatttgatggagaagaacaattagagccttcatcaatgtcacgagacaaaacacatccgatactttttgaatttgttcactttaatttattattattattattattatttttcttatgttattcagatggtagaaagactggtgcctatattaaaggaaaatgaacattttgagtgcaaaataagtgtaaaaagtcgaatggacaagatcacaagacacattaatgatgtactaaaaaatgacctgactcacttaaaattatttaaagaatatctgtttggctacttctcgatatttctaactactatagacattttagccaagtgatgtggctattattcgttcgagaagcaaattcttacatagattcagagatgtggtttgttgtgaatgggataccaaaccgattctcattgatggactatgcaataatatttggactgaaatgctcaaaaccctaaaggttgggaatctcaaactgagtcaaaatcattcaaagatagatactttcgtgaaagtccttcatgcatcaccattgaagacttaaagaccaaattaaaataattatctgaccaaaacaaaaagaaaaaatcacagaagaagaatgaacttaacaatgaaatattaaagatggcttcactcttgttcgtcttcagagtcttaatgcatgaagataaaaaataagctaatatcgacccaaaattattgggattggttgatgatttggaaatgttcaataaattctcttaggggactcattcttattagtatactttaaagcaactctggaagtcactaaaagaaaaagcaatatcagtgcatgagaaagcgcagatgatgtccacgttcacttattcaggcttccctcttccattagcagtaagtaaatttncctaagtaaagtacaagaatattgaaataccttattaataatttctcttatttgtgtgtagattttagcgtatgaatgtatcccaacaatagaaaacaagtatgtagagcttagagatcacattgacaattcagtgccgagaatttaccgatagaggacaacttggaatgtaagaaaggtccctcttacagtggtatagtagaggctttagttgattcaaatgttagaatcttattttatttattatatatatatatattaataattttgtgttcaagatataaaaagtatcttttcacctactaaaggggagaaaaaactaccacacacgcaaggcttcattcatatctctaaatcaaagtcaaacaacttgattgatatattgaaagctgtgttggagtcaggaagcacaattaattggattgatgatagtgattgacatgagagttgtggtaatgtcgatgttagaaatgaagaacaacacactgttacaaatgaagaataaccctctggtcaagctacagaagttgataacaaaattcctgttcaacccatgagtgaagccataagagatgatcttccagtggtcacccctggttattctcccatccatatgtcaaccccatccacaatgtatggaccaaaagcgagacaaagtgaaaaagtggattggtgtattgtgaaggcttacatagatcaacaattttcattaatgagatccgaaatttcattgatgagatcaaaaatttcactgtgtccttcaaagataattatgtcgctgcaataatagaatattcatgttgaagggcaacgatctcctcattctgaaaggcaacatactcatgttgaagacgaacattctccccattctgaaaggcaacacacttatgttgaagagaaatctactgcttattatgaagagcaacctctataggatgatgttgaaggtgaatctcatcaacttgtgcgagaaaattcaaagagagtaccaaagcgttcacactacttggatccaccatatacagacccttttcattttagtaaagctcgtcgaggtgatcatatccaattttatcctttgaaaaatattgattttgcaaatctttctaagatttcttctttttcagtcggagaatcaggacgacacgacactcgctcagggcgaagggtacggtcattctcggctacatcagtgattatcgcagccagactggtggccattgcttcctttacttccttgggaggttgacgctatccctgaagactgactgtgtctatgctctgaaacctggtaattaggcccgacctacgaagaagctcagttgtcaccaagccttcaaccttcagttgttcttcagagaaggctctatattggccctttttctgggcaatctcctttgatctaatgctctagaggggaagttcagctgcaaattaagagatgttaattcatacacatgaattagtgcgacttgaaaacaaataaagcttgggatgaactgcttaaatacctgcgagttagaagctcaactgaagagatggcatcctgccggtaggaaacccataggaaaagaactagtactcccaaagattgtgggtgcgatctgtctggaaagtcagacagtaggaatctgagagcttgtctagatagaaaaaccccaactttaacctattggtcatcattatattggccttgacacagtagaaataaaggatttcctctggaaaaggaacctccaacctattaattttgcaaaacacgtaccacctgggaaaaagtctgtacaatgaagaaatcagctggaagggtgcaatcccaatcctcacaattagattcgcgaagtaggttctcaaagggaggtggggcgccgctagaaatatgggaccaactccatgcactaaacccatcaacgttgacagatgcagattcctcaagaacagaaagtatatgccacattagactgggaacattgcgaagaccaacaacttcagagtacgcttgcaacatctcgtaagatcaaaagcagttgggtttttagtccatctcccgtatggacttagggcgaacctggatcgacgaaggaattcccctcctcctattgcccttggcatccacgggaaggtttttctcgtcgacaggttcttcttcaagaatggttcctaaagcctccagtagttggggcattgccacaaaaaatcttcagcttgatcctgtcctacaaaaggcctttcgccggattgaacgacttctccctcagtagacttggttacgctggtggggggggactttttttaaatccatgaaagaaagatacacttcttggaacaagggacaaatgagaaggcgagaccttcgcctacgctgtttcattgtacgacctgagaacagaccaagccctaacctaagcaagaacctttcttgccctaaaaggacaatgccaagaaactcagataggagggttagcgcacttacttgaagaaatggaagagatattcaatgccttcagaaagtttgttcgaagaccccaacggtcacagtcagcctaaaaatccaatgctccctttggtgaagaactccattggttcaattgaaagggaacgacgcctgggaagagctctgtgcgaataacgagcagtcacttgattaaatcctcaaattttttttgcatgcaaaagacgacaagaagaacaaagaagttgcagaggaaaaacaatgctttgattaaaggagtaaaaaataataccgccacagacagtttctatttcaaaaaggagaaagagctccacaaagatcgatagcttgaagaggttacatggaatccaacagctagggaaatgagggatcctatgtgatgatcctaggacccacataaatgtcagggtctgtttcctcatgtcactcagtcgccagaggcactcctcctttcttgctaagcgcgccttaccacaacacgaagaggaacaaatgaacacgctctagcacattgcgtggttgccatgcgatgggaagcaaatgccataaatatccttcgaagaatgcaacccaatcgagggtatgttcgtgactgcaaactgtagcccgtgtccgcgatcaacatccaaggtgatatcaagcttctgtgacccgaaggatcacgaaaacttggggggtaaatgttataaaaattttccttaatcagacacgtggcacgatcagagtaagggaacggtttccacgtaaggcattagggagaattaaaagaaatgactcctggatccagaaggtggcaagaggtaatggcttccaggagtagcatccttctatgaggaacccggatagcgatacaagttctggagacctaggacacgttagctcctaacaaaatggcactccaaagacggttataccttttttgacacaggatcaaaccttgtcccctgtgccagcccatggtagtgcgcgtacgcaccatcgagcatgctttttgcccaaacatcatgggtcgaaagaatttcgtatatgcgagacctttgcgcaacacgtgtctaaggtcgtataaaggttcctatcaaccactctacaccacacgatgaagaaagttccccccagtggatggtcagattgttctctttgcaagcacatgcctcaataacgtgaggaggatgaaaacctaagtaggtaaaaggcatgtattttaccccatgtgtgcctataaatatcttcatttctctctaaaagggggtaggatgtttgatcggccgttaccctagaaaaatatgtagctgtagtttctcctgcacaaggctactatattgtaatacattgtaaccatacaacatccgccctaggaagccaataatatagactcgtagactgaggatcattaatgcttaaaccacgtaaaaatctattgttcttatcatttactgtttgatatttcctttattctctatgtaaagactgcttagctttaatttggaaattnnnnnnnnnnnnnnnnnnnnntatgaaaattatttattgatattaaaataattatttatgatgattt

SEQ ID NO: 116121 - DNA, 2437 bp, Cannabis sativa
aaagaaaataaaaaaagaaaataaaaaaaaaaaaaaaaaagtatagagtctaattttctcgtctaaatttggcaagtggcttaagatgagatgatccagaggatcagaatgaatgtattaggctcaaccctaagctgagagatgggctaggtttatgtctagggcccactcaaatttaaggcccaaaggtaattttgcaaaataggctgaataaatgacaaattcaattttaaatacaaacacacacacaaaaagaaaaatgttggcctatttatattcagggccggccctgaatagtattgttcattttcgaagtcacgcaccaaataatattgacaactaacaattgtgagaaatgagaattctatgttgtgcttctcttttcctttctattctttgaagataaatgccaatacaaacttttgttttttctgtcatattttaatatttcacacttgtgctgtaatattaaattaacaaggttcaatatttactaaaatgtataataatttttatttatttaaatagaatttatatatcataattttataagtgtgaattaaatactagaatgaaagaaaaactccagtcaagtggaagtggtttagttttagattaccaaataaaatggtaagtttgactagggaacaccctttactccttttgtagtgtttgactctctaaattaatgtatgacttaattaggactgagtccaacaaatcttagcctccatctaactaccatatgtttgcacatgatcctttgatgggtataagttagagaaagcttacacaacaatgtcaccctttcattttctctaaccattcgaatatgatgactcacatgtcacatgttaaattattttgcaagaaagctttgcattctgaagatctgactaacctggattcgccacgtggattgtgctgctcaaatcctagtaggctcattattttgtagagttgggctgcgaaaattagcttgctcttagtctaaataataaatatatacaaaacaatgaaaaaccagaaccccatcacataatttgaagatttctaaaccagagttggttttcttgactaattcttctactcctttcaatcactgtataacaaattctattgtatacatcacactttattatttttcacaatacgtacaattatttattattgtgtgaaatttttaactacgcaattgtaccgatagctacaaataatatactcacacatgaggtcgaatcacaagaagaattgttgttaagtactaataaacaattaaattcatggttctatctcgtgatataattatttttttaagaacatttgaaattaaaattaaattggaagcaataaaagaataagtaaataacaatgattaatatatttttataaatacacatactttcaatacatcgaaactcattgtcgagggataaagaaaaaccattttaacataaaaaacaattcaaaattcaatatatttttataattaatatattcatttcaattagtttatttttctcttttttattttattatttcgatattaaataaaaaataaaggtttcaatttctaaaattaaaataaattcaaataaactaatttttttttaaaagtttaggacaattaattttaattgtatcaatttcctatgatccaatacaattttaattcctattctaatttcatgtgataggggatcaactaattcaatatatagtcttattaaaaatcctaattgctacacagaccatacaggtaattttgtccagtatcgaaatctatgtatatttcactataacataatcaatactcacatttcaaattttgcattaaaatcataaacaaataattggtgatcaaacaattataaacattaaatataaataaaatagatacacataagtaattagggaagaactaaaattgcattaaaatcatagaaaaatatcaaacaatatccattaacaccctaattagaaattgcgttaacaccctaattaaaaattacattaacaccttaactagaaatatagccactcattgtcattgtgaacaattgaattaaacttagaaacatgaaagaacttgtcaataaacaatggtggtatatctccagtcactttttgcctctaatttcgtatctcaaaagtctcaaaattcaaaagctcccctctctctttgaaattagggtttaaaaaccctcataagtgcgtaatccccttagcaggcagtggcattggtaaagggatgtcgcggaccgtgtattctaattcatttttttaaggttgtcaacaatatcttttgatgtctaattaatttacatatttaattaggttgcgtttggaaataactgtgtaattactaggtagggtaattactagggtgataattacagagtgtagtaattacactatattttaaaatgcaaggtgt

SEQ ID NO: 116122 - DNA, 1977 bp, Cannabis sativa
  modified_base (1915)..(1945): a, c, t, g, unknown or other
actaatcagattgtaaagagttttatttaaggcataaaacccaacaaaatcatcatcaaacaagacaaaaatcataacaattgtagaacaaaagagaaaaagaaaatagagtttgtaattaaagaattgattgcacaacagagagtttgaaatacgaaaaataccaatccagactatcgatcgtctccgggcgtcgtcctcggaggaacaattcaattcgtctctgcaatccaatttgataaacctgagctcgaacactgtagatttgctaacaacattaatattacattatagaaacattttaaaacatttaaactccaaactgaaaccaagtcaaagttaatggattaagtaatgttcatacaaaattggtaaaattgtactaaagttgtgtgttctatataatcacatacaaaaatttagtaaaaggaaaaaagaaagaataaaaccctaaaaagaaagaatagaaggagatgatcaggtcgagactgagtacctgcaatgccgattgcctgcgccggctcctgtccggtagtatgctcaactgcaacgtcgaaggggtgaatgatcggtgaggatgaactcgctgagactttgctatttggtaaaacttaaggtgagactttgttagattttgttattttaaatgggctcactcatatttggtaaaactcatttttgtaatattttttttattaatgttatatgtaagtattatagaaagcatattatcttgtagtgtttttttttactttttactgaataaagtgtatttatgtcattttaagtacatttttataaataaaaatttggaatgttaaaattataaataaaagattaagaaaaagtatttctaaaaattttaagaataaggtttgatgagatctattaatattgtttagtatgggcacccaataataaatatgtgagttggtatggggtatgcattttattgtctttcatatatttatagagttgaggaattaatcatgacagttgaacatctagaagtccataataggtgatagtctagtctggtcttattttggtagcaatgatttactaaaaaacttctttttattgttgaacaagtttgaattaattggaccattattagtcaattaggcaatttaatcaaaaccaacttacttaggctgtttacactaattaagtttgcggatattattaggtttgtaattaatgactcaaactttaagatatatgtactgtataagactacactactatatatctcggggttaagaagtctccatttgacaaattttggtagacttatctagaagaataatcacaaaagaataagttgtatcaaactacaaaaagaataaagattatatgttaaagtgaacaaatactatgtatgtagctagatttttcacgtgacaaaaataagtcttaatagcttagtgctggtatctttctagaaactgatattaaacacacagaaaaagacgactaaacctagctatgtcttaaaaagagagtatttccctcactagaaataaatgttgaaatttgaaatgtaggtttacacatacgtgatcatacacactcatgtgacaagtagtttcaacttgtgatttattacataagtatatatattatgtttataatttatgtgtatacatattaatattaattgtaataaataatctacagaaatcatgatacctttagagaaataatcattattcgtactatgtgtatacatcacaatatttatgtgatgaaccaattataattatttaagataagtctcatttatttaaaaaaacttatctatatctaagttagtttttatgtgaagatatcatgtccttagcttgctgcctaaattctcctattcttcatatttttaattgtccaatttacttttgtattattattattattnnnnnnnnnnnnnnnnnnnnnnnnnnnnnnnttattattattattagggtgactattcaatgg

SEQ ID NO: 116123 - DNA, 3226 bp, Cannabis sativa
  modified_base (887)..(887): a, c, t, g, unknown or other
tctttaaaagaaaaaaatttacaactcttttacatttttaagaacaattctatttatgctagacaacttcttgtaagtgttgttgttgagctcaaaaaacttttttaattttccaaaaaagattaaatctatttttgaatctttctttaatgtcactatctatacaacttggattcacattttttcttatttatacacaaattttaatttattgtaaatatcattaattgcacttgttaatatactcttatgaacattatataatttttatgatactttttaatatatattttttttaaaaaaatatctgtgttttttttcaattgcaacaaaaaaaaaaaaaaagaaacaaagcttatcaacttgaagcaacaaaaaaataaaaataaaaaataaatcagtcccaaaaaaaaattgcttttgtatggtggtgtggtacactgtgcggactgtgtgaatatattttatataaaaaaaagtattaaaaatttgatttaaaataaaaaaagtattaaaatagttcggggagaatttttaacggtcaaaaaagttcagagagcacgatttattacatgtcaaaattcaggaggaaaaattactaattagcctaaattaaataatgggaatatattctgctacaactctttaatgggataatatctacatttcactttttctaattttccattagtttaatttacttccccataatatgaggacaaaaccataggtcctaccctaggttttccctataaatatatattatgttatcttgttacttattaattattatcaaacaagatgagtagatgtataatttttacattgagaaacacctactctttctggaagatattatctttatattttattttatttattatttnttttaataaaaatcataagatctattaattaataaattcgttcaaaataatagaacgcacttcagaggaacaatcttccaactgtagcacacgacttgtagagaaacaagagtctcttgccaagcaatgagccaacttatttgcatatcgttttacaaaatactaattgtgaaggcataaaatactgctctaaatcgattggacacacaccaagctatctgtttccaacatgactctatcccgcgaatgagttgtaatccaactcaatgcttctttaatatctattatctcagcaattacaggttgaatacatcaaatcttccccttcttgaatgtttttaccatagcaccatgatgattctgagctacacaacccatccaaaagacaagactccaactagaaaaaactaaaaggaaaagactaaaaaatcatgtcaaaagacaagactaaataaccatgtcaaaagacaagactaatggaaaaactaaattagtttcaacacataaacacaaacacgatcacagcattaaaattaattaaaaatgaacttataattctaaccccgtaaaaacattaattggaattaaaatatttatattttatttagattcaactaaaaaaataacaaaaatgtttattagaaaacttaagggttaaattcaataaaattaaataataataaaaaagaaactatagataaattcaaaattcaaaagaagtacatataatttttccttcacaaaattaatatctatgcaaaatatctattggttatatatatttatttgtagccacataaatatttttttccttctctttttagagaaaatcaatatatagattctatgaaaaatatctaatatagtaaggcacattatatataatgacaaaaatagtaaaatttgattggaggactatttattgatatatttagatataggcacactactttctttcttttttatgtcagcatgaatttcacctcaaaataatgaaagagataataataaagcttttaaaaagtgtatatgaattgatgatataataatagtgaccctctttgtctttggtcccattattaattattgtccctttcattttcatcacatattttttcagataaaaatttatatttgtatatatacatatataataataataatatctgttttgtacaggctatttatgttgaaaaagttggtcttgcttgatttattgtatgttgattttctttttaattaaattatataagtgatttataacatcatttgtctattatatttgccatcatcaacaccaaagttacaacaagagcaattttctcttaacttccatgaagatggaaaaagaaaacttattaaaacaaaaattaattaataaattaaaaaataagacatatttgcagtaataatacttaaatttgttcgattgttacacattaaactcaattatttttcaataaataccattttaattctatattttacaaagttattaatttaacattccattttattaaataacaaattaaactttatattttttaaaattatacacaaacaaaataatctcctaactcaatttttgtttattatttttttttaatataaccaatctaaaattaatttctaacaccataagataccaagtaatataattaatctaattttagaaaataaaaagtcttcaaaatagtgcctactccctttttttttactataataatacataatgttaatattttgttacaattaagaacaaatcattaaattttgttcttaaaacaataacatggcaacacatattttaatacatttttatttagtttatacttcaaaaatatttttgttatagatgaaaatataaagttaatattcacaataaatatgtaaataaatactactttgaaccctatattttgtaaaaattaccaaataaatcctatattttgttaaataacaaaataaatcttgtattttctaaaatagtaaaaataaaaccctaagcttaatttttaacaattttttttttaatataaccaatctgaaaaacaattcctaaaaagaattgataccgaaaatataaacagttttatcatagtacttttaaatcaaattataattaaattttattttaacaaaatatcaatttaagatcctactagtatcattttaaaaaaatacaagatccattttatgtcaaattaataacttttgcaaaatacaagatctaaatgatattcctaaatatttaaagagatcgagtaaatatccaaaggactaggggtgggcatccgatccaatccaactttttttttctcatccgatccaatccaatt

SEQ ID NO: 116124 - DNA, 2016 bp, Cannabis sativa
  modified_base (26)..(35): a, c, t, g, unknown or other
  modified_base (867)..(881): a, c, t, g, unknown or other
aaatttgaaaaaaaaaaaagttaaannnnnnnnnnatggggtaattcccctaaaaataatataaaaaaaattaattaattattggtataaaataataaagtgacacataacaaaaaaaaaaatctatgtaattttgtgactttagttaagcattatcctatatagagttttaataaaaaagaaaattaaatttgtaatagagttagtttaatattttttatagtaattttattagttacaagatttttcttagtatatatacgatttttgtagtttttggtatttatttaataagtgtttgccaactgatatcatacttatgtgtttaactacaaaatttaattcattcataaaaaaaaaaaaaaaactacaaaatttaatcaatgtaaacatttatgaaaataaattaaaagaaacatatttagatttgagtttttaaattaatttttattatgaataaataaaaaatataaatttatctactaaaaataatatatatttaaatatatatataggttcactcttaatgggtattaatcatgaataggtaatattagaaaaaattgaatttttatgattaatttttttatttaattagaaatttttctcttttttacattatttgggctggggttgttccatcagttgaaaaaaataataaaaaagaaattttcgacaaaaaagtaataaaaaatattaagtttgacttaaatatttttcatataaatatatttttgatatagtgtaaaaaaagttttttttttttttttttgatattttcttcaattaagtagctaaattaagcatagaaattcaaatatctctttcattattcgctatcggaccaaaatttaatggtttaatatnnnnnnnnnnnnnnnttataattaaatttatttagtactcatcaataggtaatactctttaagaagtatatgttcataatcattgctctatatctacatgtcatatatacgtctataaaattctcttcatttaaactatttttttttaaaaaaaaaaaaaaatatatgagtttgaaagaaacaaaaaaaaaatgttaattatgacaaagccaattcatatatttgttaattgtggtaatcaacccctcaacttgtaattgttccttagaaaaaggctcgtaaaagacaattctttgtcttaactcctctgtgagctccgttttgggaatcgattctacaaaaaaggaaaacaaaaaatgaattaattttgtaatggaaccattacacaaatcataaaatcagtgaaagtgcaagggactaaaagatggtagctggaattttgaagtccaatgagagtgttgaaactctcacctcatggggaagccggttgtggaaaaccagtattcccggtagttctaactgtgagaagaaatgcttatgggacattgaacatttttgtacttccggtgacgataaaacctaaacttggtgggatgtccttgcatgggttggaattttacctcataaaaatacaaaatttcttctggggttagagcaggctttccccgggatttgtagaatttaaaccattggtaggagctggaagggagcaattcccgctttaatgcaaaattctacaaagtaagttctaaatagaaggtgggctccacaagaaatatgggacaaactccacgctctaaaaccgtctacactttgagaggcagactccccaaggacggacatgcagtaccacatgagtctcagaacatttcgtactcctccgtcagtagagtacgcttctaaaagaccgtaatttctcagttagtttggtctttgatctatttcctagataaagtcgttgagaactcggggaactggagaagttgcaggagctttgcctttgcctttgcctttgctcttacggcgtcatttaggtgggactggttcggaagagcctattgggattttatgctctaaataaaactcattacaatctaatctgattatcaataaaagattagaagtgatttatgtttacttgctgttttca

SEQ ID NO: 116125 - DNA, 2176 bp, Cannabis sativa
  modified_base (2134)..(2150): a, c, t, g, unknown or other
acaaaattacaaaatcaatcatacatcatgaaacaaagataaggtattcataacactaattaaccaaaataattgcacataagttaaggttaaaggtgttcaaattcgaagttattacaattatattttattccagactctagtagtttattttaaagatactttagaacataaagaaaactacaatagttttcatttgcagcaaaaaaggtaaggcaatgcaacaaaccagagccaacatctaaagcgtgcattccgggctgcaagttctcctccaacaattgaaggcatgttgcgtgcatatgtggagcagaaatggttgcattgtaacctatggccatgggactgtcataataaggtgggttaccatcaggtacaaacaaagccctgtccacgacctccataacttcagatactttttgggacgaaatcactccataacgctgcagctgctccaccattgctttgttcttagaaatgccactcccactccaaaatttctgtaaaaaatttaaaaatagaaaagaaacagaaaattcccactgaattaaactaattgaaggtcaatagaagacgtaaaaagacacataaagttcgaggaattattaaagaaaccacaacatagtaaatctttctgaaatagaagaaaatggtagcataacacaagcaacacctattagcaagtgactatgatcaatcgacaatattaattagcaagagcagagctgataataaatgcatcaaaaccccttttgaatccaactttatactaggaaatacctcatcattttgacaaacttcaatactaggggcagagcagtcagttatggcctgtatttgcccatccaaaagactgggatgtgtgtacaaatgaaaaacattaaagtgggagccacatgccccactagtaataaacaatataatatagaacgcccacaatactcgaggaaaaattacctggaaagtacaaccacacatcaaaccgttcgtacatagcctatatatgctaacaattagccttagtagcaaaccatttttcacaaacatatataggacaagttggacaacccgccattagaacttgatctaactaaaaaagccagtaatcccatatgagaacagaagctttagaatccaagtgtgccattgaaattactatccatagctatttttgatataccacataaattactatcctttctggtaacataaatttggcaatgtttccccttataaactctaatccgtaatactatcaaaagcattaatacacaaccatcaagaactgcaataacataatttgaagtagtttcaacactaaaccaaacaagaataccaaaatgaaagactcaaaatttgtgctcatattatcgaaaactaatatcaattccaaaacacccatatgtataaagcgagggattatgtttttaatcaatcttaaggtctaaatattatatataaagactaaagtgacatgataatccgaccaaaacccaaatacagaaattggttctttatccagcctgaattatctcagaactcaacagatgaaaacctaagagacaggaaatgggaagtggattacctccatccggaaaataggtgagtttcccgtgaggaaattaacgtttgggaaccgagggaagtgagagaaagttgaagtttgtggaggtcgaggattatgatgatgaaaaagggtgaaggttaagaagtggttcacagtaggcgcacgatagcgagaaccatacgctagcgttgtagttcttgctgtagcagttgcggagtaaagatgcatttgctcgattcctctacacgattctctctctttctttttatttttttttttcttttttatttatttattcatttattttatatttcttaatggaatttttttttttaatcatttttatttatgttttgttttttaaaagaatttcttatatatttttccaaacaataatttttgtgactagtgaaatgtcatgcaccgcctcaaccggtcgggccgatggtagtgcctagtgggccggaatttgggcctcagcctttagctcaacagctgacatgtggttccaataccaaaacatttaaggggtaagttgagaaataccccttttattaatcaattaannnnnnnnnnnnnnnnntttatatttatttgaaacatacctct

SEQ ID NO: 116126 - DNA, 1901 bp, Cannabis sativa
aaagaagaagagaatctttcataagctaatcactcagaagattgatcgtgatgacgatactagcatgaaagatgaattaaagaacaagggtgaagctgagaattaagtagggttacaactgattgcagaagctgttgcagacgaggactcaactcagattagggattgctttgatcttgacctgagtactgaacctaaatctcagaccaagctagatagggcaaaatttgtagaagatgatgataatggtaaaactagaaagtattagtttcaggaatctgcaaggtacaattgggattaatttaccaaacataacacgatttatcatgaccctatgctgacatatactaaacctatagttaagaatggtatgaagattgcccaagtcaatccagaggaggtcatggaataagcaacaacctagaatacaacagtcatttgtatggttcttggagctaattccccaatggctattttttaagagattcatcaaaagaattttggggcaccttcctatagctcacattgctaaaatgacattgagattgattatggctagatttaatgatgaagccactagggatcaagtgctcgagtcaggggttcttcaatttgatagaaaaccagtaatagttaggccttggtctactgatttgaatgtacagaatatggtttgatcagtcccttatggattcgtctccatgatctaattctccaatactgggggaataattgcatgagtgtgttcgctagtactgttgggaaattatacactctcctctgaactctattcccattctcaatgaatatggtcaattgatggagcgaagaattcaatatgagttgctacctatgaaatataaaaatttctctggcttcagacatatcatggaagattatagaaagaatggttcaaagtcaaaggaacaaggtgctgttactagaaaacaggttagtaagtcaaataaacagtaggatcgtggttctactactgttattaacaaagagggggaggataaaccaactgagactaggggagataatgacactcaagtgacaaaagaatggcagactctgaggagaatagttcatcaatccaaggttcaatctaaggaaggtgatggatgcttagatataaggtagaagtctgtgaatagatttgatgttctataggaagatgaagggtataaagaataagatcagttggaaaagaggtagatctaggtattaccattagctaactatggataatttcaatttagctagttggaaatgttaggggtgctaataaaaaagagaaacaagatgttgttgtggagttttgtagtaaacataaaatttgtattggagctttattagaaactaaattgaaagataataaagtcaaggagatgatggattctatgtttatcaattgggagtatttttcaagcccaactactgaagggcgattgctgataatttggaagagaagctttgttagattgatttttaatgctgagacacctcaatcggtccactgttatgttaatgtttcaggtcaagaaaaggctttctgcattactttcatctatggcttcaacacccttgatgagaggaaaagcctttggactgatgttctgagtttaaagctacctatgaaaccttggattttgctacatgatttcaacgatgtgtttaacttggaggataaaactagagggaacccgattcagtatagtgatttacttgattcttctcaatgtcttgctcaagcccatgtggagacacttaataaaactagctcaacatttacctggactaattatcaagatagttttagtagaatatactcaaaaattgatcatgcttttgttaatgaagattggggtgatctttgtcctaactccatagcccgtttt

SEQ ID NO: 116127 - DNA, 1475 bp, Cannabis sativa
attcacatcaccaaagttctgactattcatttctttcagcatgtgtttgtaccttcttaatttttgaatatgaaaataataataaaaattaaaacatataaactaaagtgggtatataatatatataataaaatcataatcttattataattgttataagcaattgatacacttttaattaatggttatgcatgcatgatgaaataatgtttcaaattatattagtccatacaataattattctaacattattacaggtaacttatttaattaataatatgaattttgcttgtatataatcgtgtgtttgacatagtactcatcagtatatattaaatatataatcatagtacttagctcaagcccaacgttgcactattgaaaatgatgctatctatgttttttttgaaaataataatatttatatatatatatatataatatacatacattatgtatgttagtactacttggattaaataaacatatcatttgctaattaattaatcaactagaactaatgaatcttaatttgaatatactaggtctaggtagttgaatgaaggaaaacaaaatggctgaatcaataggaaagttaagtttgatttaggtggtttttggttggatgaaatgaaatggaaaaaaaaaaaatcaactttcatatttattagttttactattccttataaaagtagggataattttactttatttttctcctaatttatgtggactccattagtttttcactttatgtgaatcaatactatataattgattaaacaattgcatgcatcaataccatataattgattcccactatatccttaagtaaacgtcatcatttgtttagttgcaaatatatattgtttttttcgggtttttacactacatactaaaatttttcattttttctcttttttactgtgggacaattttttttttttttaaatactatattttcttttttaaaaaaatactgtgtattttttatactgtatactgtgttaagttttcactgttcttctaatgttgttttttagttgttccactgttatttttaattgttttattttgttgttttataaaatgacaatatttttaaaaaaaattccgtgtgacagtatttttgtaaaagttaacttaaattctagtatttttgtaaattctcttactttttcaccattttatagtagaatgactattctattttaaagtggaataaaagattattccaaatttccaatgcaacatattaaaaaatttaataatttttttatcaattttattttattcattttaaatttgattttattctagtcttattcttatttttgttcttgtttttttatatttctatttctttttgcgataaatatcagtggtttactactatacaataataccttaagggcccgtttggtacgcaggattggactggattagattgcaaatgattggactggactggacaa

SEQ ID NO: 116128 - DNA, 2520 bp, Cannabis sativa
agaagcggatgtgtgggagacagtcaaattttggacagccacttgggtctttagaacaaaacactttgagaatctgtcctttttagacttatgcagagattggaaaacgtttttataagttttcaaggatggtcatgtcttaggacttttgtttgatgttaaatgtaaccacggttttcctccgccataagtgaggcttattaataaatatcggggagacctctcgatatgtgggtctatacccttttcaaaaaaaaaaataataaaaattattatttaccaaaattacatggtatcagagccgataatattctgacctagatcgactctttttttttgcttcttctctgttcgttaatatcttcttctaaatggtacagagccatttggcattttttttttgtgagcagggggtgatgttttccttgctacatatttaatgaatagacttccttctaaaatactaagcttcaaaacgcccatatctgttcttaagaactggttttctaaatctagtttgttttctgacatgtctctaaaaaattttggttgtactgttttcgtgaaaaaattcacttaaaaatgctagtaaactcaatcctagagcaaaaaaggtgtgtttttattggtattgcttcaaactaaaaaaagtacaaatgttttgatcctacacttcaaaaaacgtttgtaatcatggatgtaaatttttttgaaaatatcccattttttaatcctaatcataagggggtgaagttaaagatttagatttggaataataaataaaagatttaatccttattacaatcttaaaaatattgccaaaaataattttaatgatcatacattagacctggattttttaggttacgatttaggacataatgaaaggcaaattgaagagattgatagtagtagcagcagggaaagtcgggtagtaaataattccagaaatactgaacaagaaagttgtgaaaatgctgaacagaatgtttgggagggagaaaatggtttacaaaataaatctcaattacaaacagtatgcaatgagcataatgggatcaagtttggtcatgtttatacacgaaggcttcctcatcaaagaattgaagtcaccactgactggccacgccgagaatctaaaccaagactggaaaatgaaacaggtaattcttctattccttctaaccttagtcctgaatctaatcttcccatagctattaagaaaggaaacgatcgtgtgtcaaatatctaatgtctcttgttgtctctaactcaaaaatttcatcttcttttatcactttcaccaccaatgtgtcaaatgtcaagatttcaaataatatactgtaaatgctccaatgtagaagaagattgttgttgagcaaatgagtgctttagagaaaaagcaaacatggaaagttgaaaagctacccaaaggtgctccgatagttggttgtaagtgggtttttacacccaaatttaatggggatggcactctaaagaggctaaaagcttcgctagttgccaaaggttcacacaaaggtatggtattgattacactaagacctttgctccagtagccaaacttaatactgttcggatcttgttgtctattgcagctaatttaaattagcctttgagacagtttaatatgaagaatgctttcttaaatggaagaagcgtaggtgtgttagactaactgatttagagagttggttaaagttagttaaagattagttggaagttagttaaggtctgtcaacagtttttgttcagctgtaagtataattgaattacctataaatataaatataatagttgttagttagtttcctatttattagacctctttttcttatgagttgttacagtttgtaatttataaaaagccatttggctatcaagtgataataagaattgttacaaaagatggagcacgtcagagttcttaacattcttgaagatagtcgcctttggattcgggggattttctcctctaaatcagcgttctgctggcttacttcatccgataactccggggagttgttttggaccaagatcctatggaaaagtagaggaccttccaaagtcaaagtatttggatggttgttggccctagataaactgaacctacatgctagattgcaaaaaaagcgcctcttcttgtgtatatcacctggatggtgtgtctactgtaaaaggagtggagaagacgcggcacatctgtttttaaggtgccaccttgcgtggtccttgtggataagactgcttcacgaatttgagatccaatggtccatgcagtgttcggttccccatatgatagtaaggtagggggcagtgaaaggagtaattgtctatggagaacagcggtgttggcaattctttaggttgtttggttagaaagaaatagcagaatctttgaaggatcggaaagctcagtagaggctctatgggaaaaaaccaaattttggactgcctcatgggtgtacaagacaaagttttttgaaaatgtttcatttttag

SEQ ID NO: 116129 - DNA, 1267 bp, Cannabis sativa
tgttatatacacatatatatattttatattatacatataaatgtctaacaataaatacttacttttaggacataaatcccaacatgagcaatgttggtaagtagaatatcatcgaggacatggctgatgacagtgggaatcacttgagatttccatgcaaggtaatttgttcaatcggggcgaactgtgagagaagaattcaattaattctgaaaaggtttccattgctgcatcagagtgattaccaaaatctaatcagcggttggtagcggttgggttgatgcagtacgttctgagtttttaggatcccagatcgacgttagtcaaagacttcctaataccatgtgagaacaacttatctatacatttcttatctagacataattcagagaatggatctcaatgaattgcaaaagtttactagttcttgagctaaaaaatgtatttatatagtgatgagtacaaaaagtcttggctgttattatatcttgtaacaaaatttaccaacatgttaaagagagagcaagtggcaaaactaatatacaaaaactactcttaacaactaactaataaattgaaaaatacaaatgtttattagttattattcacaaataataaaatatctttacgtaactcattataaatatattttgataacttacaatactcactttctctctctctctctctatatttatataacttgttagctgaaagagatcgagcctatattcaataagagaactatcaaaatgagatacttaaaagtggaggtaaagatgattaagagcaaatgttggaaataaaagaaagaaaacgatacaaagagaaattatgtgaagggtttcaagaaaataatgttaaaaatctttatcactcataagatatgcaataacaagataaacatattacatataattatgagtgtataacaatagatataaagaatacctttgttgattcaaagagaagaactcaaatagcggaagcataccttaatctatagatagtgatgatcttaatccatcttgtagagataatctttgtgataattttgggcaatgatcttccaaaaaaataagacttagggttttctaattttctctcttgatggggaagatgagaatagaaattgactcttgtttcttgggggcactaccaatttataacctataactaggttattaattttaagtatttctaatttagcccctcaataaattagaaatatcacttaaggtatctacacatttagcccatgacactt

SEQ ID NO: 116130 - DNA, 1724 bp, Cannabis sativa
  modified_base (1646)..(1656): a, c, t, g, unknown or other
aaatgtttaaaattccgtaaaactgtatttttgttgttttttttttgttatttttgtgcatttgtgaaattaaccctatctaatatccaaaagggagaaagaaaccttatgaaacaatctaagatatcatgatcaaaagcaacatctctctgcaatctaaatccacaaataaactgcttcagcttcttgtcttcatataaccgatggaagcaaatcaaagagcctctttagtctttaaccaagctgatccgggcaacttgtgattagaagagtgagagttaagatatatatatataaatattatatatatcttcgtgtgagtttgtgggtagcctgttatcacaagaaagagattgaggagatgaggtaaatggagattaactgcagggtagtctaatatgatggaaactaaaaattagcggtaaatgtttattaaaaacctaggcgctaaataaaaatttggctttggcggtataatagaaatttacatctacgtattacctcctataaaatagcttattattttattttctttaacaacttttgttttgtttaagttatttttatttttatttattatatataaaaataaatctaataattatgaatttactaaaacagtgatctaaatatgaaattaaggaatacttaccattacccatgcttatgagagatccagaaaatagaaatatatatatatatatatatataaatatatcaaatttatttatgggaatagcctcttaatataagggggagaagttcattgaacaactaaaaaaaattaaaaaaaaaagccaccaaaaaacaggagtagcgtcacaacgtaatagataaaaaaaacattagcatataaatcataactaaattatactatgaagtcataaatcacacaaaaataataagcttaaaccactaaatatgagagaaaattatacttactagtgttcccgagatcaaaatgagttctacaatggttgcatagtggctgatatgaatgcttaggagtgagaggctttgaagcccagggtaaaagaaagttgtggtggtggcagtggcggcagtgaaagctgatgagtgagaggctttgaggcttcgaatcgtggctaataagccacaaacacacatcacttttagtaattttgtttgacactactagctttgaatgagattttactctctcccacccattttttttccaatcattgaaaactatattcagatctattaagtggaagattgtggcatgatccccttcataagcgagaggaagagacttctcctcttctttcagtggatgtttaagttacacagcaaaaaaaaaaaaaacaaaaaaaaagactttttctcttctttttctttttttttttaaactttatttttttttctttgagtagcttttgacttttcttttatttgttgttttactttttctaaaacatattgcttatgctgtaaaattaaactactcaaaaatttctttttcatcttaaacttttaaaattattctcatattgaaatacataaaatcttttaggtgattctacaatgcacccccttaaaagggatgtactaatgcacatctacttgttttggtaaccaaaaaatatttttagtcgaattctttttcatattcatgtacgttnnnnnnnnnnnagatatcttacaaaattttgagaaattcgtaataatttacaatatagaaaataatgttcaaagagtct

SEQ ID NO: 116131 - DNA, 1783 bp, Cannabis sativa
cttaattaaaaaaatatatcaaaaaatacctcttttttacactatataaaaaatatttacttaataatggactgaacatttgtacctagtttgacctggatccgaccaacccgcttagacctgacttgaccaacccaaaaataaaaaaaccatgtttagtgcaagtaggtcaggtacaactcggtggactttccaggcaggtttcgatttttcttttttaggtgaccggatttcgggttggacccggacccgcccgcaaacccgataaagttatataattatattatataatttttgttacataacataaaattaaaataaaaagttaacctagtaaaatctacaacccacacccacacaaccacctcctcgacctcccaagctcccaagctcccagtcacagcccacacccacaaaaccccttctcctctcttcatcttgtccattctctgttttgtcggagtccaagacctctgagagaacactagtctgcccgtcgttgtaaccccccgagtccaacacctcccaaatgcagcttacccacacgacgagttctcccagccccttctcttcttcgttctccccttcttctcttcgtcccgtcagagtcctagtagtcacccctcgtcattgacgggagcccaaccctagttgaccaccaccgacacacacgtaacaacattaaggtatggttaattgtggttttttttttaattttttttatagataattatttttgatttaaaaagtaatctatgattatacatggtttattttttaatattatatttttaacagtatttattaaaaaaaaaattattttgttttaattttttttaattatgaaattaggttattaaaattattggaatagtagatagattttaatttgcatatttttttgggttaaattctactctaaaattgaatactaaattatgttgaaaaattagattatgttaatatggggtacaaatgacaccatgaaggaaaaaagagatgattcaaaacaaagtcattcaacaagagaaattcgactttttattcatattgtagcttaaaaataaaaacttaaacataagttgctcaatattagtagtgtttaccgagatttttagaaactaaatatttaagatcttaagaaataataaaatgtagtaataaacgagatggagatttttacgtggtttaggtataataatataataaataaactagcaaactagtagaacttattcttgatcctatatgttccaatacatatgttacaattgtaaatcgataccactgtagtccctgggaatagaatcacagtaccttatcttagtgggagaattttaaaagtccaactcgttattatttggatgacaccattgatagcctactatgatatgttcaagaaaggaactttaaaataaaacaaaagaaaagttaatctaaccattcatatggatagtaataacttatcaaaattatgaggataagataggaaattttgcaatgtctattcgaaagacttaagcacaattcctggtccttatgcaatattttatggtatctctagtgattacttaaatattaagcaagtattttacattaatgttaatactagaatgctatgttgatgacttagtttagaaggaacttattgtttccaaattaagataaaatgtcacaacaagatgtccctaagtatcaacagtaagaggattaatgcacaatatagattcgttatgattatccagtattacaatcctaatagtcaaagatcctttatagatga

SEQ ID NO: 116132 - DNA, 876 bp, Cannabis sativa
caactggctaaataacagaaataagagaaaatatgttctctgtaataattatgtttcaatttttacaatattaataataataagtgtaattattaattaatcaaaattcaatcatcccatctaatttttttacacttataaattaaacataatcatcaaaatatcaaatttttaaatcatgatttgagaagtttaaatatacatatattgtacacaaatattttgtaaaatttaactgtccacaccattccataagaagataaaagtataaacttcacaattgcaacttacaacttataaatcatgtgcaatctatatagtttttgtaccattaactagtttatgtatcattttaatttggttttaactttattaaattctaaccttaacaaaaaaattatgagaattagtggtacactcaatgtgaaatgagctgtgtaaaaatatatttcatgtggtcaattgtataaaataatagatatatattttaaaaatattttatcatgattttttattatgataataactgaaaatttgaaacttacacccttattatataagacgaacttttattttttttatgtcaaactttattcaataaatatacattctttttgtttattaagtgctaaagtaaaaagaataaaaattattttattttatttttctcaagcactttaataaacaaatatgtaatattcaaatatatatatatgaaacacatctcaataggtatttttcatgaatagttactaaacaaatataattataaatataaattgggtgtctacacatttagtaccctgtgttttatctaaatacaagtttggtaccctgtattttaaaattatacttatttggtaccctaaattcaaa

SEQ ID NO: 116133 - DNA, 1333 bp, Cannabis sativa
atagaaaaattaagcataaaaactcaaaaatttttaattttacccattcatgggtaatacccgttaaaaatttacccatatatatatatatatgtttttcttttaaattgactatattctttcaaataaaaaaatatatatacaagttatattttactaaaaaaaaaacctaaagaaaatatataatccaataagtagaatatgtccgataaacctaatttgcttaattgattttttttaattgtaatataaaataaagcttaattaattaaagagatttctattttctttttttataaagaaaagaaaatgttaaaggggcaaggcataaagaaaaggtttatctttatgaattcagtgatttaaggaacatatattaaattgtataaaatgtgacattgaatatcactcacatatatatatatatgtaaatgatatatatttatttatatagtcacatgttacctcaaaacgaatccaaagtggttcttaattttcttttgttattaaaataaggatttgagtatgagagagtttacatgagctaattaataatatttttaataatattaattctaccaaaatggaaaaatatatatataatagtaataaatattgttattattaggattcaaacttggcctacacaaagtttcatttggattttagtatgcaagctgaaatattcttctcctaaattgtgatggtatttatatatagggtttttttttttcattaataatgattataattaaaaagtgaatttcacattgttaagatagtcaaaaaattaatacaaaaatttaattaaacatgtctgtgaaattatatatatactcatgaatttgacaaaaaatattacattaatcatttatttatttgaattacttcacgatgagataataacttactattttaagaacggtatgtaataaaaaagcacactttcacactacaaaaaatatcacttttagtcataacaaaatttatgattaaaagtaacaaagttgtcattaattataaattgtcattcctacgttgtgattgctaaaaatattaatcacaaaaattataattagttgtgactaaatgtatttttaatcacaatacttgttgtgactataactaaatattatgtttagtcacaagtaatttttttttaggtaaataccattttggaccctgtgttttacaaaagttaccaattggaccatctgttttgttaaatgacaattgtctaaataggacccttaacttaatttttgacaacttttttttaatataaccaacttgaaatacgaacagatatagaaaatataaacagttttatcat

SEQ ID NO: 116134 - DNA, 7432 bp, Cannabis sativa
  modified_base (7401)..(7401): a, c, t, g, unknown or other
gggatgaatgtgattatatcctccgtgagatgcatagtggtatctgcagaaaccataccgggagtaattctctcgtcttaaaaatcatgcggcaagggtattactggctgacgttataacaagacgctttaaacttcgctaagaagtacgacaagtatcagcggatagccacatatgtcaaccaacctccaagccacttgcactccatcacaagtccttggccctttgcggtttggggcatcgacctaattggagagttacccaaaggaaaaggcggagtcaaatacgccttagtcgcagtcgactacttcaccaaatgggctgaggaaaaagcatttgcgactattactgtggccaaactacgcgagtttgtatataattccatcatctgccgatttggcatcccttataaactcatctcggataatggaaagcaattcgattgtaaggaaatgtgacaattgtgcgatgagttgggaattaaaaaggcatttttagcagtcgcttatccacagagcaatgggcaaacagaagccgtcaacatgataattaatcatactatcaagggaaaactcgaagagcgtaaggggatatggccagaagaagttttataagttttatggtcatataacacaaccgcccgatcaacgactggcgaaagttctttctcgctctcctacggatgcgaagccttggtacgggtaggttccttgcgaagagatgttttcaacattacccagaatgaggaaaagcaattgctccaccttgaccttttagaagaaaaatgcgaccaggctcacttgaaaaatgcggcctatcagcagcgtactgcacggtattttaattctaaggtcaaggagaaaattccgcgagtaggggatttggttcttcgaaaaaatcatgccaaacacgaaaaacccagcgcatggagttttcggagacaactgggaaggaccatatcttatccctgaaaaaattggcaacgcaacatatcgacttgcagaactcgatggtactactatccgaagagcctggaatggcgaaagcttgacgttttattatcagtagtactcgcaatgtattatttgtactaagttatgtatttatacttagtcaatttatctacataaatgttctaactataggggtatatcatcatctcattttgtactattgattaacttattttttataataaaagttatgagttttctcgagcttttaagtataggaggtatatcatcatctcattttgtactattgattaacattaaaaggtaaaaaattaaataatcaatttaaacttcttaaaagaaaaagttaattagagcaaaattgaagagccaatataatctctttaatgagactatctataaatttattaaattaaataagattagttaaaaaaaattaaaaataaatataaaggggcgcgtaaaaataacaatttaaataataatatatgattgatattaaagaagtataatctaataggaagattaataaagttacgaatcgaatttatcaacgaacgccaataataaaatttaatacaaaattaaaatttgcataacttattttaaattattgaaaataaaaaattaaaattatagctcatgaatctaataacaataaataatatctaatgaaataaatataaattaatatgatataaaagtaaaatgtatgcattaaaaaattattaaactacaaaaaactataataaaaccataaaattctcagcaataaataaaaattgataatactttaaagctatgaaaaaatagagtaataagtaaaataaaaatgaggtcaaaatcatcatttcttactattggaaaaggcataataaaattaaaagtaattaaatgtgtatatattaggaaaataaatataatatcaaaataaacacaaattaatatgacataaaaaggtaaaatgtatgcattaaaaaaatatatattatagagtactaaaataaagtcataatttttaaaaattaaaaaaacttttttgagtcttgtcttttgacatggtttgatattctctaaaagtctattttctcaaaagtctattgtttgtgtttgtgtgagtttgattggttgattatggagcctgggagtaatcaggaagtcgacattgaggaacagtatgcaaggtttaacatcgaacatgaagaggagcacagcctactgtatgaagggggagcggatgatctgcaggagattgacgataggtggttgttggttggcagatttttaactcatagaggggtggatttccaagctatgcagaataaaatggcgacactatggcagctgggaagaggtatgtacgtcaaagaacttgagaacaatttgcttctctttcaattctaccatgaagttgatattgaacgagtgatggatgggagcccttggacttttgatcgtgtgccattaatatttgaacatgttcaacaaggtcagaacccgagaaccatcacacttaataagcttgatttttgggttcaaatacacaatctgtcaacggggtttatgttggaacgggtggtgcaggatcttggaaactatgtggggacttttattagggcggatccgaacaatttcattggcgtatggctggattaattacgtgttcgggtaagaattaacattgattgtcctttgaaaaggaagaagaaggtagaaaagcaaggaggggtatattgttatgcaacttttaaatatgaaggattcccacattttgttttatatgtggcgttcttggtcattcggaacggttttgtgagcaactattttatactgccatggaacaaataaaggaagcgtcgaggaggaagaattatgctactggggagaagtcattaagaattggtgtggccacaaaacagggaggtgtttctttctctaaaaacacggcagttgaggaaaataacagagcaaacaatggtggtccgacaagtcacgtgccggggaaccctttccaggagaatcagtcatttcctccaattgggggatcatcttccaatcagccaattatggtgagtaatgacaagaataaaatgagagttgatttggtgggaggatcaaaacaaaaagttgtacaagttgaccacacgttagcagaggaattaattgtggaagattttgttgaaaaggaaagtgttattattaaggaaagaagtatcttaattctagatacaaaaaggaggcgcacagaaggggaggggaatgtggagtatggggccgactttgaagtgggccaatggactgaaggggctgtgggaaataatattacaaatgggtcgaatcaatgcataggtgatgttatggagactgatgtaatgaaaagtaacacaaaaaacttgtttggggcgggttctggtgcacaggcccgccaggaattatgaatgtgttaagttggaattgctgtggacttgagaaccaacgggctattcaattcctaaaagagattgtttctcaaaagaattccaatgttatttttttgtgtgagactaaatgtaacaagatgaaaattgaaggtgtgggccgaatgttaaagtttgaaggggtgtcttgtgttgaggcccatggtagttcaggtggtttggccttattgtggaaacaacaagatgatggcagaatacttggttattctaataaccatattgattttcttgtggaaacgtccggaaaggggagcttggaaactaactagattttatggtgaaccagtttggggtcttcgtcatcaaacatggcaattgcttcgtactctagcaactgaccgtactcagccttggtgtgtcatcggggatttgaacaacattgttagacaagaagacaaacgtggtggaaggttgtatccgcaaagtctcataactggttttcagcaggccctaaacgattgcaatcttgcggatatggaactttggggtcatccattcacttgggagaaagggagggcgtccagcagttgggtagaggtgaggttggatcgggctttggtcaatccttcatggagcaatctttttcaaggtgcttctcttactaacttggaaatttcctcttccgaccattgtccaatatttctagaaccggagccaagtagtgtctttccttttaatcgtaagtttaagtttgagaacgcttggcttaaagaacctttctgctttgagattgttcaggattgctgggacagtgttggtgattatgaattctcaagtaaattatcccattgtgctgaaaagttaagtgtgtggggcaaagaggtgactggcaattttaaagtgcgaatcaagcgctgcaaaaaggaaatacaacgactggttaataaaagagacttggtctccattcaaagacataaagaagttaaagaggaattgtttcagattcttgaccaacgtgaagcgttttggaagcaacggtctaagcaactttggttaaaggaaggggatcaaaatagcaattactttcacaaggcggcatcaactaggaagaggaataatcaaattgtgagcttgaaaaatgagaatggggttcgggtggattgggagcatggcctgtctcaggtaatgtttgattattttacatccctttttcaagcttctaactcatcatgtcctgaagttattgaatgtgtacacaagtcagttccggactatgtccatactgagcttcggcttcctatcactgaggaagaggttaaaaaagcgatcttccaaatgcatcccgacaaaagtccagggcctgacggtatgaccccggctttttaccaaaagtgctggagcattgtgggccgtgatgtggtaagggtggttcagaatttcttttcaactagggaccttctgacggagtgtagcgaggctaatatagtgttgataccgaaaaagaagaatccggaagacatgacccaacttcgccctattgctctttgtaacgtgatctataaaacaattacaaaggttatggtaaatcgattgaagccctttatgaatgctattgtagccgacacacaaagtgctttcataccgggtaggctcatctcagataatatcttgatctcgtttgaagtgcttcattatttaaaaaggaaaaggaaaggcaaagaaggctttatggaacttaaactagatatgagcaaagcttacgataggattgaatggccattcttggaagcaatgttaaggaagcttgggtttgaagattggcggattaggctgatgatgaaatgtgtaacttcggctaaatacgtggtggtccatggtaaccacgaggtaggaccgattgttcccactcggggtattcgaaaaggagatccattatctccgtacctctttattctttgtgctgagggtctttcagccttgcttcaaaaatatgaaagaagaggcctcatccatggttgtaaggtgtccaatggagctcctcgcatttcccacatgttatttacagacgacagctaccaatactgtaaagccactatgttggaagcttcaagaatgaaggagatcttgcacaaattcgaagcagcatctgggcaaaaagtgaattttacaaagtcatcaattttctacagcaccaacacaacttcggatgttagagacaacatcagtacttttcttgggatggttatagcgggggaaggaagcctttatttggggctgcctagtactttaagcagaaataagttagcggttttgggctaccttaaagaaagagttcgaaagagggttgaggggtgggagatgaaattcctttctcgagccggcaaagaagtgttgatcaaaacagtagcacaatcccttccaagctatgcaatgagtgtattcttattaccattggatatcccccgtgatatggagaaaaccatgaataagttttggtgacaagggtctaataaggcaaaaaatggcatccattggttctcttgggatgggctttgtatgcataaatctaaaggtggcatgggattccgttcattgagagatttcaacctgtccatgctacgtaaacaagggtggagactcatgactcgtcctaattccttggttgcaaaagtcgtcaaagctcgatacttccccaacagtactttcctttcggctgaattgggaaacaacccaagtttcgtttggcgtagtctccttgaagcgcaagagttggtaagaaaaggaactcggtggtgtgttggtactagggaggagattaatgttctacacgaaccttggctgcctagtgaagaacaacgttttgtgttgtcaactcatcctggtttgatagacagtaaggtgtgtaaccttatggaaattgggggtgggagttgggacaaggaaatcttagatgatttatttgaagagcgggacaagaagcttataatggacatacctttgcatagtactcaaggcagagataaattaaactggattcatgaaacctcgggattttactctgtcaagagtgcctataagctccttcagaagttaaagggcggatggcaccaagaagaggatgagcaaactaaattttggacaaagttttggaagctaaaaatccctcccaaggttaaaaacttagtttggcgtgctggcagggagtgcttacctacgttgaaacagctgcggttaaggagagtggatgtgcaaactctttgtccaatatgccgtgatgcagaggagtcaattgaacatgctctactgctgtgtacaagattgaaacaggcctgcgatcgggttggtattgggactgcaattgcagctactggtgcgggcaattttctgggctggtgcatctagttttttgctacggctgatgtagataaaaagaagttgctgtcggttctctactgggcgatatggagtgcaagaaacgactttgtgtggcagcaaaaaagtgctactgcttctgctattttgaacacagcaacgggattccttgatcaatggagtaaagctcagaatactcttatcgagacgtcttggtcgggttatacgacgaatgacggagctgagcaatgggttgttccaagtgaaaataaaatcaaggtcaacgttgacgctgcgttgtttaatagcagtaacaagtatggttgcggatttgttgctagagatcaccatggtatgctagtccaagggaaaacactcttgttcacaggttcggcttccccggagcttgctgaatcaattggtatacgggaagcattgagttggataaaaagtcatgggtggcaacatgctacattggaaactgattgtcttacggtagttcaagcacttagaagctcaacggacatgatttccccctttggtcaactcattttggagtgtaaaaagttgttatcaattttgaaaactgtttctgttttatttgttaagcgatcagctaatatggtagctcataactntgcaagagcttctatattatatcctggttgt

SEQ ID NO: 116135 - DNA, 1422 bp, Cannabis sativa
tgttaatgtgtagaaatgtgggaaagttgaggagcaaattgagttactaaaacgaaagcttaggttgatttatcaaggagaggtttttcatgggaaacctaccaagacagctcgatcccatggcaagaaattccaagtttctgttaagcaagaaacatcaaggttattagtaagtattattatatactcatactctcattgttttgatatatataattaaatctaagttttcatttttatggtttttaaagcacaagtatataaaaatgaaattgaaatctaactaactataatgttattttctaattcaggggaatttgggctgggcctatatgcaaaagccgaactatatgatggctgaagttgtttatcgaaaagcccaaatgattgatccagactcaaataaggccaacaatttgggcctgtgccttatgaaacaaggccgatatagtgatgccaatttagttttacaagatatattacaaggaaggcttccgggttctgaagattcaaagacacgtaaaagggcccaagaattgttaatggatcttgagtcaagaaaccctccttcgccattggatctattgggccttgatgatgattttgtcaatgggcttgagcagttgatgaatgagagaggcccatttagatctaaaagacttcccatctttgaagagatcactccttttagagatcaattggcatgttaaatagtatgtatgtatattttagttatggttagaaaaatgtgttgtggttcaaaagaatgggagtgtattgcttttttgacattcaagtcatggtagaataagtccatttgtaattaaatgttggaccctttttgaagtagatgtaaatgtaattgacaattgtgtcaaattgtccttttgtattttgaatttcaaaacaatcaatattcttctatcaaaatctatcttcagccttttaaatgtttatattgttatattaattaagagatatataatacaactttttgaataatttaataatttatgatgacaaaaataaagttttaaaccatttgaaaaaaaaaaacagaaaacaaagttttaaagagattaaaaaatttatatgatcttctaaatagttaaaataaacacaattatatatataaataaaaaaaattacacacttcaatttttttatatatatatttttacagattttttattgggacaattatatgaggtattattttttataaaaaaaattatatttttacgtttaaattttttttttttacatatttttacagtttttcatgaaaataacacaaaaactacataaaataacatcttttttttatatatagaaacataaaataacatctaaataacatcaaaataacaataaaaaataacatatagataacgaaaaatcaacaacaaattaataagagta

SEQ ID NO: 116136 - DNA, 4909 bp, Cannabis sativa
acaatccctgtgggatcgacctcattcctggtgagtttactacttgtaacgatacgtacacttgcgtgtgcaaaatatcacaacaccaggtgccgagacacctactgttgttgtccctgattatgttgccacagaaacaccaactgttcttgatacttctgctactttcaagaacactattgctgcaccaccggattctattgttgtcacagtcaacaaacattcaatgaccaccagaagaaaatcaggtattcaaaaatccaaggtttttatggcttctataacccttgcatctatgaaaagtgcttcaaaagatccccaaatggtttgctgcaatgtctaatgagaataatgctttaaagaaaaacaaaacttatacattagttcctctaccccctaacagagaaccaataggttgcaaatgggtttttcgagttaaagagaacaaagatggatctgttgacaggttaaatgcaagattagtagcaaaagggtttcatcaacaagttggttttaattttcatgaaacttttagcacaatgattaaacctatcacaattcgggttgttctcaccatagctctttccaaaggatggttagtaaggcaactggatgttaataatgcatgccttaatggcgatcttcatgaagatatttacatgatccagccaccatgatttgttgatactgagcatcccaacaaagttttcaagttacataaggctatttatggtctcaaacaagctcctagagcctggtttgagaagttatccacattcttattacaacttggtttcacttcaactaaacctgatcattccttattcactttaatcacaccaacaaatgtcatctacatactgatttatgttgatgatattctcataactgacagtgattctcaacaaatctcaaccctaatcaaaatcccccagttccaaatttgcattaaaagatcttggcatcatggatttcttccttggtattgatcagatcattcacacacaagaaggtattattctgtctcaacagatgtacatacaagatttgatttgcaaagctgaattgtatggagccaaaactcgaagttctcaaatgaatagtgggttgagattatccaactatggtagtgaacctgtcactaatatgttactgcttacaagtctctgtttggtgctcttcagtatgccactataaccagacctgacattgcctttagtgtgaataaggtctgccagtttatgcagaatcttttgcaatctcaccttgttacagtaaaaaggatcctaaggtatcttgtaagcacactagaatatggtcttcaattgaagtatccctcatttctacatcttgaagctttctgtgatgcagattgggctgctaatcttgatgatcgtcgctcaaccacgagttactgcatcttctttggtggaaacttaatctcaatcaaaaaaaaataggctaccgtctccagatcatctacagaggctgaacaccgcagtttggttgttgtggtcactgagttaagttggattcaatcattgttgtttgaattacaacaactctcatcaaactcctcctttaatctagtgtgataatcttagtactatgcatatgtcagccaatcctatcttgcatgctcgcacaaaacatatggtgattgattttcactatgttcgtgacaaaatcctgtccaaacaaatcatggttcaactgagcaacaaatagtagactccttaacaaaatcaatctccaattctaggttctttattcttcgagacaaatttggtgtggtttgctcaactaccttaagtttgaaggggattgttaagagaacctaagctacagttagacagttagagttctgttttacttggtttaagtctgttgtaactatatttttgttagttttcattacctgcacgtgagcttactgtatgaaaaaagttttgtcttctccatttaatctaatgaaacagttcttctttcttgccttagcttcatcgttcttatctttctttaagcattgacaagggcagtactagttttaataatattaattcaccatattaataagtggatttttcatttaaaagtttacaaaaatatgattactttttaaaaaatatatatttatgggaaaaattaaaatataaatttaaaaaatatagaacttaggaatgtgcatatggttttattttaaaataaattgacaataagaaaaatagtccattcattttatatattggtttaatatttccatacattaataatttgagactatttctaataaaatttaataattcatatatgatccaatcacatccaattataatttatacttttatacaattagattagattcgattggttcaattttgaattaatttattagatgttgcctcccataattataactatagtttgaaagcagaggaaacagagtataatgaagaaaaaagcataaaaagtagaaggtgaaaagctcagctcaaatgaactttgaggctggcgtaaacttttataaccaatgattgtaccgtacaagaatattccagaacaatgattgtacaatatctacacgttttacaattgcaaatcaaatcctaacagaaattagttagcctaggaaaagcaaatatacacctcagcatcagtaaaatacagtgcaatattacagtggtaaaatatggttaaattcatttcttaacaccccatctcaaactaggtggtgtctcaacgacacctagtttgtccactaagaaatgcaacttgtggttggtaagactctttgttaaacaatctgcaatttggtcactggatggcacataccgaacttcaagagatttgtttagaactttatctcgaacaaaatggacatcgaactctatatgcttcgtgtgtgcatggtagacagggtttgcagctaaagcacttgcacccatattgtcacaccatgtgacaggtgtgtaatggagaggaaaatcgagctctttaagcagtgcttgaatccaagtaatctcgacagaaacttgtgcaagagcacgatattcagactccgtagtaaaccttgataccacggcttgcttcttgcatgaccagtaaatcagtgtatccacaagatatacacagtaaccagctacactccttcgatcatcgggacaacacgcccaatcagcatccgagtaacccgtaatagcaagtctgtcagatactttaatatgcaaaccgtggtacatggtacctttgagataccttaaaactctttttgcagcagaccaatgtgaggaagtaggagtctgtagaaactgactcaacttgtttactgcaaatgagaggtcaggtctggtatgagtgagatattgaagaccaccaatgagacttctatactcagtaggattttgaagagtctccccatctgactttgacagtggtttgcctactgtcattggagtcgaacacggctttaggtgcagcatttcagttctggctaggagttccttgacgtactttccttgattaagatagagatctgtttcatctctatgaacttcgattctaaggaagtagtgcaaggctcctagatctttcaaggcaaacatagcatgaagtttgtcgatgaattgattaagtttgacaatattattcccagtcactataatatcgtcaacataaattagcaccatgataatcacacctggaactttgcagaaaaatagagaagaatcggctctagagtttctaaacttccagtttatgagagtactcttcaacctatcataccacaccctcggtgcttgttttagcccataaagagacttaacaagcttgcatacatggttcggtttagaggcatcaacaaatccttggggttgttccatgtacatgtcttcttgtaactcgccattaagaaatgcgttattcacatcaagctgtctaatatcccagtttttagcaacagcgatggtaagaatgattctcacagtcgatgccttcacaacaggactgtaggtctcgccaaagtcaattccaggcctttgattgaagccttttgcgactaatctcgctttgtacctttggaacgtgctatcagcattcaatttgactttagagacccacttgttaccaataatgttcattccttcagactttggaactaatatccatgttccatttctcttgagtgcaatcatctcagttgacatagccttgttccaacctttgtgtctaagagcttcttcgacactaggctcttcataatcacagttccactgagagtgtcctatatagactttaggcttaaaaatccctgccttagctctaatgatcatcgggtgagaatgagctgcaggcacgatttcttgaggggaatcaacagacccagtattgacagtaccaggtgagtgtccagagtgtgcaccatcactcagatcactagtagaaacacctggactatgaacatctgcagttaattaatcgaaaaaactagatgaaagagcaggagaactaacccgagttacctggttttgatcattaggatctgactgaactgtaacgtcttctccaaggacttgagacattgtatcaggtgagttgtacttctctgaatattgaacacaggttggtttagggattggaacaaggctgaccaagaaggcacactgacacacactgactgttcaggcttgtaattatttaggaaaccggttttgaatggaaaatcctcctcatttaatataacattcctggatatatagagtcttcctgtggaactaaggcatttgtagcctttatgagtattactatatcctagggtcacgcacttgacataatggaattggaatttatgtgtttgatagggacgaatgcacggataacatgcgactccaaagactttaagaaacttgta

SEQ ID NO: 116137 - DNA, 1960 bp, Cannabis sativa
  modified_base (1898)..(1914): a, c, t, g, unknown or other
tgatttcccaagtactatttcctttacggatgaaattgatcatgattatgttgttgtggtgaagtatgaacgattaccgttagtttgtaacaattgtaaaggaatgggtcacacttctgaaaaattgtaaaaaagggcacctaaagagaaagttcaagttgaggaataaattgagaaacccaaagttcctgttaaagctaaatcaaagatagaaattaatgacgatggctttcaaaaagttgtaagtgggggaaagacgaaggtgatagagaagatggcaacaataaatacttccaatgcctttgaagctcttgaaacaggggagagttcaaaaggtacatatgagattaaaagttctgaattaaatgataatagtggacggggagagcctctgattccacatgaatagaattttaaggtggaacaattagagggctcaataactgaaataaacaatttgagatcacgcaattgatttctaaatattttattggattagttgggctccttaaaacaagggtgagggcaaaaaatctgggagggtttatgtaaatatgtttagcggttggtatttcttgaataatataccatggaatcaaggtggaagaatcataataagttggaatataactatgtttaaagtgaatattttgttttgttcaagtcaattaatgtatttgcgagtttggccatcgggatatcatgattcttcttggtcacatttgtttatgctttaaatgatcaaaatgagaggggtttgctttggaatgatttaaaatatcttgctagagggattcaagaaccgtggttgatactaggatacctcgatgatattttaaagtcagaagaaagagtggtatattagttaaagagaaaaaatcagtggcttttcgtgaatgtgtgaaagtttctcaagttgaggatgttaagttttggggatctttctttacttggaacaacaaacaaggctttaagactcagattttctaaaagattgatagagttcttaccagtgaatattggttagaaaaatttgaacatgttgaagtagtttttctttccaaaggacaatttgatcattgtccagcaatattaaccatttttccaaatcaaaaaattggtaagagcccattcaagtactttagaatgtggagatttttcaaaaaaatataatgagattgtaagacaaggatgatcattgaaggtaactggtgcgccaatgtagagattggtatcgaagcttaagtcattaaaggtagatttttgaattctgaataaagagaaggtgattgatatatatgctgctgattctatagcctgtaacactctgctggaatgtcaaagtgccttacagaagatgtcgttagatgaagataagtgtaagctgaaacaaaaagcaaggaatgattataaagatatacacaaagcttatctctcttttttttaccaaaaagctaagattttttggttaaaagagagagataataacacatctttattccatgtcagtctcaaaacaagaacgattaataaaagaatttttgctattaaaaatatgtctagtactaggatagatgatcccttaaaggttagtgatattttgctccaattctactcgtctctcttggattccaagatgatgaatgagaaatcagtgaagcaaaccttggtcaaacttggtcaattctattcatctctcttggattccaagatgatgaataggaaatcagaagatttctgttacaagcctatacgaatgctaatgtaaaagaagcaattttcaatattccaagtggtaaagctccaggcctagatggatatagtagttactttttccaagatgactacgatttggttaaaggtgatgtttgtgatggattttgtgccctaaataaaannnnnnnnnnnnnnnnnagatttactaattaatataagattagaaatcgcttttatgttgcat

SEQ ID NO: 116138 - DNA, 1469 bp, Cannabis sativa
cgagttcttagcgagttgtcgaatgcattagttattcggactaaccctatgtaaagaatcagtctttactcgtcgcaagagagatgtacttgctcatcgcatataatcgatatgcatgaccagtattaactttttttggtcttgcttatcttttgactatgttgggcatagcgtgcgactaaatcttgtctcggtcaccttctcgcaagtttcaatcatgtgaggttgattctacgagaaccatattattgacatgtcataatttttctttgggatgtaagtacacaggtctctttttcacaagactagactcttaattctaggcaaaaaatttagctataacacacgcccctagtttcacaatgacactttgttaatcaacgatactattttcgagggacaggcgagttgtaccgtcacatcatggtgacctttggttgtcctgacgaggatttcaaaaggacagtaacatttgtttttcttatttttctaatgtgcgacgtcatcagaccatttgggtattgtggaggcataacttagggtaatcgttggattaaataaccttcggtcttcgaatgcaacatgtcataatcttaatgaacgagtatgacccctatataaatccttccatacgaaaccaacttctcattttccctctcaatcctcaaactttttctcccaaaaaacttaaaaaatcctcactgatcaatgagcttttttgaaggattcttactgaaatttgttcgagagatcacgttcagaaaatttttcaagcattcggatacaaatgttggttttttttaaaatctttcggctaatttgatgtatatttttgtaataattattggtaagcatcattttcttttgaaaattattattattatttctaattaaaaaatgattagtttttcattatttggccttttatgaacaaactaattgttgttgtgtataaattttattatcctttatgtttatgtgtatatttacgaaaaataatttttaaagatggtagtagtatttctataattattttcttattaaatttataatataattatttagtagtggaggcgctgctaatggtgaatatttgagaatagacaatgataatagtcacaaaaataattgttggtagccactataacattattaaaaacttaaaatatataaaagaaatgtctcaatttaatataaccactacaaaatcttaaaactatttagtttaatataaaatattttagtctattgatatgaaaattaacactctaataatctagtaataaatagattttaacatcttatatgtaatagaattaattgaaaaaatatatattaacaaatcataaaattttatcatcatttgttgtggttatgtaataaccaaaatatttagattattttctattacaatagtctagatatctcgatgtggaaatagaatttcataaatatgttattttatatag

SEQ ID NO: 116139 - DNA, 1514 bp, Cannabis sativa
ttaattttaacgtacttaactacaatccttgtgggatcgacctcacttttggtgagtctattacttgtaaacgatacatgcacttacgtgttgaatttaccacaacagtaatattctgcaacaaaagattcatcgagcaattttcatctttgtgaaaccaattattaacaatggcctctttacattcaatatccttgagccaaaattgttcaaagcgaaattcgctacggtgtctaaccacattggaagtctgatatggtagggaaaccatgtattcaatcgctctatatgatccgaattgaagtaatcaagatgagaaatatgcttctcagtaaagaattctttccatttttcgttaataaatcatctatccattctctccttaatgagaatgctattataatttttatttgtccaagtcaatttatcacccttgaaaggaatggcaaacatgttacaatgatcgactatttttcgaaattcctccattaaactctctcttcttaaaggaccccgtccttatcatcattagataaaagttcattaaaatcacccattatcaaccgtggttcagtggttgatgctgaagccaaatttcttaacaaatttcaagtatggattcttaaatgagtttccggagcaccattaaaagcagtaaaatggaattgaggaaacaagcatacaagataacatcaaaatggttcattgaaaaagagttacatcaacattatcctaccataacaatattaaaccccccttcataccctgccttggaatttccaaaccattactaaacttaatagaggaacggacacgattgatagaattacaagatataacttagattccataataaaaagtaaatgaggcatctgttggtgaaaagtcagtttaagatgcctaaatgtagaagggttgcccaatccctttgcattccaactactgatttttatggctccatgtggggttgcatactcgcaatcaccgctgaaaaaaatgaagtttcctcattagaatccgactgtgcactagaaacttgctgagggcggaaatcattgaaagccttgctaccatcataataacaacatcattagtttcagaatcagtaagtggaaaaggaagaggaaattgatcaacaatttggttttggtggtgattagtgttaggaagagatgagacgataactcgttaatttctttatgtttttgtttcttcaaagtaatgataaaattaattaaaaaaaaaacaattttagatttaaaaattaaccaaagtaaccatttactgagattttcagaaacatatttaaaaataagattagaaataaagaaaggattaagaagaaataatacaaaatttttatgtggtcgggtgttaacgagtcttagtccacaaatcaatattatttgagcaaaaaaaaacccaatgcaaagtatttggagcccaatcccaaaaattgtagggaacttcacaaaaaaatatggaataagttaaaaaatatatcttttttgtat

SEQ ID NO: 116140 - DNA, 1910 bp, Cannabis sativa
  modified_base (666)..(677): a, c, t, g, unknown or other
attgaatgaaattagacaaaagtacttaaatctaacaatctcaatagtccagggggaatttttcacggccaaaaaagttcagtgggcatgatttggtctatatcaaagttcaggaggaaaattactaattaacctagctaaaaggtaaaataaatttgctaagagcttaaaattgagctctatcaaatgctttaaacccttagctattatacctcgtcccaaactctaagaaattcttctctacatatacctcaataaatagtagaaaggtaaacatattttatatttttttctttctttattttatttctttagttaatttttctttttctttttactcatttgtgtgtttttctttatttttattaataaaatatctgtaaaaatataatatttaaatattatagagaaaaatataaagaattaaggtaatgtgtggtgtaatataaatatttgaagtaaaataaaaaaaaaatagagttttaataaaatattttaaaagatagagtagagatgttgtggggagagctctaagtaatttacttttagtaagttctatcacgaaaaacaacttgtgtattttttttcgtgagtattactaaaaaaaagaaatgcctaacacgaaaataataagtgtcatcatcatcatcatattattattattannnnnnnnnnnnttattattattattagtataattattattattcttattcgtacatagtaaatgcattgcaatcaattaaaggattgagatccatcctctagccaggtaaatgctcccttgatgatttcgtctcctaaccacatcgccaaaaattatcaatccatccacactgcaggactccccaatcttctcatttttgctattggcagtaatgatggcccgccctgccgtgccccaacgaaaaagaatcaacttgctagctcatcaggtttcaagagacatttggctactattgaaaatgagcagagagaaatgctgaagagacataggcctcaaccacgtcaagacgtagtgaaagtggcctccagtgatgaggcaggcactgtagacacacaagcctgccaagactcatgtatctcatgagctggaacgcccaaggtcttgggagtgatcgagcattcctaaatctcttccttcaggttaaaatgtataagtcatctcttctttttgttatgcagtccagaatttgtaagggttatgttgattgtgttaggactaagttggattttgattttggttttgaagtccccagagtaggattaggtggggggcttttgcttttttggaacttagacttgaatgtacttattactaattttttattaatcatattcactgttatatctcgtgtgctgattattttggttttaattttactactttttatggtgcccccaatcttgttaatcgtctccatacctggaaaattcttaccaggcttggccattttttaacttagaactataaaaataatggaaacaatagaaatggaccctctagccattttttgacagtttattaagaatttccagttagaagtcttagacccctatggaccttgaatgacctgggattaaaaacatcaaagaaatgttagattgggctgtagggaacacatattggcacctaaatcacactagcaataatttaaaccatcttgatttctttggttcagatcatagggccattcagttacttcttaagccccaacaccatcctactaatcatgcccttacgaacaaaagattattcctgtttgaaaatacttggctcactgaaccaaactaggatgatgtgcttgttgggttttctgccctaaataaaacttatttcaatataattagatttagtaattaataaaagatcagaaatcattttctgttgcatagttcacatgatttat

SEQ ID NO: 116141 - DNA, 1319 bp, Cannabis sativa
ttatttatgggacaatagtatgggaatttatccaacagtggaattccaaatatggttttatctttccctttttttttcccagcagatattactatgaaaatattagatattttatcatgtacacaaatattaaaaaaaagtctactcatattttcttgtaagagaatatctaacgtggatagtaaattggatgtgttttttcatatactagcgcaaattgtaatgatcagattgcccaccatcggtatttttttttttttttgaagttactaaatcgtaaaaagaaagactaaaggaaaccacgagacagttacaaagcacgaaagagaagctagatgctccaaacccgattcttattttgccgtgaagcttctctagcatttcgatgggttgcaccattatttttcctcgaaatgtggtagaaagaaacattaggaaatgaggataaggattcccgaatcaagtcaacaacattggacaaagcagaattgtccttccaatagctcttaacctttgagattaattgtaagcaatctgattcaatggaggccaaagggagcttgattgcagtacactaaagatgaccttctaacaaagcttgggcttcagcaaaaaggggtgaagaggcaccccattttgagatagaaaaacttgcaatttgttggttctaactgttgtgaagtgtagctcctcgacctgttttaagatgattaatatcaagggcagcatcgactgaaagagcaaaatggccatgttggggagagcgaggtactggatcaatttgatgaggtggttgatcgtcttgaaaagctgggttctgatccgaaacaatagactccgaaggactggtgcgggttgtgagagtctgaacttcttggtaatcctgcgataaagagcaaacaaaatcttctacctcaaggggattgttagtaaattagttaaagagtgcattgtttttcctgttctaaatctgccaaattaagctaataaacaatgtaaaagtgtcactagtaagatggtctaagcctctgagataaaattctttaatatcacaataacattttcatagtagaatgctttgacagaagaatgtttccacacagacttagctctagggcagtggaaaagggcatgggtaaccgattcaatcttgttgctgcagagagggaagtaaggactaggaatggattttttattaaagaggttcaggctactattaaaagctttccaggtgaaaagttttatttttgggagagtttttgtgttccaaacgatgttccaccagtgtttaaaacagttaaagtttttttttttttttt

SEQ ID NO: 116142 - DNA, 3196 bp, Cannabis sativa
  modified_base (2527)..(2528): a, c, t, g, unknown or other
tttagcaacctgaactttagattgggttagaaaatatataggataaaccacccaaaccgaccgatgtacagccctaggagaaagaatggagaagcaaaagaaagatctcattgatgcaaaggagatacaatctatatatacagagagaagctgaactaactaaacaatcaaaacagaaataacagaaaagagctaacagccaacaacaacaataacaaacttaatgattacccaatgtttataaaattgtaattttttttccagtttcatcagtacagactctgttattgtctgaaacatgacacatataagacaaaaattttagattatttggtcttgacgaaaaatatgtagtatcagttaattctaatttttttttaaaaaaaaaaattaaaacggagcttgtactgacgaaaatagagaaaaattacagtttcacaaacattgggtacttatgccactacaaaaaattattgggtttatgccgcttacaaactcaaaactttaagtacttatgccgctatttaccctattatttaatatcatttttttgatttaggcctttacccacttgaaagttttccatgaacaatatcacgatatgtttagatgatattctaacaatattcaccacattaaataccacattaaggaaagtactttttttttttttttgcacaaataaaaatcactaattgaaaacataatttatgaaataagttttaaaggtaaaaaaaatatttaatcatgttgttaggccacgagcactaattgtaattaatgagcaaaataattaacaaaaaacaagtatattcatatgataatactcttcaaactgttaaaccctccacttaattttactagctttatcgtacccttaccccgtaatctatatatgctcaacctatgttttaaaaataatttatcaattgttatttttagtgagattgttgtagtatttgaaacatgttcaatattgttcaatcatgtaagtcattaattaactaaaaaaaaatatggaaaccttttaattataagtaaattgtctagcataaaaaaatctcctattatattttaatttagaaataatatttacaaaaagaattagtttcgtaactaaaactatatttttgtgatattaaaatagctcattcgtgaagctagttatacatatttttgaaactagtgtttttcttttttagttttacatttaaaactagggtttttagagatagtataggttatggaaaacaaatcattatatttgtaacaaatatttatcaaaagtgctcaaattccaaacctaatctctcatttccgttacaaatctagtagtacattttttttttacttttaatcacaacaaaatttgtgattaaaaaaaaaatatatataattaattatatatcattatttttctgttataactaaaatatccgtgactaaaagtattagttacaaaaattataatttgtgactaaatgtatgtttttagtcacaatacttgttacgactaaaactaaattagtaataacttatatctaaatactatgttttaatcacaagtaaatttttattaattgtgactaaaagtcacatttagtcacaaaaattttatattataactaaaaaattgttactataaaagtaatttttttgttgttgttgtgcatggctttattttccaccaagatttgagtttaactatgttcaaataacttgtttttatttcaatctgtgagttagagattgaaggcgatctttgaatggctacctatggccagtggtggcaagtgcggaatgatgagaagactagggtttcgaccgcaatacttgaagaagaagaagaataagtagaatgacatgatttgagttcattattcttcattttttttcccttcttcattaggttttgtgtccaaaaaaatgacatgtaatcttgttttgtgcatgtcaaaaagccacttattggtaaacataaaaaatgtatcgatcccttatatttttattggacacaaataaaatcttacatcaaattaatattatttgttatattgtttcttaattttctggtgcaaatagttataccatttatagcaattgaattggattcaaaaacaataattttgtcacatatatcaccatacatatttccttgtatactcattaataattttgggtagctggctctgtaattagaccatccaaacaattctacatgtcacacgtgtttggtatgaagtgttcaaaataatttgattatagggaatattatgaaggagaatatgattatagagaaatgtgtaaactgtatttggttgtgtagggtaatatgtaatcatattctcattaattgaattatagtgtttggttgagtatatgaatcttatatattattttgaaaaattaaaattaaaatattttcttattgtatctatataataattatatataaaaataaaataattattcattaaagaaatatatttattaattagctagaaaatattaaattttattgtatttnntattaattaaaatgaatatttctatatatcactatattatatatttttgttcgctatgtcatttatgtatactattcttataaaatttatgtataatgtatatatatgttattgctaataagataaaaataactcagttataaaaaaaaaaaacgatcttacaaactaaatatatatcataatattttgtttataataaatcataatattaatggtatttaaatttatttattaatacaaaaatatcattcaaattaatataatggaagagaataattaatcccacccttttttaatgtatcaacattaccctcctcaagcgtatttatattactaaaggacatttcaagattaaaccctccaaacaaataaggtaatatttaaccttatcatttccttgctaacattaactcattccaaacaccccttagggtaaatagaccctacatacattggccgattgagaaaataatgtataatgagaatgaaagttaagaaaattttcacaaatatgtaaatgcaaaaagttatgttaataaagtgttgaaaatattagaatattttatatattaaatataaaatcaatcaatataatacaatgaatattttatatttattaaatttgattatgtaacgtccccgcttcaagtctccattgggcccttaca

SEQ ID NO: 116143 - DNA, 1693 bp, Cannabis sativa
ctctctctctctctctctcctccgctcagaccatctccggtcactatcccccaaaatggacctcatcgtcattttcagaggctaaccaaacctaagacccccctactcagatcccctcatcgccggctccctatttttctcttgtagtttctctgtcagctcaaatctagttgtctaccgccatcctttggccaaacaaggaccaccatcgagctcagagcctcctaaaacctttaattctattagagagtctcacattgctaatgtgtgagaaaacaataaaatatataagatgaatgagctactcctcccattgctaattggttttgagatggaacttcatttatgttctcccaaattctaacgttgtatcaaaaaaaaaaaaaaattctaacgactatttgacccaaaaaaaaaataatgaaaaaagctaattgaagtaaagccaaaaaaaagagccacgaaaaatctaaaaaaattgatccaatggccaaagtaaaaaaaaaaaaaaacgacttgtgattcggggatagtgagccaaaagaaagagccgctcaaaattcaaaaacactgatccataaagtagagcaaaaagagccacttgtgatcagaaatagtgagcgaaaaaagagctacttgtggtcgagttgtccaagatggtgagcaaataaaatagctaccatcttgagagagatgtcaatgagtcccacattactaatgtgtagaaagataatagaatatatcagatgaatgagctactcctcccattgccaattagttttgagataaaacctcatttatttcatcccaaattctaacaagttctgccccttatttcatctaaatggtctcttcatccaccctctgtcgccacctttgtcaggaatctagtgtgggtctcgaccagcagaagctatggtcaacaatgtgttgtgtctcttgttatattgaatttgaaacaataaaactggaatgaattaccgataaaagattctggttgagtagcggacaatgtcgctttccttaagacgtttcgcggctctacccaaagtgtgcacggcagtccaacaaccatggcgtccccaggataaaacaacctctgtatatgatatgttctacactgaactatatcgttcaattacaccttaaattttgctctgagaaaaatggtaaggaagaaagaaaattttggatcttgaaaaagatgtattcttccgttgatctgatacaacttatatagagaagtcaatccaagaataaacagtaagaaaacggtaatataatcgtggaggagttggatcatggcagtgaaaaggggatcattggatgatcgctttttacaacttcatttaatgttaaaattaattaataaataaataaatatttgtttaattaaataatttttgtaacgccctaatgttaaggcacgctacagtgttttttaggttacaatgctatctttgctaagcaaagatttttctcgaaaaacgtgctaaattaaaacttttttataatgaatattaaacttcataattcacataattatttacaaacaccgagatcccgtttttaaacttttgtaaaaaaaatataaccatatacaatatccaggtcgcacagcaactacaaaataatatccctagatgtcccgagatcgaacactccaggtcacgctaccacgacatgtacaatc

SEQ ID NO: 116144 - DNA, 2513 bp, Cannabis sativa
tacgctggtaaaactttgacctctttgccagtgcagtttgtgaatacttttaccagcgcagtagcgtagcgaactgtgatggtaaaagtgacatttcttgtagtgataccttcgatgctctctcttgcgcgcgatggaagatgactcagggtggttgaagaaaaaatagtattactttgaatttttatggcgaggcggttagaggtgactcggatgcgtctttctctttgttttgttttggatttgtttttgtaaatattgtatgtagtcttttttgagaataaatcatgttattataaattaaatagatgtatatagttagaatcagatatataatttttgttttagattattttgattttattatggattattgtgtatggttttttaattttgctctgagtttttagattcttggttatggtttcagtgcttggtggggtattgaattcaatggtgatggtggtaaaggtaatagttggtaatattggtaatattggcagtataaagaatatgatgaagaatgaagaaaataaaaatcaggaaaagaagtcaagaggaaacacaaagaagaaaggaaagaatgtaaataagaaaaaaattaacaaaattaattttctttaacaattttttttaattttaaaatgaattttgaaatgattttttataatttttaaataattatataagatggaccaatataaatttgttacgtatgtatggtgtacatgtagacagtccatatcaatatttaactaaaataatagatgacacattaaatttattaacaatttaacagtttggaaggtttcaccactaaaatttgagataagaaaattaaatacaagtaaaatgatacttaagatagtttagctgcaaattacttgaatcttttcagtgatgtgacactttaagggcccacaaatcgtgcacatagtgcaaagcccacttactcttaccactcaatttatctaattcttctacgtatatccccaccacagaccaccatttttcttttttatatcatcaccatcattctctaataccatcaccaccatttttcccaccaccactatcaacttcttccaatttggatattctattccttcctttcttttttttctttttggtttattctttagagctatagcttctatttaatattttcagataatttttaacaaaaacttataatagagagaataatagtacgtacaatatggagtgaagtgaagaaacaaaaaatgttccccatatatgtacacatttttttttttgtatatttattaacatctagttggtagttcagtcgcaatgaatacggctttatatacacattgatatatctgtgtgtgtataatacacaaaagaatgttaaagctgaaataaaatcatccttgaaatattcgatctcgaagggcatgcatgactatatatatatatattgtatatgagcttacatttttaatatacattttatttatatgatacttctttaatattctttaatggatttattagatgaattaatttcttattctttttcatatatatttgaggagaaatgttaagtgtgtactttaaggcctcaaatataataatcataatattatataataatattgggtccatatattttaatttaataaaatattgattatttacagattgttattttggtgtgttgttaacaaataagaatctcataattaaaagatttctctagttaactagccaattttcttttcgcttgtgtatatttttcctttttcttataattaattttttcacgtgagggaaaaaaaccaataaagtactgtactttgaaacaaaagagaactaagaacataatttactaagatttatgaagaaatgagatcaggatagtattgattctcctttatttataatgttaacaaaaagatctcaaaatcccatatagatggttatgttcattagtgcctatggcactaactagaatggtccagagtagaatcgattgccccgcagtagtactagctagatattatatatatatgagattcttacagtactcttataaatatacatatattatttatattgtggatctaattcgtcttatatagtggatctatacaataagactagctcgctagtacgtaattaagttttagatttcgttttgtataatataattgataagttctagctacatattttaatgatagattggaagatactgctaatttggctgttttggctgatatatgttataattatttactgcatgtacatagcatatgaatctgactaagcacaagtgcagaacccattatttggtacttcccacgttatatatattatatatataatctactagaagtttcatgtgtaggattatacaaggtgcattattatatatggttttgaaaatatatactttgagtttgaactcaagtcttatatgattatataaatatttattgatatatataaggttttgaaaatatatactttgagtttgaactcaa

SEQ ID NO: 116145 - DNA, 673 bp, Cannabis sativa
gtaagggaaaatattggcttggtggttgtttgaggttgtaattcaattgcttttgattgttagatttttaatttgtgactgaatttataattgttggtgtttaatttgacaattttttttcggaattcaagaaaagaaaatttgagttatatatactagtattaaacctactaaattatcttacatgcaatgaacctataatttactaatatttaaactagttatgctaattggtcttgagttgataataattgaattttttttttttttttgttagtgtttaggtagtgtctttctttggagtaaaagtggacacttccatgatttatagttgaagtctttctccccaaggtttggaccctggcccctagcgctcgatctggatctcgatctccaacctcgacttgaacctagactcgaatctcaacccagatctcaacccttggactcccatcccttatcgactcactctccccacttaaacaaaaagcaaaaagtaaaaataaaaggacaattttcaaaacttatttttaatttttgtttttaacatcaaaaaacaaaaacaatgaaacacattcttcttttctaaattaataaaaataaataagaaacaaaaattgtgtttttatttaggaaatttgatattatatgcttaaaattaatttatccacta

SEQ ID NO: 116146 - DNA, 1086 bp, Cannabis sativa
  modified_base (38)..(70): a, c, t, g, unknown or other
gtaacctgctattacaggtcaaagaaaaatgtaaccannnnnnnnnnnnnnnnnnnnnnnnnnnnnnnnntcacccatatatatatatattatccatgattaaaaacctccggcggtaagtcctccatcaacactgataacttgtccattgatgtatgaagcagctggaaggcaaaggaatgccaccagtgacgaaatttcattaggctctgcaagacgaaggattggggttctcttaaacactgctgagaagtcctcgtcaataggtgtcccttcctgttcaatttcacatacataattactaattaattggtttaatacattaattggtatatataagaattaatttaaacaaaaaaaaaaagagaataattaaattctgagaataaatgtatttatatatagttacaacttccatgactcgggttctaactccccatggtgccacactgttggtgcgaatgccgtccttagcccattcacaagcaaaattcttagtaatttggttgattgctcctgttcaaaatattaatatcaaatgaattaatataaatagatgataagttataatagatagcacatattaacataggcagtatattattattattatttaagaaaaaaagaatgattagcatggaaaacatgcagtttatatcatatatttaataataataactagtgaaaagttgtcatgcctttggtagcggcataggcagagagtttaggtagagcgatgacaccagcaatggatgatataaaaacaatgcttgcttttgttgaagccttgagaagaggatgagcaagttgagaaagatgatatggagattcaacattggtgttcatcatatttgagtactcttcaacaccatagtttgtagcactatttatcactaccgttgcggcattgtttacctaaaagatacaaatttgtattaatggttttaaaactaacaagaattagataaatttattggcccgctggttaatttgttttgtacttttaattttatactaggtgaatgtacgtgccgagccacgtattgttagtttcatttaagattttggtctttttaagattttgaa

SEQ ID NO: 116147 - DNA, 1252 bp, Cannabis sativa
gggcataaaacccaacatggataagataggtaggcttgcaagagaactggccacttccttctttagtccaaatccaatgatctttcccctgacccgtaggtctagccccctttaaaataacaccaatggtttcattatcaaataggatacgcaacttttgaatatcccagtcttctttatttgttagcagatcgaccacctttttgtacactgtatatggcacaccaacgacctttggaaaaaaaatctttattatgagatattcaaggatcctcccaaatattcgtatctttcacatcagagattactttacaagcgccttgtctaaggatattattagcttttaccacacttttctaaaaccaaaagtcaacagacttagccttacacttaagcatatcctttcctctaaggtatttagctcttagaattcttcaacacaaagattgggatttagtaagcagtttccaagcctacttagccaagaaatcctgattcattttcttagtttttcggaagccaaggctcccacgggatttagggagacacaacttgtctcaggatttctagtggatttcatagttttctttttcaaagccccatcaaaagtcctaaactattccatcaatcttcgtagcaatgcaacttgagaactttgttgtttgtattgcataaacaggcatgtccagacccaccaatttaatgagagtggtacgacctgccttggacaacatttttgctttccacccttgcaatttggaagtcagattctccaaaataaaattaaaatctgcatccttgtgtcttgagcgtaataagggaagacctaagtatttgatgttgcctttcaaactattaatgttgaggacatttctaatctcaaacttcatgatctcagaggtattcttgctgaaaaagatggatgttttaagattatttactcgttgccccgattaatcataaaactttttaagacaattcaacatgtccttagcttcccccacaatagccttgccaaccaagattagatcatccgcaaataagatatgagaaataccagggccactctagctgattctaataccctttgtctcactcttttttatagactccttaaagagcctagaaaaaacttctgcatcccatatgaaaagatacgaggagagatgattcccttgccgaataccacaagagggaccaaggccggccctgaaatttagtgggctatagggaaaaaaaaatatttttgggc

SEQ ID NO: 116148 - DNA, 1615 bp, Cannabis sativa
agaaaagggtacggcgtcactaatttgggaggtagataacacgcgctgagatataattgagatttatggaaatatacagtcatgtgtgtgagtgaactatcaattgatgaaccattggatctctacaatctacatcgtgagtgagtgggttccattgccatttaagacctctttttctttctttcttttcaatttttatatttattaatttttgttaaataaataattagagaaatgacaaaatggagcaagataaagtagtttttaaacagttttacattgttttttggctcataaagatttaagaaatggagacaagattagaccaaagttaagtagagttgttggtgaagtttatataaaccatttattgtaaacaaaaagcatcaaatattggtacatataaacataataattttcatgtgaaagttaattttttctttgctaatttttggagtcacaccaatatctatgcttatctcagtttctcataatttccaacatgtgatacacggtgtactgctcaaacctacactaatatttaagtatataacctacactaatatgctgctattgatataaagaagaggaaaatagaaaatggggcggttcccaaaaataggaaaattgatgttattgctgaatgctcatctccaatttatagtaatatattattttcgtagaagctgtagctttgcagcaaattttatcccctaatgctctggggtcgattttccagttgctttagtggaatccgattgtcatttaacaaaataaggcacaagtagaatgacaagttttctttgtctgatttgatacggaatgttataatctcttttttaaaatttcctaatatctctctaaattatgtacctagggaaataatactataactatagcacataatctgtgtaggagagcttttagaactagatcaagagattatttagaatggttgtattctaaatttgctaacttaaactaattgctttatcttaatgaagttacaaagttttattaaaaaaaaaaaacacacacacattttgagaggaaaaccgaatgtatggcctagactgtgtacaaccatattaataaaattagtaacattataaattctactatagataattaaaaaaattgaggtgatgtatttcataaggtacatatataagtaaaaaaagatatgtcggttcagaatttttgtgaagcgtgatggtttatatttttgaatattttaattaaacaataataataataataaaagtagtgatatggaatgaagggaatttgatgttataaacttgagaggaggagaggacccctagaataaagagtaggtaggcggcaaccatcccttgcgattcatggtcgattctctgcctcttcttctactacatataaagctcattattatttaccaccaatattaacccatgttagaatatttatataccgtaatattaaattaaattactatttctacgcaacattattaaagtaaatgattcatatgaagagggcccataatattatgtttagcattatacactaaagtggtgtttggtaacacttttttaatgaattttctatttttaaaattgaaaaagtgaaaata

SEQ ID NO: 116149 - DNA, 2359 bp, Cannabis sativa
  modified_base (39)..(73): a, c, t, g, unknown or other
ttatttcatcgttttagaacgttcatatttagggtgttnnnnnnnnnnnnnnnnnnnnnnnnnnnnnnnnnnntaaaataatttccaacaattccatcctatctaacctctccactgaatctcagcagtcagcatgatcaacgtctaaagatgatgcaacaaattaaggctctggctcaagaatagtagcagattcaatgttccactttttttttacttgtcttgtgaaaaaagcaggatcctaggtgtcatctttgggctgtgcctcatcaatacccatctcaatctgaatctcaacatcattagtaagtgatggtcctggcatatgcctcttcatctgggcgaggacataaccccttcgtgaataccaattgctgtttaagacgcacaacaaaagaagtgttaataacaacaaaaaaatgtgtaaaaaacctatcaaaaaaaattgggatactattgaaatgatataactaactatttacaacataaaagaagggttcatacctgatttgaaaataatggtctgaggtccttcttcccaatctcagccttgttagtcgagctaagcatcttggaaaaatgaattccctgaggcgaatcatacctcttcccaatctttagaatggtctcataggtccaatactgtaatgtaggtacgaagccatatgttgtatacttgcacttgtgttgaacatctagcactaacttcttctcaaagtttgccttctatttaatcatgttttttgtagggtggacataagtctggcaaatgagtacttctccaaggaatcttgaaaagaaaatcaagatctttaacatatctaagtatatcaaacaaaatatgagtgtttccctcacgatccaataacactgcctcctcaaacaaacacaaccctaacttgtacacgtctttcagaatgtcaaagtttaagaacttattctgaagtagttctgttttcacactatcaaatcggttgaaatagaggtttatcaacctatttgcccccgagtgggcactcttctcctcatttgttggcccctgtgtgaagttgaggcctgtgatttgtgcaaactcgaccaccccaaatttgatcttgttcctcccaatgtaaaattgtgtttcttctacgttctcaacatcaagctttatttatgaagcatcaatcagtgaaatgacaccccgaagaatagaataaagtaccagccctccaaaattgactgaaagggttttcctttgccctatcagtcaaactgaatctatcaagctacaatttgactataaatacattgttgcctctatatgtcacatcacacgacctgtaaagtactctggggatggaactatataaggttttgaggcatatgcaaatgacaaaaaaatacagttagcatgaactatcgaaaaactatcgacaaatgatcgataattaaaaagattactataaataaaaaaatatcgacaaaacattgagaaattatcaataatttatcaataaataccaattagaccaaaaaaatacaacaaagtagaaagcgtcgataaagtatcgattcattatcagtaaatacaaaattgacaaaataattaagtcgaatgggaaaccatcaataaaatattaataccctatcaataaatacaaaatgataaaataaattagacaaaccaaagactattgataaactacaaatattaagtcgatgacctatcaataaatacctaaatgataaaataatttaagcaaactaaaaaaatatcaataacttatcaataccctatcaataaatacaaatacataattgacaaaaataattaagacaaattagaaactttcgataaactacagatattatgtcgataaccaatcaataaattcttaactgacaaaataatttaagtaaataactagataccatctataatagatattgtgtagataacctttcgataaatactaaaattaacgaaataatagagataaaccaaataccatcgataaaccatagacattttgtcaataacctatcgataaaataccaaatgtgaaaaaagatactgcatagatgaaaaccatcaataaagtattaataatctatggataagcatgaattggccagaaaatactagggctgagcatcggtcggtttggtcgattttttttctaaataaaaatctaaaattcgattttcggtctggattggtgcaatctaaaaaccgattgaccaatccataacttatcttaaaatcgaccgttttgaaccccagtttggtcggtttaaatcgcccaaaccaaacttttttttttctttaaaatatgatttaatttattctataaagacattattctacattttataacta

SEQ ID NO: 116150 - DNA, 553 bp, Cannabis sativa
ttttttgtaaaaaaaaaacaaaatatctactagcttttacacattttttcaactattcaccattaatgtagattttttaacgaatttcatatggcactcactatttactaaagaacattaaaatcaataccaatatatagtaaattaagcgtcatttttccccctcaataggttgtagttgataaattttgattgttttttttcacttaataaatttatgtcatatgttttgacatccatctatatttacctttttgtaactttgtttatgatacgtcaatatgatcttgttaaaaaaatttaaaagaaatataagtacacatgacgtatgcatatttctattttattcgtaagttaatccttttatatataattcaagtgaaaatgaattaattcacataaaaaatgatattaacattaatattgatattgatttaaacttataagtttaatgttgaatatatttttatttattcttaagaatgaaatagatgtagtcataactcactacaagaaatgtcacttttaccagcacaattcgctactgcgctgg

SEQ ID NO: 116151 - DNA, 2474 bp, Cannabis sativa
  modified_base (900)..(906): a, c, t, g, unknown or other
aaaaaaaaaaaaaaaaggataaggcaaagcttatagcagtgagagagaaaagtcggcaaaagagctgactaggttttatggttgaaaggtcgcatccctcgaggggtattcacatggctttgtaaacaaaaagtaaagtcacgtgtcactaaatacaaattatgttttggtaaataattacaatttaagctaagctggccattgcattgagcaatatctctatttattatgttaattaattaacctttaactaactatttagtctcaaatttttggcgagagaagagagacaagattattatgtacttgactagaaaataacaattgctaaaagctatttgtcctcgaaacacaggttagtagtattcgaccgactgtgccggactatactgatgacacatgacgaagacaaatattttggcgccatttctctcttcttaatttcattattactacctagcacacgcgacacgtgaaatgcacgtggaactgagatattcaatgtagttttttctttttcttttttgcaagaggtattaagtactcttattttattttaggctaattagtatttttgttttaacatttattaaatcatacctcatgaatttttgaggtcgttaaaaatgcctcttgaactattgagattgttagatttaaagactttttctaatttagtaaaaaagtctaacatggataaaaatttagggggcataatttaatacatgttaaaattcgaggggcataattaaatagatatcaaagtctgaagagcatagtttattacataaacaattactgaaacagtaaaattgaataaaattaaacaaaagtccttaaattcaacaatctcaatagttcagggagcatttttaacgactttaaaagttcaggggcatnnnnnnntacatgtcaaaatttagggggcaaaaattctaattagcctttattttattttttaaaaattaaatattaagtagtgttgataaggggaaaagaaaatcgaaagtgctatgagtagagataattaataagctatgaggcgtttggtttgtgataataaaatggaatgataaaaataaattaattttcatttgattctattatttagttacattttaaattaaagtactgcatattataaaatttataaaatactatgatacactgctacaataataaactttagagggcttatttttgttgaaaattaaaataagggacaacatagagttattaatttattgaagagttataaattttttatggcgtcagtcttttggaaataactgacgccataaggtgtgcccctatgctatcagttatttttaaataatttacaccataaggactttataaccctcctcagccctttgttttcttcattcgatcagtcaacccagaaacttctaaatcagagaaaccccataccctctccaccaaccacctcgttaatcacctcccatttcaccattttttttttaccatttcaactcattttttaaattttctattttccatacctaaagttatatactcgaaaagatcacattttttatcgtttttaagtgtaaactgaaggtagaggtagtggttgtggtggctatacctccagccacaagttagaataccaacttgattaagcgttagtttaacggttatttaccattgagtagtgtaacttataagcctttcatggactccaagaaaatgggatacaagtgtaacaaaggacaacaatctaacaggattgaagcttttaaagaagaggtgatgaaacaacaaactgagcctctgcagggtgaagtggatatggaaaaaactcctagggagaagaaaatgtagtaggaaatatggagaatcagttagaacttcccactgaggaagaaaaagacttagctacggagaagacagatgatttgcgacatcaatttcttgattcaatgtcaatggaactacaggtagattttgaactagaagaggccctagttgatcaatggagtcctgctgaacattagaaagtggttagagagtggcctgcgaatggtgactggacatgggtcaatatgaataaagctagattctgagaggaggctcatgggttgcctattccatatttgacatgggagaatatttatattatgccaagaaggtgggagagtatatttatttcgatagagcatctagagttcctactggtagaagaggattctaaaaatttcaagtggattttctcatcaatcaccggctagtggcaagtttttacctgaatattttaagggatagaaagcaatggatacagttcaagtatcacaagctacctgctttatgcttcaactgtggttttctaactcattcttacacaaaatgcgaaaggtcaatggaattctttattacatacaaatacgtcataataaggtagagtttactcatagtgagtactacgacgctaacactgttggaaattattttac

SEQ ID NO: 116152 - DNA, 1229 bp, Cannabis sativa
acaccaccccttaaacgcaggggtgattgagtcactccaagtttggtaatgagttgttgaaatctcgatggagatagtaccttggtcaagcagtcagcaatttgatctgcagatgaaatgtaccggacttctagttctttctttacgattttgtcacgaacaaagtgaatgtctatctcaatgtgtttcgtttgtgcatgataaacggggttggaagccaaggcactggcacttgcattgtcgcaccaggtgactgaaactaagggcagaggaaaatcgagttctttgagcagtgattccacccaagtgatttcagcagtcacatgagctagggccctgtattctgactccgtgcttgacctcgacaccactgcctgtttcttcaaagactacgatattagtgtgtccccgaagtaaacatagtatccaccaacggactttctgtcatcagtgcagcaaccccaatcggcatcagactaacctgtaatgttgagtctgtcactatagccgatgtgtaagccatggttgagagtcccttttagatatctcaaaattcgttttgctgctccccaatggacagttgtgggagcttttaagaattggctgagtttgttgacggcaaagcttatgtccggccttgtgtggcataggtattgtagtgccccaataagacttctgtaggtagttggattatgcattgcttcaccatcagataaagaaatggttctccctgtaaccatgggagtgggacaaggtttcaggttactcatgtcatgtctgtttaagagttcttcgacatacttccgttgagtgagatataggcctgtgtcatctcgggtcacttctattcccaaaaaataatgaagtggccctaggtccttgagagagaacagtgtgttgagtttgtagatgaactctttgacctttgtttcattgtttccagtcactatgatatcatctacatagatgagaaccaatatgattaccttgctgtctttgtagaagaatagagaagtgtcagcccttgagttcttgaagttccagtcgagtagagtgcctttgagtttatcaaaccaagctcttggagcttgtttcaacccgtataatgatttatgtaatttgcacacatggtttggtttggtgggatcttcaaatccttctggctgaaccatgtatacatcttcttctagagtgccattcaagaaggcattatttatgtcaagttgttg

SEQ ID NO: 116153 - DNA, 2767 bp, Cannabis sativa
  modified_base (1513)..(1515): a, c, t, g, unknown or other
ttgttactaaaagtagtagttttttgtagtggtcaacatgttataatttgaaacaaaataaaaagcgcatgatgctaaatatttttaactaaaacaacagtggtaatgtggtataatattcattatattttatcaattgaatggtattattactagtgagcattaccttctataccattagagttagaactggctaaaatgagagcgatggaatcgcattactccactcaatccggttctgtttctagctttagactcgcaaaattaattctttcttcttttctctgttagaagatctatcacaacaataattgccacgtcatcacatgcatgcacgtggatcatttgacaatttcaaccagatctaatctaattattattataatccactacttacgtttcgaccatctcacaacatcaaaaaaaatagtaataatcacaacaagtataacttctactactatactactactactactacatacatttccctcgtttctgtaaacgaaagatatattattacgtataattaattaataatattagctctacacccatggcttgcatgagacttggctctaaatctgaagccttccatcgcgagggccgaacatggtatacatatatatgtatatatatctcttcatctccacgtaaatatatagatacatccatatacatgtcaatatatatatcatcatatatacttgttgttgttctatcaggttatgcacaactgggcttccaagcgatattgcaattgaggttggggagatgtcctttcatctccacaaggtaaatttctcgaaatcatgcatgaattaacatttaatatgggatgtttagtatcttcattcaatattctatcaatgccttacatatatatatatagatataatacttctgatatcacgagtatttgctatttatataagaaacactactgatttcaaattgaaatcaactactgatttcatattgaaatcacatagatataatgtaataatttggaaacggctaaccagtgccacaagttaaattaccaaagagagatgctctttcaacataaaccaaaaaatgtattaaaagaataccaactgacaataaaaaatagtatgtagctaagaaatgtcttcaaatgtctgtttgacctgaattattaattatacatattattttaaaataaatatatgttagacctacaattttatttccactaataataaaatacctcgttaaatactaatacgaggagcagggccggtccaagtattttggagtctcgtgcaaaattttaaaattggggtttttttttaaaaaataaccgtgtactttaaaactaaaattttattactagatttttttttttaagatttattcataaattttcaattataaattttttatttatgtgtatataataggaaaaaaaaagaaaaaaaataggcattttctttaataataaaaataaaaaaattgggccttaaaaaatgggggccttgtgcaatggccnnngctgcccaatgcttgggccggccctgacgaggaggatcgactcgagcctgctgagggctttggccaagaaaatttaattttttttttaaaaaaaatactttatttttggaaaaaaaatatttaagcactttgtcaaaagaaaatagcatttccaataaaaaaaaaatggaaggaaataatttcatttttttattattaaattgtggtaaaaaaatataaatatagtaaattcttaatttttagggaaatttgcacaaagaaatttttgtaattttttttaatttacatttttacggttttgtattgtttttatgttattgaaatgttatactatattttcgcagcatgaaaataactttaaataaagaaaaaaaaaatctgtgaaactatatattaaaaaaaactcaaaattttgtaaaatgtattgttagttgtttttaggtatttctgaaataatcccacagttttaaagagaagtttgattaaaattgggggcctcggcccaactcgacccatcattggattagttctaataattgcccataagcatgtaaatgagggtgatccccgctccacttaatactccagctgatgtaacattgtatttctctaaccacgaggtctcatctattgtactagcgagacttaatgggtgggggcaaaggggcggtgaagccctatcagccgggccttcaacacatatacttagcccaaaatttacacaaattacgctatttaaaacttttacatgataaacttttttaatatatatttttacatttttactgttttgtaagaagaatacgaaaataattaaaaaatcacatcaaaaatcaaaacaacatgaaaataatatacaaatgataaaatatcaataacaaaacaacaacaaacataacatgactataacataaaaatataaaaaaaattgtattttctgtaaataaaatcttaaaaattgtaataaatatataaaattttgtacgaccatatttttataatttttttattattatttttgtatatttttaaaataatttgttattttattttataaaagctcaattagatattgtcattgaattgtaaatgtttattatataatatgttatattaaatgtagctataatagaaaatagtttttttttaaaaaaatctcaatttaaatttaaacttactatatatatatatctaatttttttatcttatattaaatgtggctatatagcataaagttttttttttttttttt

SEQ ID NO: 116154 - DNA, 1039 bp, Cannabis sativa
taattttttaaaattaaaatattatacattatttattattcaatatactacttattatacaaaacataacttaaaaaataataaaaataaaaatgacactaatataacaaaaaaatataaacacatattataaaatataaaatattaataaaacgataactaacatattaagcgggtctctatcgaggcaaggagtgtcattcccattccgtttaccgttagggataaaaaataatccccgtctctgccctattaggggcaggtctctatggagcctcatctccatgaaaaaaatgtacacctctagataaaatacaaaaatatagtttgtaaatttataaaaatgtatttattttaaaattaattagtgattagtaaaataatttatattttttatatatgattcaatattttttttaaagttaattaacgtgaataatattattaattagtgaactaatacataataccatcaactgaagcctgtgatctaaatttaaattctagattaagataactcactttgccatggcattaccgcaacattgacgtcagttttacatattaggagaaattaattatactagctcatctttattttcttgttctcatgttcttttgtttattttatttattttcttgtatgatttttaagatcaaccaaaatattatcattggtctgttccaaattgtttgatattaatttttactcaatttttgtagagacaatatttatttagggcccgtttggtacgtaggactggatgatttttttttaattttaattttattagtatattttaaattttataagaatttaaatgaaagaattatcacacatttatttataaatattttataaaaaacttattcattaaaatgagtgaaaatatataattttaaattattatacaaaagttttaaaaatttaaaatattagtaattaaacaataattacttaaattgattccaagaaaacaatatgacaataaaattatatatttatataaatatttttaaaatttaatatttatattaa

SEQ ID NO: 116155 - DNA, 2498 bp, Cannabis sativa
aggtgtacttacatatatttggagattggcaattgtgttattcatttttatgcattctaagtcatggttgatcacattaaccatattaatctttgttccagcaatcccttgattttcatctctgtgcatgtttgtttttttctagaattttgttaaacattgagtctatttaagtgataaaaaagtcactggtgtaaatatttatgttctagttttgttgacatatgcagttgagtggggtacatactgtgtgttcaaagtgagatagtagctaggaaattgaaatttcatggcaggtaatggcctgccgtcactgggtcgagtaaagttaactgatttagtacctgacgaaggccttccatctgattcttacaagctatcagtttcaacgttatctcagtcactagctcaatattctgctgccattattcagtttccaatgagtgatggagctcttctgagagccgctttagactctgctcgtctatacttccatcaaaaaccgtcgtacccatctgcagatatgattcatacgaatgaccctcgtgattggtgcaagacatctggttattatgcagatccttcactttggcaagaaacctatgattatagacctggacttactcctccagattctaacaatgggatggaattttctccagcaggtttaccagatatatttgccctgcttggaaaggttgctagggttatactagatgccattagcttttttctgaacttacgaagctcgtccttctctaaaatacttgataatgttcccttgagacctcgtgagatatcatcatcagtgctatctgtctgctgtcatgcgagaccatcattccagggagctcaacaccataattttgcaacccaagaggatggccaactggtaatgttttctgaccacgagcatcaagttgacaaaagcttgatatctctagtaaagtcagataaggctggtttacacataaaagattgtcaaggtcattggaatctcgtggatgaagttcttggtcctcaggaggctatcgtttatcctggacttgcactttatcacgaaactgcaggatatttcaaccctgcactgcatagaacggatattaataatctccaaagtaacttatttggccgatgctctttagctttcaaactcatgcctaaatctatgagtagtctcagctgttcagaaatgagggccgctggtcacggggtagatgctcagttccaacttccagtaccagttgatgactttatgcagaaagctcacccaactgatcaacttttaaacaggaacagtgtctcgaatttcaattttaatgccacccaagagggtaagcagcaatatagtaacttttattatcaggttgcttgactgttagtgattttcataattgaattgctatgttgatgacctgaactctacactttgaaaaaggatactaatagtttctgatgatgattttttaaaagaattggttttgtgtgaatttgcaccttgatgttagcttgtagtttgtttctttttgtgtgagtagctcttagtgagaagcttttaacagcaggtccttggtcgatgaaatgctggtacaggatccacgaagcctacgacaaggaggaggaagaatgattcaagatctaaacctcttccaccttcaaaaagattacgccttgaagcccagagagttctaaaggaaagggttcaggacattgcagataagaaggggatcaagctgaggttttgcaacctgaaagagtgtgagaatcacattcacacgcttgatagcccgtgtgccaatataagaatggaaatagggtggccacctggagttccatttgttcatccccatgatctaccaaacaaggcaaagatgggttttctcgaagcatatgaacctggttggtcagcaactcatgatatggagttaagtctaacagaacctggacaagccagtcaacacacagctaactgtaagtttcaatttagtgtttctggttttctttatgcagatttttactgaagttcctgatggcataaactgattaccggcctcccttcctttagtcctttcggttctattttttccttagttgctattcactatgttttcatttgtttccttttctgcaggaattgattgccatggtatccagttttgcaatctcaagcgatttttaacaaacacaacttccaacaaaactttccacatatgattttggtgtgtggctactgattcaatcttccccgtcaatttgtaactcctattagaactaatgatcctgaatggaagtccacagactttttttaggtatgtattgtacatgattattttgccacatttgagactaataatagaaataaataactcaaatttgagaggccaacttgtttcactggatattgcatctttttatgagctctgaaaaaactaatactaaaaataagtgaatatgaagaggaaatctagaatactagaatatctttttttttttttttt

SEQ ID NO: 116156 - DNA, 1184 bp, Cannabis sativa
aaagggaatgttgattacattaatggtaaaaaatttagacatccacataattaataatatttataacaaaaaacatatacttatctttttagaaagcctaagaatgattaatgtgattaaaaatctttttccacttagagttcttgctcatgtattgaggttaaaccaagaacaacattatgtaggttattctattagcccacactaatctttgtgtgtagtgaattattcagaagaccacaatgtgagttcttcatcatcatccgaggatataacttaggaaaagaaacaagaataccttaataggctttataaggttaatttttttttgtctatttattttagatttaatgtatatacatatgattatcctatggatgtggtacgatgataatgagaaattattgttctactgcgtacctagtttagtaccacaaaaccaacaaatagtaccagagagattccactatgtatatatatcaaatgttctgtgggttttatgtatttatatatatatgtgatatgtatgtgaatagatggttgtgatattatgaatgtatgtgagattgtgaatgattaattatatggtgaaaattgggagtagatttgccttttattgttttagaaaattatgtaagccattaatgggcataagagttttatttaatttatttttctgaaaatattttacattgtaatgctcataaaatggagcttagacttcaatggaatcttgaccaggtatcaccacccataacagcattgagcttgagcactatatgcacgggccatgcatgacaaagaacgtgaccaccacccatggtggtcctccagttttttgtcctatgcctcaacagagcgaacgaccctagggcatactgctcctcccaatcacatgttccatttgacgagacttaggaccccgttcatcgaaaaaagaatgaaaaaccactggctattgtcttcctggttcatgcacgatgacggtcacactgtcgaggatcgttgttctccatctactgatcgtcaacagcgtgaatgaattgcatgcaatggacgttcgatatccctaaacccatgcatgaacagtgatttgttttggtctttgggtcatttgacctggatgtgcctgttgttgccagttcttcctgttatattatttataataatataatatatagatt

SEQ ID NO: 116157 - DNA, 4775 bp, Cannabis sativa
gcaaccatattcgcatacaatggacgattagaccacattctaaagtaatgaaatggtttttttcctcctaaaatggcctccggtaccgtgaccacagctggagaatggtaaaaaatcccctcggattggaagcatacttctgcagcagtaaaggtagccatccattcagggttagcaagcactctatcgatcttagaatagatcctatccgctcccttttgttgattacaccatgtgtagtacttgcctacatatttcgcatcttcaagtttgcattcctcaacacattctcaaaatgccaaggactttttaaaccgaaccctgctgcctactctttcctctttttcaagtatgtcattgaaatctgtaaggaccatccatgcattatcactattaagctcttttagatccctccatagctccttccttccatcctcatcattaaaaccatagacaaaagtcacaaaaaacttggttcttttatctaaagtttgaactaagagatgaatcatttgactagtacatttaagtatagtgacaataatggaattaggattccaacacacaataatcctttcccctttgtgccaagcaatagtagtagtaaaacaccaaccattaaacattctcaagtacaaggctccaagattctgagccttcactctcgtcacgaggagaccaataagcccaactttttgattactaatcaattgcttgactaggttttgtttttgttgggagttgattgctcggacattccaacatagaattctatccatgagttagagagggatctccccccactcctgtatcatcaatcttaacttgtttccccttctcctcaatcaacttcttccttatttcatctgcctgaccgtcctctttttcttccaaaagttggaaagaattgcttgtggttgctgccccacttgcattctctgttctaactctataacctttagtgactagctgaaaaccattcgcatctactaattcttttggcttcccctcttttacagtgttcttgaccacccattgttgtttctggcgaggttccttcttcctacaatcatccgtaacatgtcccattccattacaattagcacaaatgaccagtttccattcataagaaatggacactgttatggtgcacccatttttatcctcaaattcaatgagctcgggtagctcttgttcaatttcaacttctataaggacccttggaaaacatagcttttctctatttttagtggcttcatctacaataactggttggccaacctgcccaataatcttgaaaagagatctttccccccaatacttcaaatctaaatcatcaagatgaacccaaattggaaccatcctaatatcctcttttttgacattgatagagggttcccaagccttcatcacaaccggcctgcggttaaagaaaatttatcccccttgcagcactagatcttgatccattttagagtgaaatctgattatagagacaccataggaaaccagcccaactctttctatcttctcaaaccacattctcctcacaaaacccttaagaatagctaaggttgggtttgcaccaagcacatagcatacaactgagggtttccaaaattcaacctcatcatgaatatcatcactagttatcttaactctgtttgtcacatctttagtaaagagactacgcacaactaaactagatctcagaacagggtgattcgaactcttaccttgacaaatcttggccgagcattgctcattagctgccaagaagtgcccaaagtcctttctgatatcctccagttgcaaaattgcctaaagagattatttcggtgatagaggctctggttccagcagtttcagaatcccatcgtcatccactaactcttcctcttcagcatccaagaactccatgggagcaattccaaccactgcatccattgactttgttttgtgcacatcacacacagagtttggtccctttctttttgtaatctgagtcgataccgccttccctcaccctcttccccttgatttttccatagctccagcccaaagctgcaagagtcgataccgccttccctcaccctcttccattctcattaaaagataagtctaaggcatggttaaactctctccctaatggaactataactacttgggaagaacttcttaataaattcttggctaaattttttccaatgtccaaaaatgataatttaagaagagaaatctctgaattttatcaaaaggataatgaagattttatgaatgttggaaaagatccaaagatttattattaaaatgtccccatcatggttttgaaaaatggagattagtaaaatattttcatgatagtttaacccttacaaatcgacaaatgatttaatctatgcatactggaaaatttttgaaattgcaagggtaagaagcatgagatgctcttgaagagttatctgttaattcccaacaatggaattattatgatcctaggtctagatcaaacaattcaccaaagaggggaggaaaatatgttgtaaaagatgactttgacataagaacatcaattgaaaaattagagagaaaagtagaagtcttagtaataagtcaaactatgaattctcatgtgcaatctaagaaagatgtttgttctttatgtccatgacacaatgcccaatcatttccttcttcccatgaaacattttctgaagaggccaatgctttatattcgtatggtaagacttctgatagtccactctcgtccacttataatcctaattgacgaaactatccgaatttttcttggaggcaaaatcagccttaaattaactaagggcaaccatttaacatgccaaaccaaagtcatgcccaacaaaaccaatcttactctcagcaaagaaaaccttctttagaagacactctacaacagttcatgcaatctacccaacaaatcctccaaaatcagtctcaatctattgccaaactcgagactcaaatgggtcaaattggaactactgtaactgaaagagaaagaggcaaacttcttagccaacccattccaaatttgaaaggtcaatatgaaataggaatgcctagtcacaatgaagaagccaaatctatttcaactcttaggtctggaaagaatattgtcaaacctgattatacccctcaagttgaaaaagataaagaaatagaaaagagtcaacctaaaagttctaatataaatgacgtaccaaaagatgatgttccgattcttcctactattccaaaagttccttttccacaaagttacttccactcatgaaaggaaatcaatacagtgacatcttagaagttttcaaacaagtaagtataaacatcccattcttagatgtcattaaacagattcctgcctactcaaaattcttgaaggacctttgcactgtgaaaagaaacactaatgttccaaaaaaggcatttttaactgaacaagttagctctataattcaatacaaatgtcttgtaaaatacaaagatcttggttgtcccacgatttcatgcatcattggagatcacattattaacaaggctttacttgatttaggagctagtgtgaatttattgccttattatgtgtacaaccaacttggcataggagaattaaaacaaacttctataacacttcaattagctgaccgttctgtgaattttcctagaggtattatagaagatgttttgattaaagtggataagttttatttccctgtggattttattgttcttgatactccacctgttgaaaatgatcatgctcaaatacctattattttaggtagaccatttttagctacgtaatggtgtgttgaaactatctttttggaaatatgactattgaattgaatgtgtttaatattgctaagtctgttcagtgtgaagaaatacattaagtaaacatgattgaaaatatttttgacatagaaggatcatttgaaaattgagcaaaatatttttgtatgaatttgaatattgataaatttttagatgaggtgaatcttttgttagactctgtacctttaatgaacattgaaaattggaagaccaaaattgaacttctttcaccattagaacatgttcaatcaatctctgagccaccaaagttagatcttaagcctttgccagaatctttgaaatatgcatttttaggagagtctaatacttaccctgtcatcattgcatttgatttatataaagagcaagaagcaaaattgttagatgcccttagacagaacagagaagccataggttcgaccatgggagatattaaaggaattagcccaaccatatgcatgcatagaattcatttagaagaaagttcaaagacctctcgtgattgccaaagaagattacatcaaaacatgaaagagatagtaagagaagaggtaattaaaatgttagatgtaggtattgtataccctatatctgatagttcatgggttagtccaattcatgttgttcctaagaagtcagggattactgttgttcaaaatgagaaaatgagtcgatccctgctagagtacaaactgggtggagagtgtgtatagattacagaaagttaaataatgtaacaaggaatgactacttccccttacccttcattgacaaaatgtttgaacgtctagctggccatgctcattattgctttcttgatgggtactcgggatatgaccaaatccccattgcccccgaagatcaagaaaagactacctttacttgtccttttggaacctttg

SEQ ID NO: 116158 - DNA, 1090 bp, Cannabis sativa
ccattgctacacatggcttatagattacttaatttcaaagatcaaaccattcacaccactaactcatttgaataattttttaaccgaaattgcatcagtttctatgcacaaaaaaatcccaggaaagaacaaaaataataatagccctactttgaattttaaagtgacaaatgaaaattagttattatatatagaagcttatacaaatgtacttacgcattgatacgtatgtacatacacacaagtataatatcacaaattttacagttaaaatcaaaattaccgaatgaagtttgagatatatgaaagtcaaaagcagaaagaaaagacaagagagatcaaaaattaaggagaaagaaaaaggagagcttttaaaacctgagaagcgaataagatcggggatacggaacgcctgggactcccaggaggagtggtgttggccatgaactcggaggaagccacacgtcccgtacggggcgcgttgttatcacgcaccgccaattcgccgttggatcttcccgcagaaggatgttgattattaagatgatcgtcgttctctccgtcgattccatcctctcgaccattggcatttcccatcttctcctcctcctcctcaatctctcttaaaccaactccgatcgtgtgaattcggtcagagatccaccaccatggaacccaaacccaatcccagatttagaatttcttctcacctcattcgtgttctaagaaagtcgcgcgtaagtttttgcgtacggacagtaatggaaagaaagaaggtaaatggtttgaatggagcgggtttttcgggggattaatcgccgagaatcggctccgattgaagtggccgagtatatatacgatagagacgaaaaggtttttttttttttctatttgaggaatcagataacaatgacgagtgtaattgggccccacgaggcccaacaatttgttgtttgggatgaatgtgggacctgctctttttgttaggtcagcaggtggatagaattatagatgagaacgataatgtggacccgatttgggcggccccttccctaatatattattattttttgttttacctcacgctttt

SEQ ID NO: 116159 - DNA, 1499 bp, Cannabis sativa
  modified_base (1450)..(1453): a, c, t, g, unknown or other
atcgctgcattaaaagccatcattaaacgcaccctcacgcgctcaaagctcgtgccaggaaaccgaggagtcaaccggaagcacttgagcaagccttgttttatgaaaggacaaggtacgaaaacccaagccaccaaagaacttggaaacagaaatggcaaaccaatttttccagtggactttgttagtaccctgagatccccaccaaaactttgctatagcactctggattttgagacaaatggatttaggcaccttaaaacaggacatagcaaatgaagggattgcttgaaccacagcctttataagagtttccttcccagctctagaaaaagatcgatcattccaagaattcagacgagaagaaacactttggaggagataatgaaaaatggaattggtaaccctgcccacaaaatgttttgtgaatgttgtattcggttctaacaactcccataactcccacgttagctatttaagtttataaacacttaatttgccatttgccattggtaatatccaaatgcaaatgctttatgatattgttattcatattcaaataggagtgaatactctataaatagaacacataatgctacaatgttgaaaatatagaaaccttgttaagatatattcatccttaaacactagactaataatatgagacttgataaatatttaagagcaattttagactattgtaagagtccacgtgaatgagtaaatgacttttatacaacaaaagtgtttaagtctttgagacttcttcttctcattcttgtatttatatatagtgttatgtattattattgtaaaatgttgtaattttctctcttattctcatgtaatcatgatgtcatacatctataaatattttgtgtatttggttacaatcctccatccatattttctcttagaacatctctaatagagtactttaaagatggtgtgtaaacattttttagcccgtttatataattaaactccaatgatagtgcataatgtagtctaaatttaagacatgctaaaaattgtgccaaatttaatataaaatataacgtgggccaaattttacactaatataaatatcaattattttttttttttttgccacccatgtaaataataacattttttacatcttatttatatataaaaaataatgttatatcacttcaatcaaaattgatggttttgttgatttttttttacacatttctatcaagaaataaaattaattttacccccaatatattaaagtataattttatactacatttagcataaaatttaaattgaagaaggttttataatgagataatttcccaatactttgaagagtactattctcatgataagattgtttgatagccaataaccctcaagatattttccacaattgcacaaccaatttcacagaaaaccctaggtgtcgtttggtaacactttnnnnatcagttttctgtttttaaaagtggaaaagtgaaaatatttttcaa

SEQ ID NO: 116160 - DNA, 1933 bp, Cannabis sativa
ggtaaatattattttaaactatgtgttttgtaaaagataccgattggactttctgtatttttaaatgacaaaatggatgtatttttcaaaatggtaaaaatataaccctaagcttaattttggacagctttttttaatataactaacttgaagacaattcctaatacgatcgaatagatacaaaaaaatataaatagttttgacataacacttttatatcatattataattaaattttattttgataaaaaaaataactcaaaattttatttgtactattttaaaaaatacaagatttattttgtcatttaaaaaaataaaaaatttaattaacaatttttaccaaaacacagaatctaaaataatattacctaccgaaacacacgtatacttccaaataaagagcaccacacgtatacggctcaactaatcatattgtacaaaagcgtctcagccactgctaccatacaattattaagatggcatatattatgttgactttcacctacaaattaaggagaagttaaagcaagacaaaaaaaaaattaccattttgttgatatatatttatatatagagggattggggggccatatatatatactaggtaggagttacgtgcgagacacgtaaatattagttttagggaaagtttaaatttttttttttttatttagattgtgtgtaaaggtatgatcatacgacaaagacaaatcaagttacaattataattattaatttatgttttaatcttttagatagatatattttaaatataagtgttgctacaatatcattcatagtaatttatgatatactttattaagatatgtagcattgctcatatgcccctaccagcaattcaattataaatttatagtctattacgtacgaacttaaaacttaaaagaagtaatttggacccctacgtagattattatatactagattagaggagtgtaaatcagtcggttatggtcggtttttataattttataaccgaccggtcggtttttacaattttataaccgaccggtaacctactgttagaaattataactgtatataaccgaccatacggtctttgacggtttttagcggttttggacggtttattgcggtttttgtcagttttagcagttttttagtttaaccattttttttttattttaaaaaccaaaactgaccgccatgtcaaaaaaaccgaaaccgaccgccaaattcagtgatgacgtggaactgaaaattcggttatggtctggtcggtttgatagtcggtttcactttatcagtttttatgaacaccctattaaattattattgttacgttagttatattttttaatttttattttattatgtatatttttaaaattttataaattaaaaaacttatttattaatttttattttttttttaaaaaaaatatttaaagtttaaaaggtgagactatgacctcatacattacaaaacatgagaacattattgtatataaatatataggaaaatcaagatttgtatgaaaaaaaggtgattttccttgatatataatatgatagtaatagtacaaatattttgtttgcatctcgatcatgatttgtaagcttgtccaagcctatatattgaatataaaatatataataattttagaaaataaattgaacaatttttctgaataacttttagggcaaagatgggggcctgcctgcttaattatcttatagaatatagatatatgcattgtcatatcaattattgcatatacgtatacttgcttaacttatatcaattatacatattgtgcatgcataatatatagggatgtgcatatcgatccaatctaatgagaaccgactcatctaattacaaccgacagccaaatattggatatccaattgtgatctgatcgaattggatgttatttttaaatat

SEQ ID NO: 116161 - DNA, 2528 bp, Cannabis sativa
tcattgaccttcatctccacgatgaagaacgaggaactcgccgccatgattcatgctttggagctgaattttcagaaacactctgaagaacaatttgctcgatttaacgcaagattagaggaacaagttactaggcttgacgaccgtgtgaaccagttgcaaaatcctttggggacatcaagtgacgagcatacgagtgtaactcgcgatgtgcactctccatcgaagcagcagcactcggagggagtatcggagcatagagagttgaacaacattctgaagagtatgagagttaaggtgcagaggtttgatggcactaatgtggaagattgggtgtataagatcagtaagttttttgacttacatggaatttctcctagttctcgattgtctttgattgctttccatttggagggaccgccatccacttggtttcaatggatggagaaaggaggagggtttgcggattcggattcatttctcaaagccctgcgattacgatttggtgtatcggtttatgaggatccattgggcaggattgctaaattgactcaaacggggcgtgtggctgattttcgagcagaatttgaagatttgatgactcggatttctggtgtatccgagcaattcttcctgaatttttttgtgtggggactgaagaatgagattaggagggagctgctgttatcaaaaccagtggacttagctgatgctatggctaaggctcaactatttaaagatcggcatgacgatttacttgggcgtggtaagatggtgagcaatcgtacagggtggtctccgaggtttcccacttcaccaccaacaggtcagagcccgactggatctgttataacttctcctaattctactgttgcaatgccaccaaaattacacaaaccaagccctttcgggactaccagttaagcggttgtcacctgctgagatcaaggagaaacgggataaggggctttgttttacttgtgatgaaaagtacagttttggtcataaatgcaaaaaccgtgttcttattctctgcactccaggcgatgaagactcagagacagcaatgtttcctcaggatcttcatgatcttgaagaagtagatgacgaacccaccgaggaagtgagtctaaattcattggccaattcgtccaatccaggcatctttcgtattacggcgcaacagggcactgagactttggaagtgttaattgacacgggcagcaacaataatttcattcaagaggcattggcggttcggttgggattagcttgcgaagatacgaagaaatttaaggtgtatatgggaaacgggaactcgctgtggtgttctcaactgtgtaagggtgtggagttgattctccaaggacacaagattttggtcgatctatatgtgctgcctatttgggggttagacgtagttttggggatgcaatggctccaaacattgggtccatgtatccatgatcaccgagccttgacaatggaatttcagtggaagggtaatgtaattaaattggctggtacgattcctgcagcagatcaacaactatcatccgcacaactgcgtgttatgtgtagagaaggggatataaaggatgtattcatgttggctaaaatctcccaagaggaaacagtggtagataaagagattgcagagatggaaactcagcttcctatgcacggtcgtggcattctttctgagtttcaagatgtgtttgccaagcctactcagttaccaccacatcgaatgacgaatcaccgcattttcttacaaccgcggtcaaaaccagtgaatgtcaggccttaccgttacccctactttcagaaagacattattgaaaagatggttcgcgagatggagcaatgcggatttgttcagacaagcaacagtccttattcctcaccggtcttgttggtcaagaagaaagatggatcgtggcgtttttgcattgactatcaggcactaaatgatatcactatcaaggatcggtttcctatcccaaccattgacgagttattggacgaattgggtggagcaagcgtattttcgaagttagatttacgagcggggtatcaccaaattcgcatggactcacgggatattcacaaaacggcattccgcactcatgaaggcaattatgagtttcgggttatgccatttggcctcactaacgccccatcgacattccaagccactatgaatcaggtattcaaaccattacttcgtcattgtgttattgttttcttcgatgacattctagtttacagcaagagtggcgaagaacaccgtggtcatttgcgaatagttctaccaaaagctacgagaacaccaattttttgctaaaagcagcaagtgcaagttcttccagtcacaaattgattatttggggcatctagtttcagcccaaggagtgcaagccgacccttccaaaattgcagccatgattgagtggccgaagccacgtactattaaacagttgaggggatttctgggtttaacaggatactaccgccgctttgtagca

SEQ ID NO: 116162 - DNA, 1085 bp, Cannabis sativa
agggttagagatctgagtggaaatagtcatttaattttgatgcaactaatgtaaggtttcttgaactttatgtgtttaaattctattatttgagaaattcatgtttaggatgttaaacaacatacatggtagtaaatatagatcttggtaaaacaatccccaacagtattcggccaaaaatcacctgccaaatgaacaaaggtggatgcttctattcccacaagcattgccctgagctccaagacaccccaaatagaagctgagaggacttcgacagatgttgtcgtagatgttcctgagtccattcctccagccaagaagacttcaaaaactcaacctcaactactcctgccaaaagctctaagggagccaataatgagtggaccggcctgccaaaaccaaatgctacatcacccacaatacagccaaagacgaagaaggctaaagagatgctcagtttctatcaggatcgcctaatgctcgaggtcaacaagtagcttaccggagtggaggatatgcctgtggaactctcggtcgacggagttttaaaggaggttaccagggtaaactcttatctcatagttctttgtacagattttaccgcacatatatcttaactttgtttctttttacatgttaacttgaagttggcctatacgtactcccaagccaaatcagcaactctaaaggccaacacaaccactaatgacttgcagaaggcactagaagaggccaaaaaagatgttgagttgaaaagcaagcaattgggtttagtgaacaagcaacttgttgctacaaacaagtctatcaatgacttgaaataggaaattcttttaagttagaaaatatgcaaactactaaattaaatacacaatgaatatcttcattttcttaaaaaaattataatcattgtctatgtcaaaagaaaagtggtttttcactaaccattctgcattgaaactctgcaatctcgtctccataaagaaaagggtaaatagcggtataagtacctaaatttttaagtttataagcggcataaacccaatatttatttttagcggcataagtagccaatgtttgtaaaa

SEQ ID NO: 116163 - DNA, 2109 bp, Cannabis sativa
ttccgggagcaattttgtcccatggggttccagcgctggtggcggacgtgggcgtcgtaaattcatgagtggttttaatcactttgtcaaaaaaaaatatatgtatatatatataaaatttaaagtatttatgatatgcttacttgaatgtaaaattcaccctaccctaaaaaggagtaaaattagctggaattttgtactgttgttactgactgtggatctcgaatataatatttattggtatccatgtacgtaggaatatgcttctaaaatatggaatctaataatttgcctgtgattggtggctgtacccttaccaattaaaatatacataaacaaattagttgaaacaaaatacaactcatgcaagagaatatgatgccttaattaaaggtaacgtctaatattttaatctctttctattcttttcttttctttctattttttttttttttaataattttggggcatggccactaggtagtgtatgattaatgactaaagaaggtttggactttgggggtagttgaagctttatttattctttgtggagtatttagaacttcgattcataagatccatgttatttggttggatttcattttgaattttcaattacaatattgtgacattttaaattatttattcaattacatcacagtatatatcatcatattcatatgacctttgaccatctataaattgttgatacaaattagtacataatttagagaaaaaaaaaattgctatgacacaataattgtagttatgctcacaaaagatacaatacaaaattataataaattttaatttaatatttattgggaacacaaaaaagatataaaaaataattaacatataataaagaaataatcctttactattgtatcaaatttgactaacattttaataaagaaaatattataaaataaagtactattatcaataacactactttttcattatatattgtagatctcttttaagtttataataatctcactctcatattatattttaataaataaaattattgagaacaagataggaacgtaagtattatttacggtcctatctcgtttaatatttggagataaaaaattatcgtctccacattgtttaacattagaagataaaaagactatctccattctattctctccatttcttatagaaaaaatgtgcataataattttgtaggacccaatattagtttaaagggattatcatggttaaataactacaaataatgcatatatatatataattaatattgtataccgtacgagattgtagtattttacttagatggacaatcaaagaaggttggaatacttaaacatacgctcaagtctttgttgttttgaattattaaacaaagagaaaaagagagattacctaacataattgtaattaaaattcataatgacttgtaatgatattatgaaattcatattaaatttcacaagtgaacgtgacatgactattaaaatatcatattacattggtatcaaattgctcactacattattcttaaaacaaaatcttatttaattgataagcacgagtgaatttattttctatcttttttctttcacatatttcaattatcaagaaaagattctaacttgtcaataatatactccctatttaaatatgtatagatccacatggccaatattgtccgattaagataaatttaaacaatgtgtattataacatttgtttaatatcaccatctcaataagcacaccaaagttggtaataatgaattttttatatccaacatggtgtttggcatttgcccttttccctccaaagttggtgcactacaaagtttaaaattactacaaggttatataagctcattaaatggctgcgttggtgttgctatattaatttagcacatcttgaaagcaataaattctaatagttttgtaaaaagtgtctcaaatataaggcataccaaaaattatgtgaaatttagcacaaaatacaattgaactatcataacacacgatagatttattctttctttaatccattttattttcggggaattatcctatatattattttttaaactttttttttttcaaatttacagtt

SEQ ID NO: 116164 - DNA, 1484 bp, Cannabis sativa
agagatagtagagattattatataattataattattaaaaaaaatatttataatctaagtttgtattggattatgaacgtagaatataagatagacaaagaaatataggaatattaatgtcttttacatttttattaattataaaaacataatgaagagattaaatagataaaggagaaaagcatgaaatcataaatatggtgaagctaaagacgttattagaaccactcgtcacccacagtgttgtgcttcaatttagaagcttggcttataaaatgttgaatacttgatgacttttgagacataattgttgggatttgttcacgcatcttcttgcacttgtccaattcagcttccaatgcttcaattttcatgtccaacttttctgggatttgtttttcacatctaatggccatgtaacccaaataggcatccatggacttctccaacaaaaccaataggaattgattaactctgaatcctgaaatctctccaatgccacgtaggtagaaaatccattctttaaaatcatccattgtcacatcttcaaccttagttttacacattttgtcaatgactatggatagtaaggttgaggccacactcttcaatccagtactgcttgttgaactgttgcaatcatctccatacttgagtagaaatgttttgaaaataggggccaatgtattggggaccaagtatttaccatccactgctactacctcttgccttaaatattgatcatcaatttttaaaccttctacagcagtatagtaaagaacctccatacgaaagttactatagtcatagtcagattgaaaaaattctttatagttatcaaagttttcaatagagtctaagtcatcaaatttggaatttaagtttctatagtaattatagtatcttttgttgctgataaaatctagtggttgaagtaatttttgtttttcttcttcagataatgcatcaattatgtccccaatggtcagtccttctatcaaagtttgatcttctgccttgtccatgtcttctcctaatttccatcgattctctcccaatgataaaagctcaacaccatttgtgtctccttttattacctgcataatctattatacaacccaaattccatattgttatcagttaacttatatatatgctttcacataaatataaaaaacatgtattgatgaactttatatttgtttagttatagttaagatttttttagtactgaatgaatatttcataaatttttaataattttgagaagggaaattatagcaaatggccccaaaatcataggactatatgtcctcatttcaaaaaattatagcaaatggccctaaatcataggactatgttagtaaatgtcctcatttcaaaacttgtagagaaatgacccttttaaactatttattatttatatttccttttgtcacataaaataaatcattaatttttttttttcatttttttagaattag

SEQ ID NO: 116165 - DNA, 2338 bp, Cannabis sativa
  modified_base (700)..(700): a, c, t, g, unknown or other
aaccccctattgcaactagcgctgcaaccactttagaaactcaaactctaaatttgaaaaaaaaaagttaaaaaaaaatagtatattgaataattcccctataatatatatgcaattgtaataattctatacatataaatgtatatatataaaaatactataatataggtttttacaccacatattgaaatttctaacttttttatgttttttaactgtgaggcagaatttttatcaaaaatactgtgttttttttaaaaaaaataccgtgtaagttttatactgtgtactgtgttaattttttactattgttccacgattattttttaattgttccactattttttttaattattctgttcggttgttttataaaaagatagaatttttgtaaaaaaaaaattgtgtgacattaaaattgtaaatttttactccaaatctagtatttctgtaaaatcccttataatatacctactcatcacatataataggaccaaacaaaagtgatactactaattaattttgtttgataaatttacctaccaagccaaatattaaaaataaataatctaatgctttaaaaaacaaaacaaaaacaatcgccctttaaacattacattaagatatatgattatctaaattataattaactatcattatagtaataaagtaatataattaaatattaatatttaataanaatgatcaaaatatttatttagtgtgattttcttaagacggttagaaatttgttcttctaattattgtatgttgcaattgaattaaaaatttgtaccattttaaaaatgaaaaaaaaaatataatttttattgatataatataattaaaaaaatcgatgaaaaaaaacaattacaaaaaaatgtttaaaactgtaatgtggcttaaaaaaaataaaatgtgacatttttaaaataattatttatgaataatttagttttggcaactaaaaaatagtgaattgattagttaaaatggcataagtataataaaatgtcaaaagagtttttaattaatttttaattttttaaaagaaatttgagtattttaatttattgtgtaatttttttaaacaaaaatgagtgttttttttatcaaacataatattaaatgagtgggacttatgtcaaaactcaatttcaatctcctaggtacgggacactatattttagtggtcatgaactcctctttatatctataaaatgcaatgggatctattttaaccattatggttaattatgatcaatccaacacatgcagaaaatataaaataaatgcatgggtatgaatattgcctgcatttctttttcctagggtacatcttttattcttttattctgcatatattaatgttcaattatgtacatatattattctgcattttaatttgatttaagtagtgcacctatagtataactgtggatgacatgaatcattaaatccatccccactactgatcagaaatctggctgttttgttcgaggcagggatcacttaggtacatatggtaatttaatactagatctattaagaacattatatattcgatttcaaaatcaattattattagagatgaattaatacatatatatactgtactaaccaaacacaataaatttgaggaattttgaggtatactaataaaagattatttgtatcttttacttaattatattagaatcatgtatatcactaaaaaagtaaatctaagttttgtttttcttcctaatttcttttcgttctctacagccctggaaccttcaatctcgaggcaaagtgtagtgaagcactctaccgtgaaagagggttgagggtttaaaccgttaaagtaagtgcaacatgatatataaatatatatatatagcgctacatatagtactaaccacacaaaataaaggctttaatattaggtcattcttcttttctttataaacttatagttataccaatgaattaatgcaattgattatcatctctgagtttctttcttcaaatttctgtgaatattaaattagtctaattcgattttaatgaaaataatataatattattctgacacagttgttgatcctctaccatatataaatgtcattttggtatactgatctattttgttatttaattttaaaaaaaaataattgtcttttagttttttagtgcacaattttttttttctttggtaagtaacaattttattgctcacaaatcataatttcaaactgaaacaaaacaatgtactatttttatactaattttctctcttaaaaaattagaaaagataaataaatatctttttcaaatttttaaatgtaatttaaat

SEQ ID NO: 116166 - DNA, 1762 bp, Cannabis sativa
gagtgttctaaggtactggtgagatgatctatttcgtgtttagcctcatcgagcaaagtttcgtacttttcattagttcctttcaacaccaatcttagatcttctatctgagactcataactatcatgctcagcttgattggccaacaacttctctttgttttctcttgcttctgcagagacttcatgtaaagccgaggctaaactttccatagcctttttgctcttctcttcttcgtttctcgagttctccaaatcatttatgagtttgtttttctcttctaacaagttttgaacactagaagctgcaagtttctcattactcaatgcctgaattttctcctccttcacagattccagctcacacttaagtgactcaacagttttcgccatttcagtattttcttccttggcaacaccgagacaacgttctgattcttcgatatcccctttctgtcttccaattgtaatctccaaaagacccatcttttctttaagagcagagatttcagtctcggcctcgtgtaacatatcattgcttccctcgagttgtttcatgaccgaatccaaagactccgatgcagatctttccatcttatgcgctttctcaacctccatctctaactcctcaaccttgattttccactcctctaccaaactcctcgcatacgattcagccattctcgcagcttcaagctccacatcaagctgttcaatcgaagcctctttctcaatcagcatttccttgtatcccatcgccttctcgagctcttgtctcaagctatccatctcagcattgagcttcgaaaccatctgactttcgctagtctcagcctcaagcttcgaatcgagcaaagtcttcaatctagccaattcagcagacaaaacctcagccttctcggcttgaatctcagcgatcttagtagcatcatcagcgtgactcaaagcctgattcttcgcatcacaagtcatcgccaactcatgcttcaacctctgaagctcctcagtagtagacaacaatgcagccacatcaacagcatgttggctcctcacagactcaatctccttaacccactcatcttccttcttctgattcgcctcaattcccgcttgttccaactcaacagctctaaacttttcaatctccgaattctcctcagctcgcttctgcgcaaccaaagcctctctaagcttctcattagcctcctcagccaatttctgagcttctttcaattcatcaatagccttaatcttctctttctcaaccaaaacaatctgttctttagctttcttaagatcttcctgagcagcattcaaattattctgcaattctaatgatcccttggcaagtctagtgggttgtttctataaacataaaacaaaacaccaaagtaaccatttttaacatcattacacaaaaaaagggcaattgagtttggtttcaaagatcaaatctttaacaataaaaaaggtactaactttagtacttacttcaggtggggttgtgagctttggtgaacggcgatcaacggcgggtttggcggccaccgcggggcgcggtgaccggtccaaagaaaggcgtgaattttgcagtggtgaaggtgaatcagattctgatttagctattcctcttggtctcccaactcttggggttgctggtgagacttttgtagaaggaggagtctctgatctgttacaaagtcaaaaaattcaaaaaaaaaaaaacagtaacagacaatagggtaaataaacctatacataca

SEQ ID NO: 116167 - DNA, 1076 bp, Cannabis sativa
  modified_base (675)..(685): a, c, t, g, unknown or other
actaaacctttctgtaattaagagaccagatttgattttgggcaaaagtcacaaaaagtataaacaaaaatttaccaaatgtaatccactttgttttatggtccaacaatattagaacctcttaattcaagaaccaataatatctcagctaaatacatatatgttaacctcaaaataattaaaaatatttaaataaaatgagatttaggcaataatagtttctaattaagtttgtctttaactagttatacattgcattttagataatgaaacactaataaagtctacttttttcttgtttttttttttctttttgtgtgattaattattgagagtcatatctggtattccaatttcccaacactcctttgaaagaatttcacttcaaattgggccttaaaacactttttcaagatcaccaacttattttattttgatgtttagaggaaaaattcatgcatgataaaagagatttccaaatttttgtattaaaaataataataaaaacaaaaattattatgtttaatttatattaggttgtgtcacaaatatatctacaaaggtaaaaatattgctaaagaactagaaaaaatgtgttaaaaaaattcattaaaaagatgaactattagagcatatctccaaccctctcgcaactttttttttttttaaaaaaannnnnnnnnnnaaaaataaaaaaaaattataaacaaatcaattagggaaaagaaaataagcattggtcaatgcttatatttacagttaagaagtcaaaaaatttggatcacatggtctcatgtatgagtggtaaatgtaatcataaatagtatttactttacttagtgtagctacaatattcttaagttttagtgcatatataattataatattctatccttttatagtattttttttttttgttaatttttgtgtaaaattatatatataataatattttattatttatgtattattaatatattgtttatatgatgtaaaaaaatttaggctaattagtaattttttcccttaaattttgacatgtactaaatcgtgcctcctgaacttttttggccatt

SEQ ID NO: 116168 - DNA, 3967 bp, Cannabis sativa
  modified_base (1751)..(1799): a, c, t, g, unknown or other
  modified_base (3914)..(3931): a, c, t, g, unknown or other
taaaaataaaataggacaatataaaaagggtatagagtgtaatttcctctattcttattctcattttcatttctattcttatattttcattcctctcaaacaaacgcttttcatttctattcttatattttcattcatctcaagcaaacgctacccaaggccgaccctatgttaattggggcccagtgaaaaagtgaggctattggaatttgaattcccaatctcttagctattaaactaatcaaattaccactatgctacaacacatatttaacattaaaagtattattatttattttactactaactatatttttttttttcgaaatagggccctgagcggtagggcctaaagcggccgcctccttcgtcttagctcagggccgaccctgacgccaccttagtacaaagaaattctatctattgctctcactttctaacatctctagggaattaaaacacaacaaccttataaaggacaaatttctagctaacacaagagtgttgtaaaaatattttgtaaattaaattgccaaaaaagaatctttgaaatgtaatgaaaaaaattattatttttcatttgttgggtggaagggctttgtagcaaactatataatatacttttgttttgtgattcatgaggaaaaaaaatcaacaaaaggaatgaatcctcatttcgctttagcaacaaaagttcgtttaaattaatatcaccaattaagataaaaatatatatatatttaataacctgttagggaaatttgatatcatatgcttaaaattaatttatccactaaaaatatgctagtatattttgcaaaatatacttacaccatttttctcatccaattttacccctaaacaaataaaaactaaacatccatctctctctctctctaggatactcacaccacacacacacacactctactagtcgaacgacccatcaccggagctagtgttgttcagtcaccttacatttcaaaaaaatttctctcgttttttgcatttttttcttctggtttaccagttttttgcgatatttagcgatgtatttgtaatgatagaacaaacctgaggtcagggatgaagtttagtgatgatttgcgatatttagcgatatttagcgatgtttcgtgatgtgtttcgtgatattgtgaattggagacatttagagatgtttttacgatttctcgatgtttcgcgacatcgtcaaaaaccagaaaaaaaaatgcagaaaataagcgttattgtgaattggagacatttagagatgtttcatgatttcgcgatgtttcgtgatatcgtcagaaaccaaaaaaataaaatgcaaaaaacaagcgctagatgggtcaaaaaccagaagaaaaaaatgcgatggtcgtgggttgtcttgggtgcttctcgtgggtcgtcgcgagtcgtcatgggtcttctcagtcgtgggtcgtcttggtcggtcggagctcgtgaacagtcggggcttgaaaggtttgaggctgaatgaaaaataacagagagagaggggggaaagttagacagagagagtgggagatgagagttttgaattgtaagggtacttttgggattttagggtgtttggagaatatttagagtatttgttaaaatgtggtatattaaaagaatagtctaaatttttaagtatgttttaacaaatttcccgcatgttattcacgagagtattatttattatcccatccaaccaacgtgattattattattattattannnnnnnnnnnnnnnnnnnnnnnnnnnnnnnnnnnnnnnnnnnnnnnnntattattattatatataataatactaaaatttaagatttcattaaaaaatttattgaagttgattttctctctcgcatggcgaagaaaaagaagcccagtcggaagttagatttgtgagtggatttgacggtgactaaagtcaaagaaagagattggggaaattgagattaagagtttgattgatgatctagttgagtttgtagatgcatgtgatggggattttccactcattttgaaggagaaaattggaacacttactggatcgtttcctcaaattattgaaggaaaatcctaggcgaaagaggatgagagaactcaaactatttttcaagagcaatctcaatagaagtgggaaaatcttcaagctagatccagctatgtggtagcttgtttacactacacgcctccaatttgacaatcagattaggttgttgctaaacttgatctttttgaaattgaatctaattgtgcctagtagaaatttgttatagtgtgtaaagttctaggggagaatttgattataaaagtgtttgaaagttttgtaaagagaatgtggtaatcattgagtcttgagcaggtagtgaggatgagttcgaggctaaacttggttaagtttgttgatgaggaagctcgagacatgattctggaagggggtgttcagcattttgataacaaaccagtcatcatgaagccttgggcaactaatttttccacaatcaaatttgtaaatctatatcgatttgggtttgaattcatgatttgtgatttcaatactggggtatgaattatttgagtgtgttgattagtacaattggtaagccaatcatgatcgacagaataacgaaggacagatcacacattgagtttgttagagtacttgttgagatggagataggtgagaagcctccttctgtcatacatttgtgaatgaatgggatcaactcacctctatcctgaatgagttcgaatgactacctacgaagtgcttaaattgcaatgggtataggcatggagttgatgttggcaagaagcagaaatggcaacctagacagagcagtgtgaatattgtggagaagaaaactagtgagtgggttcttatgaagactgatgttgtgattccaagttctaaagtagggggttctttgagccttttaactaccaatgcaccaaaccacttagagaaaggcacaaaagaggttgcggctataactttttcaactgatgaatctgctactaaagtggttacaataaccaataaaaatatttctaattctcaattgattgaggccaatagtggacaggaaattctaaagaagaagattggaagaattcaacagagggaattcctttagtgcgttacaaaatgatgaaccactttctaagaattttggggatgtagaggtgcaacattctcatttggaacactagagaattcaacaaattgaataaacaagaggtagtcaaaaccttttgcaagttgtttacccagaaagctggcttgatgacgtgatactatttttgacacgtggcaggaagaaaataacactgggggccccacatcttgggataaggcgatattacctgcacacaaggggaatccaagtaaataccaagatccagcgaagtcatttcagagtgttatcttttaacaaataggtcaccatgaccctaaaataatgaaccatgaagttgaggaggtcacgtggacattccagggctcaacatgggaccaacatcaatgttgggcgtccaggttgacatcttgagtgtcgtctcacatcagttttggttcccaacaacttcctatgggcaatctacttcgccactgtcgtaggatacatgagagatatgccctagccaagttttaaactttggacatcactagaaactcatagtattcagtcttgggaatatcatcttcttgaattctcaactaggggtgttcatccaatccaatccgcactattttgcttatagtgcatccaattcgcactaagtgcggatttcatttttttagatctaattaaatccgcacaatagctcaaatctaatccaatctaatccacaaaagtagggattagatcggttattttggattggttactttttaatannnnnnnnnnnnnnnnnnatgaaaaaaaaatattttttttcacataactagcaa

SEQ ID NO: 116169 - DNA, 1655 bp, Cannabis sativa
  modified_base (1620)..(1628): a, c, t, g, unknown or other
ttattttaagtttactgaattcacaaaaagtattgttttgccagatagaatcataagtataatttagtagttattagtccaattccctgtagttcgacctcacttgcgtgagctactacttgactgcgtatacttgtgtagtgttcataatttttgtaacagtagacttaatggttctcaagctgaagttgggaaaaagaattgcgtgaaatcaatatggaggatattgaagaagaagtttctcattggaattcatctactttttgtcatattcttggggaaaatcatcctttatcggttttagatggatttgcgaggcctatttggaaatctaaagttgataaggtaggatatctgtcctatggaattttcatcattcaatatgtatctgtggaggatagagatgaaattctcaatggaggatatgtaatttgcatcaagaggtttgttgttatgagagcatgggatccaattacaaattttaagaaaaaaaacaccagcactgttccgatttggatacaacttgatgatcttaaaattaaataatggggagaaaaatctaattagtcaattggggaaactaataattgttgacttagtgactaagggcagagataagctaagttatcccagagtactagttgaagtttcaataaatcaagagtttccaaatctcatttcatttgagaatgaatttggtcaagatgtttttgtggcagtcacttatgaatggaaaccagaaatttgtagacattgcaaaaggatgggccatgctacaagtgattgcagaaagaaagaaagaaggaaacaagagtagattattaagaaaattttgaaacaacctgaacctgagattgagcagggcaaaactaaacatgggaagagaataagggaaatttgatgaagcagatgcgtttaaaccagccacaaagggttaaaagggaaaaggaaaggcaatgttgggaagtaccagtgttacaattcctttcaagctctaattggccaaatagatactctagtaaatacaatagaaaaggaaatcacaagaggggaggggggagtaccacctcttcccaataaataaattgttacgatggaacgtctgacaaagagttggtttggttggtctccttaagacgagggttaaggcccattagttgaaggccttatatgtttgaatgttcttaggatggtgtcttatgtcaaatagtgtgtggcatggtggagaaagaataattatttgctagaattttttaatgttcaatttgagtatcttgaagtgttcaagtcagctaatccatctattagttatttccatagataataagagtaagttctttatttcttttatctacggttttaatgatgaggatggaagagctatcctttggaaggcttttcaagagcaagctatgactgaatcgtggctagttctaggagatgttaatggcattttgtcaaaggaagaaaggattagagctcgagtcaaatatagctcatccaaggctttttctgattgtgtagcaaattgccaactagaagatgtgaaatttaccaagaattttttcacatggagcaataaataacaaggagagaaataatgtaaagcccgcttagttnnnnnnnnnattagcagttgtttatgtttaattatg

SEQ ID NO: 116170 - DNA, 1126 bp, Cannabis sativa
tataacatcatcaaatcaagccttattctattgaaacataaattatgcatacccatcaatgaaaaaggaaaaaagttatgatttattttcttgggaaatgggataaaaattaatgattctatataggcagtagccttaaggaccaattgtcagcctcaatttcaccataaagttcaataagtctcgtgcagattctaagcatcagttatcagatcactcaacacaaagcatcagtaatcagatcactcaacgcagagcatcagtgttatcagatcactcaacactaatgaatatacttcataaggtctcatgtttctaagttttctaggcacacgaacatgacaaaccattcaatctgcatttaaattccctaatattaaaacccacaaatattacaaccgaaagctaattaaaagtccaagcacaccccaccaacaagaaatattatatatttaataaagtaagagggaggtaaataaattacatacctccactcgccttcttcgtagggagagtaatcaatgtcttctttcctaacacaattgaacatcaaagcagccaaagatgcaaaaatgcctacaaaaaccacccatatcaataataatcacagacccaattaaaccctaagacctaacacgcgatacataaacatatatagcaaaaaggaaaaaaagaatagagggatggagaaaggaagcaatcgaaccaggaagatagtggaggaatgaaaccttgacggagctgcaaacaacggcgtcgatccaaaaccaccaaccggcgccgaagatggccccagacacacctggaccaaaaattgcccagagctctaccagatccatctatgggcacttggtttgggagaaaatcttcttcttaatttgagaataggtaaagtagtactgaattgatagatagagctggcgtgatttctcagacaaggttcttccttttcaaatattctaattacttgtggttgtggatcacttatatacgcaaataattcatgacaatttaatattaaataataataatatatcactcagttcattttgagggatgtggtaattgtgtaagtaaggtaattactagggtaataattacacagtttagtaattacactatattt

SEQ ID NO: 116171 - DNA, 2350 bp, Cannabis sativa
aaaaataattagccttacaattaatatcattatttttttttatataagttaatgttggtaaaagttgttacaaaaaaaacaaatttattaaattaaaatttcagctgagtaatcatcatagatctctcattaatttatgtaaaaatatattaattcatgatagcgcagacaaagtgtgcaccaatctctcatacaaaccctctgaagttacagatttggtgtatctacctaaaatagtaacggataactatacccataatatacctttagaaattctacgatggtattttagtgggtgtagttttagtttgtatggaaatctgagcaagagaattacacgtgacgcatgtaaaattaagtgctgaaagtttttatattacctaagagtgtgtttgaaaaagattagaatacattttcagattatcaagcactaacaaaaaagagagcatggtcatgcttctctcttgttgtttttttcccttggtctttgttttctggtctgtgagttgtcctaagcttggtgtgtctggttgttaggtttgttccttcgtagtggtgagtgtgtcctttgtctgtggtagttgggtttgtttcggtttgttagtttcctatctggctgccttgcgaagttggagtgtgagtaggtgtgttttttactctttagttctttctctttttttatctttggtagtaggtgggttgtcgttttctgtcggcatttatggagcttgttaatgcttccttaagtacttctcctcttagaggtaagtgcctttctgttaatgaggcattggttaagttggtccctagcgaatcttcccgaaaagtgttatccaccttttgtctgatgggaaaagtcgtggcccccatggctgtgagtgaggccaatgttgttgagtttgtggccaaggcttggaagttccctgtgactgtggtggctttgtcagagggccctactttcaccaactgttttgagcttagttttgctcgtgaggaagatcgatgttgggctttggatcacggcccctggtgcatccgtggctattcgttttttctgcaagtatggtccccgaccattatgtcccctgttaagagtgatatgatgcgtacatgggtgcaggttcacaatatgcctcatgagtatttctctaaggctaatggtcaactgttaggaggaaaaacagggagtgttattatgttcatttacaagaggataacccatcctcatggggtaaatacctcaaaatattgattgaaattgatattaaaaatcctctattctcgggatgcttcttcgacttggacacgggagttaggaagtggctccaattcaaatatgaacaaattggcatattctgctactattgtggttgtttgggacatcaaagaagagggtgcaagctttcttctccgatcatggtgaccagcgaaagtggtattccgtttcctctgtatgggtcgtggctctccacgtcgtcatcgtacctggatgttttttcaagcgccaattcatttctgccctgtcgagatcaccccggctttgccctgtatgctccattccgtcgtcctctcaaagctgctgggaacggccacggtgacggtggctatgggaagccggtttccaatgcttcccgtggttcgaggcgaggtaggatgttgacaagacgaggtgcgtcaatctctggtaatggccagcgtgctgtgtggatctccaaaccaaagccagctggtgatggtacgccggttgccattttgggtatagaggtcggttttgaagatgaagcaaatggaaaggcacctgctggtttgcctggaatagtgtcgcctatacctgtacctacaaaagaccgtttgttgattactgtgcctcatttgaataatgttattgaagatgaaaataatcctttagtgggccgaacccttgctgtgtctcttcaaaatggtgggtcggtctctcctagtgggccaggtgccttggggcctagtggaaatgggccagctaatttaaatgtgaaggccaacgtttgttcagaccttgctgtggacgtgaagcgtggaacgaatggacttttaataggtgggccaagtgatgttaatggtccagttggggaaaagataagtgtggttggtgatgggctgcctttctctattgggccgattaatgctcatgagccaaatatttctaatgggctaaaatttaatgaggcatctttacttaagtgtggtaaggatattaataccacttctagtggaaaggaggcagagaagaatattgaagaaaagaaggctttgtctcagttttttaaagcccaagaagagttacttcatgacttgaaacactttggtaagt

SEQ ID NO: 116172 - DNA, 3435 bp, Cannabis sativa
caatgatgatatgtattagtttagaaataaaatattaggtatatgtaagtatagaaaatcaaatttccctttgtatttgtgttttataccatcatgtggtatttaagattgtacttaactttaacaattaatttacctacatacccttttataaaaatcactttgaaaacatagttcacaatttttgtatcttcgaaaactttgtaaataattaaatcactttgaaattttggaatgaaattttccacttgacatatttgagagatgacagtcatttaaaattcatttatactatttggtatggttttagaatttatcatttgtttttggcaagttgggtatttgagataaatctttaaaaattgttataaataaaagactatctgactagaattttaattaattcaactactccccaagagtttgagagtgattaattaattgaataaattatctttccgaaattgaattttagatttgaattaattagaatttaagacacatatgattatgtctaaatttatcagataatatttgtaatcttaaaatttaatctaaatttatactcgacttgatgtcgagaatttatttttcaaaagtcataaaaataaaataaaaagaaaaagaagggttgatccttttttatgtgcctttcaaatgtctatgggctttcatcattgtcaataaaagcccaatacgattccatagtccatataatttggtccaaatccaactcatgcaattctgggataaagaattcaaaattatattaatactggaaaataaggaattatccatagattcctaaaaatgacaaagtttacaaaataacattctatagtattataatcttttttatgaattattaatttttttttttttacaaaaatacaaattattgttttatggttgttctaaaaaaaataattattttcacattagtgctacatcatactatcatctcacatgaccttggggcatttccgccatgtgtgatagagttaggtatagactatatgttctaagtaactagaagtgtttgcggtgtgggtagtacgggttgtaatttttttcaaatcaaaccacatatgtagttagaaacctcttcctgattggtcctaaggaggtgcttcctaatttttttgccatcaattttgagtattgactgaggtttacaaatttgagatttaaaagctatggcctgaaattgaagatagtctaattctaaaattctgggaatgaaaattctaagttaaattgggacatgatagtcacaaagtataaagccccaattcttggaaaaatagagcacaaacccaaatctacgaatcacataaccttaaaatttctagccctagattcctaaaaaattcatataaaacccactccaacaacaaatgatgcaaaataacaagagcatatgtaaggaattcaaaatggaatgataaagaaattaattaaggaaaaaccacttactggttcaacggaaaaatttgggtctcgaagaacttcttgatgagagctcatggttcgaggggtctagaccttggcgattttggggttgagaaacgcaattggttgaaatttgaagaatataagtaagcgacagtgagggcattaatttcagaaaaaagatggctgagattttttcgagttctaaaagtttcgtgggtgataatggcaaaattaaagggattttgaattttatacccaaaaggtgataaccgttcgatcacaatgatgatagatcgaacggatggaagctattggaaagagaaagatcaaagtaataaatgttaaaatgatatacctcgaagtcttgaattgccaaaaataaagcgtgcagttttttgaatggtaaaaatatgatcgaacccttaaggtaattaaaaagtcatttttttaaaaaaaaaaagtacattttaggggacaattgttatactcatatttcgagtagcaatatggtactggcacgtataatatagctagaatatgaactagctcaaattatgcattaataatgcatttagacgactcacctcgagatatacagttaaaaaaatactcaaacttaccagcctgtagacaatggcaagacacgagtaaataactaccgattgatgagaccagcaggatgaagagagaaagttcatctcatgataaacagaatacattacgaaattatttagaaagtgtagataatgattttacagctcattgacccacatacatgtgagtatattgaaaaaataaagacaacaacttcgacatgattcatctcgcttatgttacactataataagcgtcttgtgtatacttcactcaatattaatagaaaaacgcgagaattactaaaatctatacttagacgctggcttacgataaagtgttttgaaaagtattgttgaactgcgagaatagtctagcataaaccgcttgcgaataaagttaaaagtgcggttatgagaagttacttgtaattatctcatgtgtatagatataaaacgtggagattgtccacgtttcacgaacggttacaagtgataataagatctcaagagaataactgtcgtcatagactcttataaatagggagataaatcaagaaacaaaggacgaccattttgggaaaaaaaagagaattatatctatttttcattctgaagactaatttattgtattctgtatataattttatcaacccagaataagatagacttgtggattatgaataactaactttaaaactacgtaaaaaccttctcgtcatttattgttattattattaattaattctgtgttgttagcaatacgctcttattgagcgcaaattatgatcttaccaaagagtttgctccgagatgtagaagcaatctgtagagtctttttatgaaaggaaaatgcagtgaacataaatgtagagcttatagcatgggatgcaatctgtcgaccaaaatcaaatggtggcttaggtttcaggaatatacaagaatggaaagtcgcctgggaaactacaattggtgggattacacaaaccccacggattgcagctagtattggaaaattaatttggtggctgtcaaaaatgagctcaaggaaaagattagccaaaaagcctttgtgggtcaaaaatacagcattcaagcgggacacactatgttatttgaaatgcacgaaaaaaaaaaagaatggccaaaatttgtttgggatagactaatgactcctaaacataaattcattatgtggcttgttatgtggcaaaggcttaggactaaatatcgaataaggatgtatgaaccaggtttgaatcttcattgtttgatttgtggagttaaagatgagaatatcagtcacttagtgcatgtttggcatcataactaaaaaactgttttttgcttttaaaaacagaaaattgttttttgaaaacaatttggc

SEQ ID NO: 116173 - DNA, 3662 bp, Cannabis sativa
  modified_base (106)..(128): a, c, t, g, unknown or other
aaaattgctatttttagtgacaattttttagtcacaacataattattttgtgactaaaaatgtgacttttagttacaacaaaatgttacttatgactaaaacatannnnnnnnnnnnnnnnnnnnnnnaatttagttttagtcacaaaaaaaattaaggtgtatgtataatacaggactgtgtgatatttctgtattatgtaacatactaacactgatcaacatgagctacctgtattgtggtgccttgctgtaaaaaaaacagcattaacaattcttaaatgtgtttatagacctgcttttctggcatttagtctaatttgagaaacactctttttacagtgattgaaacaaagcaggtaaaatattggaggctataccagaaagtttgttaatgaaaaactaagttgtctgattgttgtggaggcttgtaacattaatgatccttaaggaactaataaaagtgaactataagtacacctaatccacaagcttgttaaaaaaaaaagagccataaacaaaagaacaagaagtgaacataagaacgattataacaatgttaaatcactagaggatggtcaaaagagagtgtttcatgtgtggctataattctttgcatatgaaacaaaagtactataattcctctatgcaagagtacctgaccaatttctagcacagacaaatgcctcaattgtctcagatgataagtaattgctagatgagttaagaaccacaccatcactgtagaactctgattctgaaataggaatagctaaaacatcttgaactatcatgggcaaaatcttacatttatagggacaatccttccaccaattcaaaacatgaaaatcatcatcatcttcgaaatattcacaagtgtttgccaaatatcgatccactgctgttttcaatccttttctctcattttcttccctcataaacctcatgaatcgtgcattaacagttgatttaccattattgatctccatgtcacttttcttagatggagtggagtagagcattgagtaatgttcatacaaactttccagagtcttcttagctttctttgtcatttcatcagccaaaacatcaccacatatgttatgcaacaacattctcaaacccttttccttgcagcgtggatcgagcaatacagcaacaaacaacaaaggattgacatgatgcatattcacccaatgcttgttaaaattttctcttatgttgtctgccatcttctttgcatgaatatccttactgtcactccaagattgcaactccatgtggatcgattccaatacaaacaaaaataattctgcggtggcacaaacttctttagaatatcccattgatgcattgtagaaagtcttcaaatgatttacacaagtgtgagcaatttcccaatccacacaagtaggagaccttcctccttgcacaaactcgtgaaagtaatgttcatcttctttctctagacgctcaaatgctcgttcgaattctacaactaccaccaacattaggtaagttgagtcccaatcgtttgaaacttctaagctgacaaattcttctgaaataatcttctcttgctcaacacatgccttaaatttttgtaatctgattggagaggccttaacatacttgaccacattcttgattttagtaattgagtcatgacaggacttcaaaccctctgcaacagcaagatctaggatgtttggaaaacacctcatctgcttgaattcacctttaaagactggtgtgattctttcggacaagtatgcaacaactccattgctaaagcttgcattgctaactgtcacagtgagtaccttctcaatattccattccaataaagacatctcaactgtcttgccaatagtctcaactttgtgatttggaacttgacaaaactttaggattctcttttgcgttttccaatcactatctacataatgtgcagtaagacgaatgtaattcgatctttgcttagatgtccatgtatcgatggataggcaaacacttcgaaaagaatcaaccaaaacgttcttcaacttgttcttttctttaacataaaggttcaagcaatcacgtgcagctatgacacaagacgggactcgaaatgtagggtccaagaactcacaaagatgcttaaatgttttgctttcaacacatctaagatgaaactcgccgttgatgagcattctagcaatgagttcccttctacttttagcttcacgagcataatccatacgacaaaactgaaatggggcctcacaatcaatgggatcttcttgcatttttgaacaacgaccatctgagactagtaatgagagagatctagatgcctttctctttctcacactttttggctcaccagaacaatcatgatgagatgcatcaatattggttaaaggggtttcaccagttgtaggttgttgacctatagctggttgagaaattctggtatcattgcaagttgcagaagtcatctacataagtggaaacaaaaagtgcgtcactcagttttatagccaaaatcaaagttgggttttgataactataaaactcaagtctcattacttagataacaaaaaaataaaataaaagaatgaatcacaagaagtagaagctaataatagtagcaaatagatagatagactagcccaatagtactattaaaacgaccttgtactgttgtacatcaccaaatttattaatcttgagaggaaatacattaattttgaactaataaagattattaaaatgaactttgaacacatctgataatatatgaaatagagggcagtagccaaaaatggatatgtagctccaaaatgtcaaattttcacctttataaaccctttatcagcctataagcttttctgtctaaacacaaatgaatgtttctcaacttgttctatatgtagaaccaaaaaaaaaggaacacttaatccagattcctctcacttcattaagtgagattacaagtaaaagactattaatttaacccatgtatcataatacagttcagtgaggattatatattacatgaaaatatgggtttgtaccttaatgggttcctcttctctcgtttgccaaacgaaagtgtgtacccagaaacgacaaagtaacaagcttgaagaaaacaacccaggcaggcagaagatcataccaccgaatttgatagaggaaaagaagcgaccatgaataacaaacaaaggggagggagagaggcgggtaaaggttccctctcaaatatttaatttattagtaaagaatttgtttttattaatataatattttttaaaaaaatatatattttaatgcctaaaattttatttgttttttaatttgtaagcgtcataactacttaaaaatttgagtttataatcaatataaacctaataatattatttagctaagtaccaaatgttaataaaattgtaatttttcttattagtgacttcgttagtatcttaaatttataaccagacttagttttcggaaaattgatgataaatatttctgtccagagccaataatttaaaatagtagaatttacgtggagtatggttttttaaaccttttatgataaatatggcataattaactatggacactttatatggcttttttaaagtttggccataatttatgggattttaaagc

SEQ ID NO: 116174 - DNA, 1269 bp, Cannabis sativa
gaacaaaacaaaacaaaacttgtaagtaagtaggatgaatatgagttgaagcaggcacctataacatcacacgtggaacgtggtaagacaactccggtgttgggacgaacacagtacttcttaggattcgtagttttgacctgaacatgaatcacatgatcaatcaaatccatgttataatcaaaagcatgcaagatccaagctttattgtaccataataagaagatcaatcaaatcctgaaatctaataattaaattcgatataattcgaattctaatgctttcaccattaaaataaaaacccttaattggaacaaacaagagggaatcaaatttgagctaggtcccttccccaaaaaaaaaaactaataattgatgcgggtgatcttaggttttgctacattatatagatagagaaaacgaaaacacagaaaggaattaccttgaaagccacataactatcggtcttattggacaattgtaatgaacaagagatctgcttcttcaattcgactaagaaaaaaaaaaacagtgaaaattagaaacaaaattcaaaacctataagaaaaacaaaccaagcgaaaggcgatccagatgaatgaatatgaaacccccccaccttgaatcgattgaatccatggtgaaaaagaaaaagacttacagggaaacttgagctcaagagggtcgatgctgagaaggtctcctgtgctcattgtgccaagctggtaagaagaagaagagagagacggagagatcgagagagagagagagagcagaatttggggatttgggaatttgggaaaaaccagatttgataaaatgatgccaattgagacaacctcctccaactcctctctctttcaccacttcatttcattttcattatttattatttatgtctttttaacaaaaaaataatatagggtgttttggaactattttttaattatttaagacattttataaattttaagaatttataatgatttgcaataataaaaaattaaatactaaataaataagagtgtattagtaagaatgcataattaaattttttaaaaatatatataatttgttaatcatttcttttaaaataatataattaattattgtgagaccgtttgtggtttacaagtcttttaggatttgtttaaaacgctgtattaaatcgtattttattatataaattatattttatgtaaaattatgtgtagtattaacttttatggacacctaaatatataaaattttagtataaattaaagttta

SEQ ID NO: 116175 - DNA, 1681 bp, Cannabis sativa
ttaaagaatgtaattttcagtttccaatcaaattattaatctcgcagataaaactgaaacagttaattattccaatctcctcatggtatgtaatcaaggagaagcgctcaataattaactcttttaccctagtagtaaatctacgaagcatgaatgtatgcataaaaaattaaattttcttatatatatatgatatattcatataagttttctcttcatattaaagaaataaatgtttatatgtatctgtgtgcattgaattcataagttattatactaattacaaaattcaaacccaacaccacatgatatctcagtcttgtcttatgacatgtgtatgatgttcttatggttttaattggttgtattgttttgtttgaagttggtgatttctttcttgctgtggtgacttgaaactctgttcttttctgtgatggatgaacaatacgctgcaatgaattaaagggaggatgatgatggtttcttgatgtatgaaaatgatacagtggattctattgaatttgatgatcgttggtgtctggtaggacgtttcttgacggattggaatatagatgttgaagcaatgcaacataaaaaggcatctttgtggcgtcctgtccgtggcttgtttgtcaaagagttagagtccaatctttttcttttccagttttatcacgacatgggcattgatcgagtcatagaaggaagtccttagacgtttgatagaattcctctaatctttgataggcttaaaccatgggaaaatccaagaagtgttactccggttacattggaattttgggtgcaaattcatggtttgatctctgggtttcggtctgagagagtgttgaaagacttgggaaattatattggctcatatgtaaagatggatccgaacaacttctcaggtggttggagggactttttaagggtgagagtgcagattcgggtggataaactgctgaaaaaaggacggaaattgcagctgaagaacgggcctgaatgtaatgcgagttttagatatgaagacttgactactttctgttttgtttgtggttcgcttggccactcagagaggttctgtgagaaagcttttgatacacctctacacctgttaactaaggtgtataatctggaaatgaaagcggctccaagaagacgatcacattccattggttcaaggtggttgagaccagaaatggcggtgaaactggctggggaatcatctactatgccgatgaactgcactcctgtgatgatcagtaattcagtgacgttaggggcgggaattatgggagaaaattatgcaacaattgatggggggataagaatattggctttcaaggtgatattgatggggaaggaattaagggagataaaaatggaaagtcaacaatgatacatattgaagataatggggaggatagtcagcttgtttttgaacagaaagaaggagagtaacaatgggcattaatggagcaatatcacaagttgatatggtcatggaagagaatattgacttagatgatcacgtggtggacagtaataatgccccactgcaacaaaaaaactcaattggggcgggctctggattgaaggcccgccaaggattatgaatctttttagttggaattgccgtggatttgggaacacgtggaccgttcaattcctaaaagagatt

SEQ ID NO: 116176 - DNA, 2450 bp, Cannabis sativa
tatttagggtgttaatgaacatacttgtgagtagatctaagatcctggtaaataatttccaacagttagggtttcatacaaaatactgtaaactcaccaaatacgcccatagaggttaatagactgacttgtggagtaaggttaattaatacttgaaccacataaaaatctctatcttatttttttttttttgcattttattatttctttagctcctaaatatttagtttccgaaaaccttgataaacattttagttctttcattaagagttaaagaaagacctaaacccatagtgttactgtaacgatgatgtttactcaaaaaatagtaaacacaataagactcatcaagatggtggccttgacgctgtcatggaagaagtgaaccctctctctccaagccttgcctagccgagcgatgcgtggaaagggtaaacatccaacagggtcgatccgaaggtatatggggcctaaggcaaaattaaattttggggcctatatataattaaattattattaaaatgatagttttaatgttttagtgtaatagtaaaatttttaaaaactcttaaaagctcaagttcaatcctttatagctacatatttaatatttttttttaaaaaaatagaaaagtagagattagggattgatctcttgacctcttggcttaaactaagaccctttaccactacaccaaacaatatttgttatattttcttcttatttaatatttatctatatattaattaataatttttttataatttcggggccctgagtggtcgggcgcccgaggatcacgcctagctcgcctaccctcaaggtcagccctgacatccaacctaggtgaccgagaggttaaccttgataaacaacatgatcttgttgatgaagaccgatatgttaaagacacggaggaggacgatgatggagaatacatcaaagatgggtactacaaagatagctaccactatatgagcaggaccccaaagtgatttaagtgtttaaggaattattcgagactcgtcaaaaactagcccatcaaaataagatttcttagaagatagaaagaatgatggctcaccttcgaagtaagttttgagacctaaacgagggagattcggaggaagaaccctcaatagaatgtgacgaaggaaacaacacggaaaactctactaatgctagaacctcttatcctgctcaagacaaggggaaggcataagtaggtgaccctcagaaccttactgctcccgtacctcctcgcaaaagcacaaatctggccgccaagctttctcaggcgcagaaggccactgacgccgttgcaccaaaaaggactggtacaaaagtaccaaagcccaagggatagaaaagttgccccagtatatttattggagtgtatttataattttatgggctatatataatttttttaaaaaaatactagtttttttatttttatatttcaaagtagtttttttttttacaattttacgaaaatccacatagaaatatacatagcaaccaacggagtaatttacattagaacaaaaatctacatagaaattacctgaacaatccaaactgtaaatttaaaaaaaaaaattaaaaaaatggtatatgtcataatttcctaaaaaattaggtcttctattttgcaaaataaggattgagatcaacttggcatgcatgtgtacactaataaattgtaagagtaagattcccttattagttttatggtttcttctttgatccgttctctttaattaatattatcattattaagaatgtttgggccctcttccaaaactggatgagccgactttaaatccgtgtccataaaaaagtatataccaatttaatttccagcgatatatagtagcagcattacattatcttaataatatatacataagcattgctatgggtattaaggtgcctactagtattataatgagaaatctatgtagctctttataatttttattaattacaataaaataagtgaacttgatagctattataaattaagatctcttattaaaaagtagtatccttaaattaattaaaatttgacacatcaattaattttttatttattataaaaaaaattaaagttctaataaagtcaataacagtagattagttaatgtgttaaattcaataagtttaacacagtataagacaccaatttttaagaagggatcttgattcgcattattataccttataatagtactaatcacagaggagctcgtacatgttcgacagtactctactaaatgtgatttttagtcacaataaaacgattgagactaaaatatatcattattagttataatttgttattaatttaggtggcgtttggttggaggtaatgatatggaatggaaaagaaagaaaacaattttcatttcattcttttgtttggttatgttgaccgaggttttcg

SEQ ID NO: 116177 - DNA, 2049 bp, Cannabis sativa
cgcttctggttcacagacctctactgccatcgatactgtccattcttctatgcaaataactgtgcatagattgaatggatagaactacctcgaatggtctcagtccgtgaaatttgcgattgatggccgtgggaaattgggatttctgactggagaaaaaaaacagccaaaaacagaggaggcaggatacgaacagtggcgatcagaaaactctcttgtcatggcatggttgttaaactccatggacgcctcaattgccaagcctcatatgtttatgacgacagctaaggaggtatgggattctgttcgtgaaacttattctgacctagaaaatttttctcagattttcgagttaaaaactcaactatggcaatccaaacaagggcagcggagtgttaccaactactataatgagatggtggcatggtggcaagaactggaccagtataatgacgatgtttgggagagccaagcagatttcctccagcacaagaaacgtgaggaaaatggcagagttttcatgcttcttgctggaattaatcaaaacatggatgaagttaagggcggaattcttggccgccgacccttaccttcaattcgtgaagttttctctgaaattcgggtggaggaaagtcgtagaaaggtaatgtccagtaatgaaccagcccctattttaaataatgactcctctgctttgtttgtcaaaggaaccgagtccaacagtgacaagaaaaagaagttgtggtgtgatttctgcaaaaaatattggcatactcgtgacacttgctggaaaatacatggcaaaccacctggtggaaagccaagtcgacctgagagagctttacaatctattactgattcttctccagagtcactcaatcctggacagtctcctttcacaaaggaacaaatagagcaactgttgaaactcttacattccaactctgaaaagccgccatgttctttggtgcaacatggtaattctaattttttgtacacctttggttgtactcagcctaagactacttggattattgattcaggagcctccgatcatatgactagttgttctagttttttttattcttataagccttgtgcaagaaataataaaattcgtatagcagatgggtctctttctgctattgctggtataggagatgtaaagctctccaataatctaacattatttaacgtccttcatgttcctaaattatcatgcaatctcatctctgttagtaaactaacagccacactaaattgtactgcaaaatttttttcttcttattgtctttttcagaatccggccttggggacgatgattggcagtgctagggagtgtggtgatctttacgttctagatgaggggacgttcatgaataaaggggctcaacaaagttcttgcctgcaagttgcatctgactttaaaaatgatgagatttatttatggcattttagacttggacatgcaaactttcattatttaaagtatttatttctgattttatttcacaataaaaatccctcttcttttcagtgtgaaatatgtgttttgtctaaacaccatcgaagtacatattctccacatgtttatacaccttcacaaccatttgctttggtgcacagtgacttatgggtaccatccagggtctccacatgcaagggtaaacgctggtttattacctttattgatgatcatactagggtaacatgggtttatttgctaaaaaaaaatcggaagtaggaagtgttttcaaaaatttttataacatgattcaaaatcaatttcaaacgagtatcaaaattttaaggagtgataatgggcgtgaatattttgcacgagtcttaggtactttctttgcagagaaaggaattgttcaacaaagttcttgtaatgacacacctcaacaaaacagtattgccgaaagaaaaaataggcatcttcttgagataagtcgtgctttacttttttcaaataatgttcctaaatacctttggggtgatgctgttttacatgctacatatttaatgaatagactcccttcaaaa

SEQ ID NO: 116178 - DNA, 3578 bp, Cannabis sativa
ccatgtcaaaaaaactaaaaccgaaaccgacctccaaattcggttacggtctggtcggtttcggtttttcggtttttatgaacacccctaggaggaagaggctattcaagcaacatagggggaagaggtaacaaacctgtttgtcagatgtgtgggagctggccacactgcacaaaagtgttatcgcaggttcaatataaccttcacaggaaccacaccagcagaaaattcaagcagtgactcaagttcgaagaatcctcaagcaaatcttgctgaaacccccgccaccactgacgtttctggagcctagtttcttgacacaggggctactcatcacatgacaaccgactcacaaaacctgcagaattcaatggattacaaaggaaaacccaaagttgttgttggaaatggtaattttatggctatttttttgaattggttcaaattccataagctcaaatattcctaatcaatttctcattctaaaagatatcttacatgttcccaatgtcacaaaaaatttgttgagtatttctcaatttactaaagataatcatgtcattcttgaatttaatgatgtttgttgtcttatcaaggacaagacaacgaggcaagtattctaaagtgtaccctcaataatggcctttacaagctccaagtgtagccctcaaagccaacttccctgcctcaaaatcatctcaggtcaagtcgtcaagaacagtagtgcacctgctatttttaactgtaccaccaccagcaatcctgttgtagataagtctaaatttgtttctacttggaattgtaggcttggacacccatccaagcaaattttagccaaaatccttgctcatcccaatgttaaatgcaaatatgtaaacttttgtgatgcttgtcaagtaggtaaaatgcatcaattcagctttaaacctactaaaaataaaaccacaccaccttttcaattggtccatattgatgtttgggggccttcatttcatgtttctatggataattacaagtattacctaagccttgttaatgattttagtaaatttgtttggatattttctatgaaagccgaagtaaaagcatcattactatttaatcaattcaatgcctttgttgagagacaattcaacaccaaaatcaaatctattcaaactgatttaggtaaaaaattctctcctcttaaaaaccatttgcttgctaatggtttaatgattagaaattcctatcctcacacacaccaataacaaggtcgggttgaaaggaaacataggcacgttgttgatgtaggtttaactctcctagctcaagctgagatgcctcttgaattctggcgggaagcctttatttcagccttttacctcataaatagactccccaccccaatcaacatttacctatcaccctttgaaaaattatttaaaattgcaccagattacaacttattaaatttttttgttgtgcatgttttccattgcttagaccctatcaagcccataaagtttcatttagatcatctaaatgtctattcatagagtatagcatgactcaaaaatgttataggtgtctccaccctagtgggagaatatatgtggctaggagtgttaaattcaatgaagaagaatttccttataagagtctatttcaaacttcctctcccgaacacactagtactgcccctgtgatccaatctaatgaggatcaagtccccacatcaatcacatctatcagacccacaccaaatacctctaatactcaaaaccaacagtcaaactcttctcacaacaatcatcacagcacgaccatttgttcaagaacagatttctagttataataaccaacatacatctcagcctcactcaaacaaccaaactcagaattccataaactctcacagtgtcacctcccatgactccttaccctctcaacctccctcaccccctcccactcataacacccatcccatggtcaccaaatccaaaatgggcatctttaaaccgaaagtatacttggcagatattcaaaatgaaaaagaaccaacttctgttaaacaagctttggctaatcctatatggaacagggctatgaatcatgagtttgcagctttaaaaagaaagaacacttgggttctggttcctccaactcctgatatgacagtggttacaaataagtggctgttaaggatcaagtataatatagatgggtctgtcaataaactcaaagctcgattagttgctcaggatttcaacaaacttctggtgtggatttctttgagacatacaatcctattattaaaccatgcacaattcgaatagtcttcacccttgctactcaaaataattgggacatacaacatgttgacataaacaatgcttttctcaatggccagctcactgaagatatatacatgacttagcctcaaggatatattgatgttgaataacagaactatgtttgcaagctaaacaaggccatctatggcttgaaacaggctcctcgagcgtgatttgatcagctcaaaacatacctgttgcaactttgtttttacaattccaaggcagataccagtctattttaaagcaatattcatggacaacttctgctcattcttgtgtacgttgatgatattgtaataacatgtgctaatcaagaacaggttcaacatataattcatcaactacatcagcaattcgacttaaaaatgttggggtctgttaactactttctcggctttgaggcattcaaacagggtagtacatactacttaactcaacacaaatacaccaaagacttactcaaagaaccatcatgttggaagccaaaccacagtccacacccattgtgccactacaaaaaatgtccattcaatctggacaaccccttgcagatcctcaacaatattaaagtgtcataggagcattgcaatatctaactatgacaagaccgctcatttcctttgctgttaataagtttagccaattccttaaggctcccaccacagaccattggggagcttgtaaacgtgtgttgagataccttgctggtacaacacatctaggcatgtgcttctcaccagcttctcaccttgatcttcaaggatatactgatgctgactgggcgagttcctatgatgattgaaaatctacttcaagctattgtgtgtttcttggcttaaacctgattagttggtgctctaaaaagcaaagcgtggttggtcgatcgagcatggaatcagaatacagagccctggctcttgctacttcagaactcatatggatccaatccctcctcaatgaactctctatcaatgttcctcagtgtcccatcctttggtgtgacaaccttggagctggatctcttgcctcaaatccagtctaccatgcccgcacaaagcatatagagatagatctccatttcgtctgtgacaaagtgcttgaaaacaagctggatgtgcaatatgtcgacaccaattatcagcttgcagatgccctcacgaaacctctgcctgtaaatcaatttgtgtactttagggacaagttaacacttcagtgcccaagtgtaacttgagggggggt

SEQ ID NO: 116179 - DNA, 1826 bp, Cannabis sativa
aaaaaaactgttttaaagtgtatagatgaaaaaaaatcccaaatatttcgaataattatattaattaaattattaactctataattcaactagggaagaaaaagattttttttttctagtaaaatattgggaagtagcaagcttgctatgatagaataatatactgtgaaaagagttataaaaatttatgatggaaagaccaatttatgcaatttttaaatgaaatcttttaaaattgatacattttaataatgttagtttattatgggcatctaaaagtggaaatgcatgaatattaataaatttgtgaaaaattataatattgctaaacaatgtgtggaactaaatcatataatattttttttaaatttttttagaaaaaatttatatatgtagtactcattgacaaagcaaaaatatatatatatatttcctagaaaaaaaaaataaaagcaaaacaaatactatcactatctgaaaaaaaaaaaaagtagtttgttcacacatttacaaggacagataagttgtaaaaaagttactttttaaaaattaaaaaacaaaacaacgaataacatacaatcttttttttatatataaataacttaaaagctgtttatcataaagtcaaaaaaattctattaattttttttgttgtttttttgctgttgtctttatctcattgtttatttctcttatcaatagggcagaaaaattcctaatatacaaaatatccccttatataatttagggtttaggtactggccaaaaaatatattttcttttaaaaatatacataatttttttactaattttaaaaatatcactattaactcaaaattttgttaacaataaataatatttatttatgaattaaatagaataactttaataaaacttttacaaaataaataatagataataaaataattaacacaagatatttacgtgattttataattttacatactccattactctttcttatttatggatattttgtttagtgaatactgaattcaataaatataaaaaataaatgataaatttctctcaagatgatccctccatcattttgacatcctttgtatagtggtcttctatcctatttatagaatttctaatattacagttatttcttttggacttatcttaataaatgttcataaaacgtgatcaatctccacgtttcatgtaattacaatatgtgataaaatgcataactgtctaataactttcattaaattttatccaataaatgattatttaaccgagaagtcttcctacactgtgttactcgcaaataactttagcagttctttatgtggattttttaagttcgtctcgcattataaatgttttatatggtgactcatcttatcttcgaatatcctgtattttcttttgtaatttgtatattttgtactcggttatttccaaagtgattgcgatatatgccattttgaatttgttaattttctatttataacagttaatacttttaactcacttttaattattttttaaggtaaaacttaaatataaaactattaatagtaattttggagacactttaaatgccatatttgtttcccttagatataaaaatttttgtacagtaaatttataaatttttgctcaaaatttaatatttttgtaaacacttcttctcttttttcttcactaaggcccaaaatcacaagctatataatataggtaacattaattttagaagaaactagactctataccctttttatactgtcttcttttatttttaccctcttttttaaaacttatcatttttacctcttttttaaacactttac

SEQ ID NO: 116180 - DNA, 1269 bp, Cannabis sativa
  modified_base (1178)..(1198): a, c, t, g, unknown or other
aagattaaacagagagagagagagagagagagagagagagcttgagagcttgtgaagcaaccaacaatggcatcaacgactctgtcatggagttcctcaacttgggtacagagcttcagtactggaaaagtgtttaaggagcccacaaagttgtcagataaaagagctacctttctcattttggctcaaaagaaagctaagaagactcgagcggtaaattcaacaaatgggttcttctgaatttttcttgtttatatcattttgttcttcttcattcatgtgcttatgtttcttttgtttgcttactgagaaaaatttgagctttattatgaatgaatgaagttcacagtcattacttagaatttggcataatttgttaatttcattgcattttcttactgtttctatgaaaataattgggatttagcatcagaattatgatgggattttgttgattttttgatggggtcagataatttttcttgtatatacattcatgtgttatgctttgtttggttactgagaaaaatttgagctttaataaatgaatgaagttcacactaattacttaataatgagccatttgatttgttttggcagaatttgaggtaggtttggtttagaaatttagtatattgcattttcctaccgtttccatccaaattattggggtttagcatcagaattatgatgggattttgtattatcagtttgttgcaggtgcattgatttttctcttttttcatgttgtttatgttttgtttggttacttagaaaaatttgagctttattgaataaagttgacagtaattttcttactatttctatccaaattattgggatttagtatcagaattatgatgggattttttgttgattttgtgatggggttcagataattttgaaggaggatgtatctgagttggggaagaaaggtcaactacttaatgtcaaggctggtttttacaggaattatcttcttcccactgggaaagctcagattgttactcctgacttggtcaagtaattcataaaaactcaaccttttttcattattctctctatttatttcttttgctgaacttcactattctcatttatcctatgaattgctttgtaattatttttagactggcttgatgataaaaggattggttagtgcatgtttggcatcatannnnnnnnnnnnnnnnnnnnntttaaaaacagaaaattgtttttggaaaacaatttggcttgtttggccttgttttttgaaaacagttttca

SEQ ID NO: 116181 - DNA, 5351 bp, Cannabis sativa
taatttgcttctaattcttaaaaagaaaaaaaaaaaattaaattgaaatgagaatatttactaacatagtcttatgatttagggccatttgttatgttttgtagaaatgaggacataaactaacgtactcctatgatttgggttcatttactataatttccctttttgaatcgcctctgcaaattagggcttttttgcgtagccatgcccatggatatgggctgattccacctttgtcgtcgtttctaacttcataccttcaagctagttttgctccaatattcgctgtgttttctccgattactacataggattcaatgtaaagatcgttgacgccattaaacctctgatgttcgaacaaaggtattgctagaaaatatacgttggttgcagaactcaagaggttggtaaaaatggaaggtgaagaaggagaagggataagacttagcaagagattcccttcggaaaaaggaggagaagtcgattacaagaccaagtcaggcaccgcgtggagccactcgtacctgaaccagaagccgtggcacccactttcctatcctaaccaacgccgcaaatggatcgccgaacagacccacgccaatcacgaacgccgagccgaagaggtcgctcgcgaggtactttttgcttcattttccactagtttttcgtatcaccaaccctgtttttcaatttcttaactttttacccatgtccatttttcagtatgctcaagaacaagaattctttcgccaagctgctatggtatccaaaaaagagcaagaaaaggttcagttcttctccatctgtctgtcctctttggtttttggtttttggtttttgtcaatcttagtcaagtgggtactactatggctctgtgcttttggtgaatatcaacaatcattctgtattcataatattatgaacgagttctctcatcgtagtaccttagaatttggagacaatcgtaatacaatgacgtttctaaacagtaatgtcgcattttgaatttaaaaagggttagatgagtttttcttaatactgtttttgtagatgtttctttaggctaacttagttatttaatcatctttttagttggagataatgaaagctgtgagcttcatgtatgttcggccaccgggttacaatgctgaaagtgctaaagcagcagagattgctgaggaaaggagaatggaggagcaaaacaaccctaatgcagatgaggcctccgcttcaatgtaatataagtagcaaagaaattaataagtgatttctcaattttctttgttatgcttgaaaagtacataacattgtagtggaatgttttctatctttcaggccgtcagaatctataccagctaaagctgaagaaaagaagaaacgcaggccaaaagatgttttcgggcgatcgttgcctactggagaggaatttgaaatcttgaaaaatgctccacggtatagcggagcttttcccatgataaattattgaatgttgatgtggaaaattctgatattggttcttaggatcttgtttgactctcaccatagcttatctaaatacttaagtgtgctatctttttaggttggagactggtgttgctggaagggctaaaccatttggagttgaaatacgcaatgttaaatgtgttagatgtggaacttttggtcaccaaagtggtgatcgtgaatgtccattgaaagatgttataatgcctaatgaacagagccggttgaagagagatgaccccttgactgcgatccttgcccacatagatcctagtgaggttagtcttatttttctcgagtttacctctataaaagtggttagtgtatattaggtttttttcccactctgaatattataacaaatgataataaaacaaaataataacaaggtgaatgatgagggttttcaagctcattgaaggaaaggaggtggacttttgttgtttcctttataagtacagttttgatactagtgttcgccactcacttgccgagagaagtacaaagttggtaaagacaaaatagctcatgggagggattaatttgaaagattactcgggcgataagagggcctttgtatgagcaattgtctaatcttacagtttcctctataaaatgattcgagaggttttataaaattgccttagtgtgggggaaagaggattgaaggtttacaccattaggattaacgtgctgggcgagatacacaagcataactgtcattgagggaaataatgtgagaagaagaatatgattgcggtctcaaagttaaaagagaatcttgccatagttaaactggctgctgatatcattatgtccgaagtggactttgggaagagaggggcagaggattattaaggtcttttaagaatgtgtcacattaaattaaagcaccaaggagtttgatctttcattttgtccctgataggccctgattctattacttaggcaaggggtaaggctaaacacaatgtgtgacctagtttataattttatcgtggctgtcagcatattgtattgttagatgctagctactagattcagttattgggtactatatatactcagtgtagtttgtgtttaggtatatgctggtatttttggaatttcaggattagtctcttgcagagttggaagatctcttgattcaccttcaattattcttgagaggcttttgtaagaatttcgactgtgataaaagttttccattcttgctatacaactctatccttgaaaaataatgactgaagaattcaacatctattgcatctcttctttctttctacatcagtctcatctttttagaagacaatgtgaggtttcgaatgttttcatgactgcagcctctaaagtgggagctaaagcaaaaaccaggcattagtcctccccgtggaggctttaagttagatgatcccaaccaacaaattgttgcggaggatatatttgatgagtatggaggtgattttttgttttttccaagaaaatcttgtagtgcaagctatcactgtctttgttctgaacatgtttatgataatagaccttttgttttgtaggcttcctcagtggaggtatccctgagttgctaaccaacttcccaggcaaatctaaggataagtctaggaagaagaaaaagcacaaaaggcaaatattatctcctaatgttgaggagtcggaggaaaatgagttttcttctacttctgaggacgaagaaaggagatcgaggaaaaagaaacatgcaaagaacaagaagaaaagtaaaaagaggcgagatcattatgaaacaaatacctcagatgtttcagagtatgatgcgcataatgaaaagagcaatcacatggattatcatgcatcagaagaatctgatggcagccggcatcatcattcgagtaccaaaagcaaaagcagaataaaactttcgtatgcaaattccgatgattataggcatggtagaagtgacagaagcaggcataagaagctaacatcaaaagagtccgactgtgataggcatcattatagcagacacaagcagtcttatgattcatctgacgattctgatgaccaatttagaagtaagaacaagcataagcattcttattcacaccaagattcatgcactgcgaggcagcaacgaagtggtaaacatagacataaaagggaccatttgaactccgacgaacggcgccatcatcaccaccaacgacatcatcatcaccatccttagtcttgattaacagaaaatcattgttattaatgaaaacagttctgcttgagcaagtgctataggctttgaagtggaatggcaattcaaattattactgtcattttaacggggcggcttatcttattctgccaatatcacaggacatattcagtcagttcttgctcttggccccaacacagacgcaatatttgccaatggcaattaacaagagttgcaacactaggaagtattgaagcttcccaatccgttgcaatggtgaatttacagaaagaattaatgtttagttcaagtagatatatacataagtaaaagggtctattcttccaagtatgtagagcatatttatttttgccaacttatacactaaagcaaaatattaaatgtggtactggctgggttgatttaagctttgtttcaaaagtgttatacaagatttaatatttcttttttgcttttttcaactaagattttgtttaatataagattttattagcgaagtaattcatttctatttctttcgtgtattatgctttttgttttgagaattaaattgactaaaattttaaattaattataataataactcagtattttgatatcatcaacattgattttttttttttttttaaaatgaaatatcaatttcattgaaatttagcattcatcatacaagagagctatgaatgctacgatcagagaaaaactgagagcgcctagcaacaaagtgagcaactcagtttgctgatcgtctaataaaacgaacacttacattatttaaaactgataataaacttttacaatcattaacaatcaaaccaaaagaagaagacatgttgattactaaaaattgcttctaccgttaccatgctatcagtctctatgtcaacctgattccattccttgtcttttaaccagcttagtgcttctttgattccaagagcttccaccacctctgctgggtaatttcctccatgctatcttgcttgtagatcaacaagacgacccaacgaatcacgagccacaataccaaagccatatgcattttccttctcaaacaaagctccatcaacatttaacttgactgtaattgaatcgggtttggtccaacgctcaatcttattatcatattgtaagagagacaatgataataaactagatttatcttgagcagtacgccaatggtcaagtgtagtccatgctgaatttagaacttgggttggagatgaggctttcttttcccaaacaagcttgtttcgtgacttccaaagggcccaaaaaagcattatggcacggcaagatgtatcatcaccatacagttcgaaagtagaatcaagccaatagccgatagtatcatcaacattgatttaatactcggtatttgtaccaactttgttgtatgtcaaatacttcttaacctgtttctgtaacagtagagagcatctctagtagttatatctcttaaggatattaaatttttttacattatttaaaagtataatattttattttttgacacttttatttttaaaatacttaataatactttttaaaaatgctataattatgatctcacacattattatttaatatattatttattttaattataattaggctaattagtaat

SEQ ID NO: 116182 - DNA, 2152 bp, Cannabis sativa
  modified_base (668)..(668): a, c, t, g, unknown or other
aactttaatcttcttcactagattagccacacacacaatatttggacataaacacatgacacaatattataactcaaactcagaaacacttagtcaaaaattgaatcatcaataatgccactcttttaagttttaaagttgtatatggctaagcaactttggttattgtattatcattgattctacatagttgatcatttttagctttatgatgtgaaatttcgtattgtatgctttttagagtttctaatagacttcaatgagtgatagattggtataattatatttggaataaattttgatgttgttgtttggtggattcttattttttttattagataacataatattatttattcgttaagtctgatacaattattaagtgagaatggaaacctttcactatattgaaatcaagttaaaattaaaaaagatactaacaatcttattatgcattttacagtgctcgcatatgttgaacttgatgacaatacaaagagcatatctgcggtcatgttcacagatattgtggaaaaaataatcttagtttatttttgaattaacctaagaacatatttaaattatcaagctttcttaaacactaatatattacatccggtatttacttttaattgtcaaaattataaactataatatttagatacacntaataataatctcacctaataactaatactattattcttttaatttttaattgtattacttttaaataacttaaaaaaaaaattaacataaaatttagtatacgtgtttcgcacgtagctttttactagtagttatatatatatttatatatttcatatcacaatatatagtaagcatttaaaacatcctacaaatttgtaaattttaaaataatatatatacaacaaaaaccaaaaataaagttcacacacttgtatgcatgtctattttattttatattaaatactattttttatattattattcaaaagttttataatatattttttaaaataattaaaatatatagtatcatataaaaaataaaattataattattgagttactaaaaatacaaataaaatgtgcattttcaaaatttttaaaaggtacattataaaaataccctaaattatacatatatcttttgtcatgctttaataaaataaatataagttttaaaactaaatataaaaattagattattatctaatgattaaaaattaatattatatacgtgatttcctgtatatatcaaaatatatatagaactgtggggttttttttttcatcaaataatgtgctgccacgtcataaatattgtggtttgtgtccttgagaagtagggtatcattattaattgattttttttttttattttttttaaagtgttactgttaattttttattataattttttttatctaaaaaagcacgttgaattttttatttatttttttttttcattttttgtatagaggtattcgttatattacttacaacatatattttctataattaattttttaaaaaatttgaaataatttatagtgcctaaagtaggtttgaattttttttaacacgcgtagtaaactgaaatatatatataactctattttcacaatggtaaatttttcaattttttttttcaaaatttacgggaatgatcgatattgtaactataacaaataccgtaataattttttttttttaaaaaataatccaatacatgatttcgagaattgaagttaactaaaaaattattataggaagttataattaacatttatcttttttttatgattttttttattttttgttaatacttttttaatgtttagtggagacagagccataggtgtactcggagattgagccgaaagctgattaaagaatacaattctacgatataattgcacactagtcttagtagacatgctaattctcaggtatcatatcgttacgagtgcaactaagcagtggcggacccaagatttaagttgagggggggcgacacactttttttttataagtgaggggcgcgtcttttttgttttctacattgcataacatgttaaaaattaatgcaaatttatattttagtattaaatataatataaagtaacactttttttttattagtgaggggtgcgtcttttttttt

SEQ ID NO: 116183 - DNA, 1961 bp, Cannabis sativa
cgatcttccctagcatagcggagcaagaatatcaaccctctaagtgatacgctaaggggagggcgctcatccaggaacgaacctaaaagatgacgctcatccctgtagaagtggggaaagaccgtttctctagggacggaccaggtttcaagaggtaaccattttcttaagataataaataggcccacactaggactgggtgagggcatcgaaagatatacgaatattcactctctctctctctttctctatagttttacgactaaacttatcatttctctacgatctgacatactctttctcattccggtgagcaaggtttgactgtcgatcatcatataaccatagacaaaggaagcatttatttacatttcttattttcttttctacttcgcactataaatttactgacttgaccgtcggagtgccttcggtcggaaccaccccggtgtcccaaggtttcacggtcatccttttgtctttgttccgcaggttgtcgatgcccactaatgctcattccgatcattgtagattttagcgtctacaattttaagtatttaaaaatttagaaaataagaaaaataattataaatatttaaaaatttagaaaataaaaaaattattttaaaaaatcaattttttacttttattttttttctcttcttcatcttctgaaaactctaatctctctctcagctctccctctccttctctgtcaatcgcacgcggctccaaccccagccaccatcgtagagatcgacgacccccccaataccctaagaaaatccacatgcactaaaaacctaatctcgaattccctttccactcgtgagctccctcctttaatcctcatctctctttcttgttgctctcgactcaacgtcgttgagccacctttggggatggtggaccaaaatggaagccataaatggatcaccatcttcccaagccccaagcccgaggttcctgagctctctctctctctctctctctctctctctctctttatttgtcccttcccctcgctctctctcttgttttcctttctccatgtgcgagccacgtcgaggctgtttgttggcctttcgccaacaccaagagagaggaacaaagagatagggggaggcagttaggatggatgagatagctaggtttttttttcctttctgttcagaagaagaaaagaaaaagaaaaaagaaaaaaaaaataaaaagataaaaaaaaaggaaaagaaaaaaaatattattgtataattattttactaagatatgtatttgagtatatttgagtatgccttaattgctcttaaaataagtgtgtgactatatatttgagcatttttatcattttttctcatgtttttatatatattgtttttaaattttgtgatattgttatcatttcaattttaaaatacataacatatctatttctaaaaattaatttttttaatattttttttatcatttttcttatttttatttttgtaagtttagtttaaattattttaatggttaaaattattagagataacaattgaactttttttttacccaaaaaatacttttcgcagttttacattataaattaaaaataaaatatagaatttaaaaaatttatgtgacatcccatatgagttttaattgatattcttccatctatttttctaattgttaattaataaagtaaaataatcaatatcaacctcatatataattgaaagctcaaacaaaggtgaggtagcatactataaattttttattatagtgtatattttttctcatttttttacacttttagtagtataagagttatttggaaaaatctcacatagtttagaaatcattgtgggtgatatatatttaggttgtgtgactattcaatggttacatttttttttacctataatagaaggttaccagtaggtaaaaattcaatttttagaattaattaattataa

SEQ ID NO: 116184 - DNA, 2536 bp, Cannabis sativa
  modified_base (394)..(402): a, c, t, g, unknown or other
ttgtaagggcccaattttttttttttgtctatggctcattccaactcaaggttggccctagtattatccatatagattataaataatacttttgttctgttaccttcttaagtctatgaaatatatatatatattttttatgggtgattgatttgtggaataattacatgacacactattttttataaaaaaaaaaaaattacatttttacgtttaaagatttttttaatatttttacgattttcgaaaactatataaaattaacaggaaaataaaatataaacaacatcaaaacaataataaaaaaaataacatacgtataacaaaaaatcaacaacaaattaacaaaagtacaatataaaaagaccgtattttctgtaaataaaatcataannnnnnnnnaaatatttaaaattccatataatcgtatttttgtaatttttttttgttatttttgtgtatttgtgaaataatcccttgatttatttcttactcaataaaatccataatattgtatttgtaaagcatattaaaagtttccacaaaacttttaaattaaactttaaaaataattgaaccaagcatacagttatttgcaatttctttttcactagtaaaaaatgcaatctagacaaataaaatggtttaacaaaaaaaaaaaatactaacacaaacagaaaaccaactaagtaaaaaataaattaattaattaaaaacttaagtttcttccccaaactaaaaattcacattgtcccaataactaataaagagacaatacttacctgagatacacgccaaaccaaattgtgcattacatatgcatatacataaaataaatatactagtttactgtagaagaaaatcaaatcgaaagagacgtagcctagctatatacctaattggatgccttacttctcaaagcaaatgccaagttcgagagtgctctcgtggaagaaccatcgtgactgagtgctttagcagctgcatctttaaactcattcatacgctctctaacttttttaccctcttcacaacttcgatccatcaccaccttcacaactctcgcaatttcatctcctccaacaatcccattttcagcttctattggtcgcaaagcaacttctagcccatctacaagcataactgcattcattttttgctctgcaaaaagtggccacgcaatcagtggtaccccttcgaccatgctctcaagggtcgagctccaaccacagtggcttaaaaaccctcctgtcgagccatggctcagcaccagagtttgtggagcccaagattgcacaaccaaacctctccctttggttctttccaaaaacccttttggtaagacatcagtagcctcaaattggctttgaccgtctttgagatatgcagcgttaggagattcattgtctggcttcctcactacccatataaacttctgcccactcatttccaatccaaatgctaactctgtcatttgatcactagacagtgtcccaccactaccgaaagaaacgtacagaacagagcgacttggttgcttatccaaccagctcaaacaatactctgccccattcgtattagttgggccaatttgcacgattggccccactggaaagataggaaccattccttcatttgcttgcaaagcttttattgcttcggattcaatacccgcaaagctattgatgatgataccattcgccaagtaaaactctttagacgtgttcagaaatgacttgtaagtttcaattcaggattggagtctttaggaaggtcatcaaagctaactggaggaagatagatgatgtctatggcagccggtagagagttaagaattgcctttttggctggagatggagcactgtaatcatcagtagtggtgagaatgaagcatgtaatgtgaaagttgtggagaagaagaagacgtttggtgaactcaatgaagggaattaggtgactaacaccagggctggggaaaatggctatgtgggttttgttattcatggttatttagctttttgaggttgttatggttctcattacttcttcacatatttaaatatattggttgacttggctagctatagcttgatcatttttaagattgtgaaatctaattaatgaaaagaattaaagcaacgtgattcctagtcatgaaaagttttggtagtttaattcattaaaaaaaaaataaaaaaattggtggtttagctttttcaaatcattatcttcataaattacagaatgttgtgatgtatgtagtgactacattttgagaaatgctaacgtgtcactgatatgactcactgttgtagtatacctacctaaataattggtctcaggttaatttaacaaataatataaaaaaataagaaaattactttatatactctttttttaatttttttttttaaatttatagtttgggtctctaaagtagttatagtaggagtttttatacaattttttgttgcaaattaggttgcagcgttagttataataggaatttttatatagaattttgtaaaaatacaaa

SEQ ID NO: 116185 - DNA, 3853 bp, Cannabis sativa
aaaaaataaattgtataaaattattaaatgaaggtgtcaagtcttgaactcatatcacttaacaagagatatgataatgtgtgcattaactctatcctacgaaactttatttggaatacaggaggtatagatcttgggtctaagggttgccaattcacttggtaaaacaatagattcacgggtggtcttacaagagagagattggatagagccatagcgtctgatgattgggttgtgtattatccgaacgcctctgtcaccaatcatcctatttcagtttcggaacatggctttattatggtagacaccggtgatgggaggagtaaggggttcaagccctttcgcttctttaaagcctggacaactgagcctttttgtgcagaaactatcaatcaggcttggggcccgaagggaacgggaggcaaaaatctcaggggtagattaaatgataccccttgctcttcagagatggaggaggcagacatatggcgatcgggacttgatgattaaacaggctgaggagagattggcttggattcaaggtcaaccgattagttcggagttggctcgcgaagaggcaaatattcagtcccggttaattgagctttggattcaaaaaggaaagccaatggcgtcaaaagtcgagggagatttggctcaaattgggcgacaggaactctaagttcttccatgcctccaccgtgattcgaagaaggagaaataagattatggctatcaaagacagtaatggggactgggttaggcaaggaaatcgaattgctcatgtcttcaacgattttttccttcaactattcagttccagtaacccggttatgggaagcgatttctctcaattgttttgcactgaaattactccaacggataacgctatgatcaaggccattccaacaaagggggagatcatatctacggtggctgcaatgcatcccctcaaggccccagggcctgacgagctcccagattgtttctatcgccactattggaatattgtggaagaggaagtaatcaccatggtccaaaaattctttgcagagggcactcttgataggcatctcaactacacttatatatgtctgatccctaaggtggaaaacgcgagttcggtggaaaaattcagatctataagtctatgtaacttcgcttacaaaatcatttcaaagattattgcatcaagattgcggggagtgattgataaacctatctctcctcttcaatcggcctttatccccgggagatggattgccgagtcctcaattctaacccaagagctagtgcacacgatcaaagcaaagaaaggtaaaggaggattaatggccgttaaattggatatgcataaggcttacgacagaattgagtggatgtttcttgagagagtgttggaaggtaatggttttgatgaaaatgttagagatctaattatgaagtgcattacaacagtctcgtactcggttttgttgaacggtattcctcaaaaaaagtttgtccctcaacgaggacttcgccagggagaccctctttctctgtttctattcctcatgtgccatgaggtgttatcaaaattatttcttcaacaacagggtaggggtaagctcaatggcatcaagatctctcgatcggccccttccattagccatttgatgtttgcagacgatacggttcttttcgcctgggctaatagagcaaacgctatggctatcttggattgtataaaggtctatgagaagtggtcgggtcagaaatgcagccttgataaaactagtgtgctcttctccaagaacactttgtctaacgtgaggcaagatgttctaaggctgctccgagttcaagaatgcgggggtaatgaaaagtgtctcgaaaaggagaaagagggaggacttcaaattcctgagagataagatacttcagaaaatagaagggtggaaatcaaaacttctgtccttggccggtcgaactacactggtcaaatctgtggctttgagtgtccctatttattctatgtctacctgtaaaattcctctgtcaacttgccatgagatggatagcttgattagaaaattttggtggacagggggaaatgataaggacaggtacatggccttaattaagtgggattcgttatgctgccccaaggctatgggtggattggggtttagaaagatggagcatatgaattcagctttactagccaagttagcttggcaagttgcgactgatttcgacacaccgtgggtgaaatgtttcaaggctaaatactgcagaaggaattctttttggagtgtcgagagtaagggctatgattcagctacttggaaagggattcttcatgcccgtgagatcattcgaaacggtagtatcactcttgtagggagtggggcggatgtcgacatatgggagcaaccatggattccatggttgaattatgaagagttttcatgtctaatgcgtgaggtgcgagttcggtcccgattgctaagttctgttgcagatatctcctctcccaatggtgactggaatagacagcgagtcttggagatttttggtaatgatattggctctagaatttgtgaaattcagagactccctattctcaactcagatatgttgatttggaaacattctggggacggtgaattctcggtcaaaggggctcttaatgtctgttccaatatcaatgatcacgatgccggaattgatagcaagctttggaaattcatttgaaacgacaaggtccactttagactttcagttttgatttggcgtgtcttggttggttgcctccccaccaaggataagctgcattttgtggcgaaaaaaacctgtcttctgtgtgattctgcaatggaaaccagttcccatcttttctgggagtgaccattcaccagggcactttagttcggaggtcctttttctctgaatattgataatgggacatctgactcttctccgggaagaatgatggaaattctttctaacattcctcgggatctcaggtatccttttgttaatttttttggttgccttccgggctgtgtgtggaaaacaaggaatgatctcatgtttaaaggtcttcgagtgaggattgacaatgctttgaagaccctgctttctagatataaggaagccattgtggggtgtaatgcggttcatcaggttcagataagggattgtagtccgacacagctttttaatatctttgaaagcaattcaaccttcatttgtatggtagatgcatcttggaaagagggagatgcggggctggcagtggtgttagtcgaaccaagtgcagggtcttcgaagtggatggctaaaagatgcaaggcagcctcacctatggaggcagagatgcttgcgatctgctgggcattacagttggggaaggatctggggcatgactcaattacagtcctcaccgatgctcagatccttgcaaagtctcttcaggcgagacggtgtcccccggtgtggaaagttaggcctttggcgcttaacattttaaacttatgctctgcttttagttcttgtaactttttctatatttcccgttcagacaattctataggttatagtattgctaaaaaggctaggattgatggtcatgttaccagccttttgtttagggaggggtcccctggtgtgatacccaattttcttcttcaatgaactcccttcggttcttccaaaaaaaaaaaaaaaaactctttccaactatatatgtatagtactagctaactagtacatgcataatttatatagatattatgttattaaaaaaataattaatttaatatttaaaaattttaaatacattgaactaagttgaagaaaaaatata

SEQ ID NO: 116186 - DNA, 1329 bp, Cannabis sativa
ggaaaatttttaacggtcagaaaaattcaggaggcatgatttggtacatattaaaatttaggagacaaaaatcctaattagcttattttttttatattgctttgttgttgttttgatgttgttttcttgttactttcacatgatttttttgtgtttttataaaataccataaaacatatataaaaaaaactttaaatgtaaaaatataaattttttacaaatttttttttttacaaaaattaatattttatgtaattattctaatatattaaaagttataggttacagtgtaaaatcccatttaattggacctcattctcatcacttacgcgtgtaattatgtcaagaatctcactaattttgaagaaattcaaaataattaaaagtattaaaattaaaatttaaaataattaattacataaaaagaatatctgttataccttaaaatataaaaataattaatttaaaatttaatttacagtcataaattatttataaaaaaacttaaaatatatattataaaatatctgttataactatagcattaacatatatagtctcctatatataaaaacaattgtaaattaccataaataaaaaacagctccacgttaacctcaaaatttcccatatattattactattgcattgactttgtttttttgagaaataaaatatggaaacggaataagaattattccctcagaaatttgaattttgttcgatatttaattattttctaaggtatgattagattcaatcaagctattgttaataatcattttttataaatagttaaactcacatctactctattaaaaaagaaatatctaaattaattgagatgtcccctttaaaggaatgaaagttgaacataagttttacaataaaaataaataaatattatctcaaacgttgtaccgaccactctgaaatatattatggccaatatcatgattccttctcaacgtgatatttgcagtaaaatatgtatattaaatatttgtaaggttaaaataaaatttattgttggtaaggatttaaatatatattgattaatttaagaaaggttttataatttttttttaattaatcaggagatttattaattaaactcattcaaaataatagaacgcgttttagaggaacaattctccaactgaagcacacaacttgtagagaaacaagagtctattactaagtaatgagccaacttgtttgcagatcgtttaacaaaacataactcaacaaaagataaagccaaaagtaaatttataacatcttgaacaataaaaccaaactgtaaggacataaaaactttactttgga

SEQ ID NO: 116187 - DNA, 1193 bp, Cannabis sativa
ttttttatgaaaatgtgtggattggattggatcggttatttttacatgtcaatcaacatccaatccacacaagtacggatatctgcactttacggattggatcatgtagattggattggatcggctaattttatgaacatccctaccctgaactttggcgtatacctaattatatcctctaaacgtttatccaagttaggcttctattagtaaaattacacataagtccttaaatttaacaatcttaataattcgataaacttttaacaacataaaaagtttgacggatacaatttaataaaccacaataataattttttttcaatatgtaaataaaataattcatgaacaacattactacactacacactcataatgatatttttattagatcaagcttcattaaatcatagcattgctccaaatagtagataacaaatcacaaggaaaatcaccctcaagaaattaacgatcaacattgcttgggactgcctaactagatggtgagtaatctgattagcagaccgtttaacaaactataaaaacgcattactttgagatcttaataacaactgacagtcatgaacaataaactaaaagcagagaacaaaccaaaattactcctaatagcttgaacaactaaaagactatcagatccaaagtaatcttcatgaatgattgagtttcagccaacttagcacctccttgattctaagagcctcgaccaccattagttcaacactgcccgaatgaagacgagtagcagccaccaaaagtctcctggacgagtcacgaactgcaaaaccaatctcataattaccagtctccgaaaaaatggctatgtcaacattaatattgacactattatcaattagcgtgatccaacgctcaatttcatctccaacatgcaatggcttcaatgagggattactccccactcctagaactttactccactggtcaagagactgaaatgcaattgacatcacttcaccaaatgattgccccttttgcttccaaactatatcaatctaagcccgccaaatagcccaacaaaacatagctactctagccaaagtgtaatgtcctactagtttagacgtgctactgtgttttcttaattattgtgctaactgtagatgctaaaatctacaatgatcggaatgagcgtttgtgggcaccgacaacctgcg

SEQ ID NO: 116188 - DNA, 2593 bp, Cannabis sativa
  modified_base (77)..(82): a, c, t, g, unknown or other
ataaacaactcaaaaattctcattcactttctctttctctcttcatcttctacttctttcttctcatctactttatnnnnnnttatattattttataacagttttagtttattattagtaacattttcccctccaaagttatactgaaaatgtgttaaaatgttgttatggtgttggtatccaactatccatatatactgaaatgatgatgggtggcatacatttttagttattaaagtatatattatttttgcagaccacaactatgtgtattgtcgtattatttaggaagaggttgataatatgctccggctacttcatattttcaagcttgcttttggttaaagggttaatttctctaaatcctcttatatttttatctccaataccccgattgatttgcgtgagaggctctatactcaattgggaatgattgctgcagatgagaatagcttttatcttgggttaccttgtatcattggtcgcaaaaagaaagctattttaggttttcttaaggagaaaatgcataaaagaattctaagtcgggaaggaaagtttctctcaaaggcaggtcgagaggtgttgttaaaaactcttgctcaagtcttctctagctatgctatgcctatttttcttctttcattggagacctacagtgaattagagagaatgatgtataagaatttgtggggtaattctaagaagtttagaggagttagctggatgagctggaatcgtctctgtaaacataaaagcttgggtggtcttagttttagaagccttcatgattataatttatctcttgaggttggaggttgttgcttcatgagtcttctcttgttggtcgtatttataaagccaggtactactcccatgggacttttcttttagttgtgttgggtcaacacccaagttttatttggaaaagtatttttgagactcaaggtcttattacagcaggagcccgtattcgtattgactctaattttagtgtacatatcctcaattctccatggtatgtccataactcttttgtcattagttctcatttaagtcgtgctggtgcaaaagttaatcaattaatgactatggatggttttcagtgggataaggagattgttaataatttgtttgaacctagagattatgatcttatcttaagtcttcctcttagttcttctactttggaagacaattggttttggttacacttacatgagaatttaggcttttatacagttaagagcaactatcattatttgcaggctttcaaaggaaaatggtctgctggtatggagtcaaatctttagcataaactatggaaatctagaattccacccaaagtcattcattttgcttggaaggtgatcactggttgtcttccaacacgaacacaatttttttccaagcatgttccattggagttaaattgtattttacgccttagggaggaggaatttatttgttggaatagatcaagcattaacattggttttgtgtctgcttctgagtttggtgtttgggtgttggatttgttgagtcgtggccgttctgatgtgtttgaagaagctttaatggtggcctagtctatttggaaaaccaaaaacgatcttttatggaacaaaaaagtacatgttgctgctgatgttgttttctctgctcatttagtccttgatcaatagagatatctttctaattgttttgagccacagttagatccttctatttttgatagtagagtggagcattggattacaccagaactaaataaaatcaaggtgaacatggatggagatttatttgtagcacattaagcttttggtgttggctaccttgctcgtgatgaggaggattgcgtgattggggcttttaatttgtttaaatccgactgtgttcaatccattttggttaaagctattggtgttaaggaggctcgaagttcaattaaaaagaaatgatggaaggatacagttgttgcaactgattctcttgtggttgtccaagtgattgatagtactattgttatgccttgtgtttttagttctttaatttcagattgtaaagttttaattgattctcttgttaatgttcaagttgttttgtcaaatgatctgctaacaatattatttattgtcttgctcgtggtgcttgttattggtcagattatacttttgttggtaacaatgttccttttgctattaatgatgctataatggccgatttgcctattctattttaataaagttttctcttctcattcaaaaaaagtatagtattattattattcttattattattagggtaaatagtggcataaatacctaaagttttgggtttgtaagcggtattaacccaatgatttttttagtggcataagtacccaacgtttataaaactgtaatatttctcaagtttcatcagtacaaactctgttattgccttaaacatggcacatataaagctcagattctagattattgggtctagacggaatatgtagtataagttacttccaaatcttcttttaatgaattcaaaacagagtctgtactaacaaaaataaaaaaaatacagttttacaaacattgggtac

SEQ ID NO: 116189 - DNA, 3264 bp, Cannabis sativa
gcctttgctagttagggtgttgcattccctctaccattttctctgttgttgtaaatgactctatttaatttataataacagttcttttctcaaaaaaaaaaaaaagaaagaaagaaagataagggaaagatagtttccctctccaattttttctttttttttttggcccttgaaaatctgactattggtggaccttactttgggtaccgatctcatttttttttatttattttttagtttttatgacatggaacatcataattatattatccattttactatttttgaaaaggaaaaaaaaaaagaataatgtagtatccaaaacaaaatgcaaataatttgttggcatatgtggtttatatacatataccatttcaatattataaattatttaattaaaaagaaaatgatggaatatttgctatatctgcaatgaataatgtcacctataaaataaaatataattgtaactatttaagcattgaaaatacaaagtgttacttccatagtaaagttccttttgttccttttgttgatacaaaactctggacgtaaaaatttgatcacatacgctcgctagattgacaagaatgtaatgagaagtaagtaaaagtaatagagacacaataaatttatagtagttcacttctcatgacgcaagaataatggagctacgtctacttcgagtttttatttctcacaagaattacaagaaaccgactaagtgtggggctcgaatttttaaagagagagagtagagagagatgctctaaccatatggggactaagaagaatgtgaaaaataaactagagaagttcaccttctatggggaagggagtccatttaaataataataaaaaattaccaaaaatatgaagaaaaaaattcctttaggctgatcttggccattgatgatgatccaatagtaaaaattgacttttgatgaagatcgtcaatttttggagctttaatcttgtttgttggaacgttttactgaacacttttgtgacccctacagttaggttgacacacaacgaccaagttgacattctagatgctggatgagtaaaaaatatctcaaacttgtattttttttttttaggcctaagtgatgtgttgacaccacttagtcagattctacgttccggtgaagttgttcaccatttctcagagatgtcattcttttgtgaaatcaaggaagatggagagacaacctccatttggttccatccctgggttccatgaaccgagttacagcctcaaccaaggcttgatgctactgaagggataagtctggtaagtaatttcattgacaactatatggggaatgagtcgcaagtgaggaggtggtttcatgcccaggatgccaaccgtattctaaatatcactctccctaatcaaccaacgtcagattcctggttatggctaccagaaaagaatgtcaaatttaccataagatcgacctacaggactatcaaatgcctacaagatgaagtaatttccaatgtgaagtggaggcacatttggggtgcaaaaatgcacaaccgttaaaagatgctatggtggaagattcttgcagattctttattgacaaggggcaagctcatgacctttctacaagtgaatgaaattttatgcccattttgttattgaaagtggaatactccttccacatttttttgggaatgtgacttcgcaaaagccatttggtttggatgctcctggcaaattagaaccacaatggtgaatgctactaattgggacagttggttggaatggtcagcttggaggtgaatcgaccgacaaattccaacttccacttgtttcttgcaggagccgccattatttttgaaaagatctggcatgaaaggaattgtattgttcataacacgaaggctactccatttcactccttactgtagagggtgaatggtagacttacggaattgaaagaagaacacaacaccaccattaactctgctactcagaggaatccacccccactaggatgggtgttatgcaatacgaatgtggccattggtagcctccttactgctggtgcagctttgttttggaatgaggaagaggagattattaacgtatttacaaaaagactgaattacaaggaccctctggctggagaagtagccactctttgctggggtgcagaaatggcagccaatctcaaactcaaaaaagttatcttccaatgcgactcagcaagtgcagtggaggcaatgacaatttctcaatcaaaggtggccgaccttgatcacaacattcaaacccttgttcaatccatccatgattatgctaacagacttgagctttcggaggctagctggataccgagacaacttaattgtgcagctgacaatgtggcccgtagggcaattcgttctggcaagttcgagaggattaaattgtccaatttcgacagctccctgctctagtgtggggccgatggctgatttaggttttagcttagtttgattttgttgttgtttttttcttactgtttgctgttttttgttattggctttcaggttgtaattctttgatggttttgtgttagctgttagttgttctttgcgtgttggttgctcttttggaggcaacagtaataaaaaaaaaggaaaacttaaaacttcttgattatgttgatatttcaccttgttgaaagggtaaaatattaaaatgtgaattaaacctgccacaaatcgtagctcttatttactaagaaaaaattcatggagttttgaatgtggagttgtagagctctgatagcggtggtgaaaattggttatgatttttttctcttttgatagatgtatatataggatatatagaaaccattgttatgtacctaggtgaggaaatttttgcaaccatttgatctatgatgaatggttataaaagcataggtgtataagaatactttgtaagtgtactatattatactatttcttttattattttaataatacttaacaattaaaattcttttaagaaataatagaagaaaaggtggttgggatggggttggactatatattctgaaacatttaatcatggaataattatgggaaaaaaacgtgggagagatgagaaggagcttgaagaagaagatcaaatgccaataacaaccataagggagagatgagaatacaatataatatatttttttagaatttttttaaaatagaaaggaaaaagatgataataaattattttttcttatttttttttctgagaattatttt

SEQ ID NO: 116190 - DNA, 1039 bp, Cannabis sativa
agatcctggtaaaataataaccaacaagaaatacttgggtctggcggtgaaatcaagaaaatttgtgttggcaccaagtaaccaatagagagctactaaaaataacgtgcttgtcaaactatacattttgttactacctgatccctcaaccttcaaaatcctgcatcggtgctggtgtcagtaccaggtccatcgtcgtggactacttctacttccttttcattaagccgtgaagctaattagaaattgatatcgtaggaacccgcagtggtggcgactatgagatttcctctagcatcgttgaaatctgttaggttttcggttagacctggttatggcacggttggtagaaattgtgttgttaaggaaaatcacttcttggtcaaggttgttgaaatggatctctattattatgatgtaactataattcatgaggttacatcgaagaaagtaactcgagacattataaaccagttaaggaatctctatcgtgcttctcatttaggcaatttgagagttgctcatgatggtagaatgaccatctacactgccgaagaactgtcatatatttcaaaagactttataattgagttagctgagaatgacactggagaaggtgaatccagagtagctggtacagtgaaggaagtttgagttcttatctcgtgtattagtcgagtggttgcaccgggaaggatgtcagttccaagacagcaggatttcttgagatctccctgaggagtaggtcaccctcaagctccagaagtacatttttcagtactcccaaactcgctatctcaaggtggaactgcaccaaattgtacacgttccatgaacttttaggtgcatggattggccagttacggaggacaattatccagccttgccaaacttttggttgaaagatcactgggggttcaatacttcttcaattctccttcatggaagagaatcactgcttgaagtctatcacacgcccagtggggtttctgtaaggtttagtgctctagataaaactcatttcaatataataaaattt

SEQ ID NO: 116191 - DNA, 3442 bp, Cannabis sativa
  modified_base (2412)..(2412): a, c, t, g, unknown or other
agaatataatttacttggtcccaagtatattcttagatagaggttctactgtatatgtgtgagcgtaacatgtgagtctatgctatatagacataatagacgtatgggcgtaacacgtgaatcaatgccacatagacataaataggcgtgtgagcgtaacacgcaggtctatgtcaaatagacaataagtgtggtggcatcattaattatgtgatatttgtttattgtgtatattgatattttttactgtcttgctaggcttggctcacgggtactctactgtgcaggaaaggataaatctattagtatttagtcatgagtgcaggagcttggcaatggattgtacatgttcgggccatactagaccaagcgggttgggtctacctgtggatgtattttgtattcttagatttttccgcgtaggtcagcatataaaataacttgtaatattttgtgaaaagttttatgggatcccgaaacatgttgtctttttgaattgattgtaaagtttaaattattacaagttatgttttttttattccattgtaatcaaagtttaaattttcctgctcttattttctagtaatcccagtttagcgggattaggttatattactggttgttgtggcgtgtctaattattagggtattacaaaaatataacttatattttggctctaaaaaacacaccattgtaaagatcgttgcaaccttcgatacagtatataaaacttccaaaatggacacacgaataaaaagttataataaaaatatgattctaaattttccaaaacttcccagaaacggtaaaccggttgagaaacggttaaccgcttccccatgaatcggttcaccaaccagtagactggtttggcagggtaaaagtaaaaaattccaaattttgcactcaccgaaacactaccgaaacctatcgaaatcactccaaattttacatggcacacatataccatgagttcaaccattcttatgcaataaaagttaaaatcaagcccttaaatgaaaaatgttattaatgtttagacttaagctttaaaaagttccaaacccgatttttatctcaaaatcacctcaaattcaacaagtaaacattaaaactagttctatagctacccaagaacaattttatgaagtcaaaacttgtataaccactctaaatcactaaaccactatataaaaccaatcgtattaactttaaaacaaaatcaatcattacattaagctctccctcttcaatgatttactattctactactaccggagcttgaattactaggtttcgggttaaaatttaaagaaaattaaataatatgggtgaggatttcattgcaccgaaggaggagggtttcgttcaattttcagtttatattttttaaaaacttaataatatatatattaaactgataaggatacatttattaataataatattaataaaacttttattattgttagctatattattttttttagccactaagaaatatctaattttagggtatttggttaacttcgagtaccctaaaatattctggtatttctaaaatcaacttatctcaataatctcattaataataataactaaaatttttgtgatatttttgtcctccaattagatctccagggtagccgaatctaaaaatatttttatttcacaaacaacttacattatatccacatatttcagataaatctctgtaattaacaaattatacttatttatccacttaaagcaaaaatttataatttatgttacattaggttagcaggatcgtaatcatactcattactacctaattaatccataatatataataaatcataattattcataattaggattctgggatattacactttaacaatggaaagagggccaacaatgataacagtggaaacaactttattaacaacaaaaagccaaaaaagcatcatcgttgatgactatgtcctcgtaattgatacaatcttcatcacgcgtgatatttctcttgtctttgcctatgggtatgataacccatcatcccaccaaaagatgacttactacctagtacgaagtaattgaggtcatctcacctaaaatatataagttagcacgttatggtgccaatgcaaagttagtactagtgccttgctattcgaatggagagcacctaaaaaagtactactaatataagctgcttttcaacaacgacttaagccggttggtgtacttgcaaagtgcatttccatagttggtcattatacctaccagtaaagtttgataatgtaaacgcactaattacccacttttgatgtaataagggatgttttctcattttattcatcaataaaaaattgcaagttattttttatataacgacgcaacttgtatgattgttattgaattaaattncaagcctaactaaggtcaaaagtgtgtgaaatcatagtggaaaacccatgacaatgacagttcctatgtgaaagctctgattacttaataagtgatcaagaggtgaacctacttagtcacttgggggcaaccacactcatacatggactagtaagcataaaacacacccacttaaatagattttacaagtttaaaaatttcttttcaaattctaaagtgtttgtgcattgctcaatgtcttgagcaacctatatgtggtaaatggttaactacaaaaaaaatgcttacttatagtgtggtatatgtcaaacaagttgacaaataatagcatataataatagagccacatagctccaaagcaaaaaagaaggcatacatatgtgacattcatggtgcacaacaaagaaaaattgtatcaaggcaaaaacttctcatatagatacccccatatatacatacaagtcccaaacaagtgtgcaagaaattattgcaatcgtcccccacaatttcatcctgaggtaatacaagctcttcttcgagacaatgacatactcatcctaacaatcaatcaatagtcattgcttaaatgctccctactctgatccttaactcaaaaaaaaaaaaaagatcttgaagggggttgtaattgtagtttggtcccgaaggggggtcacggttgtgttttggtctcgaaggggggcacagtcgtattttggtcttgaaagggggtcacagttatagtttggtctcgaaagggggtcacaattgtattttggtctcgaaagggggtcatggttgtattttggtctcgaaaggggggtcacggtagtattttggtctcgaaggggggtcgcagttgtagtttggtcttgaaagggggtcacggttgtaatttttacttgaggggggtcatgattgtggttcagccttgagggtgacatcctaactgtttagttttgtgccctaaataaaacacatttcaatatcatcagatttactaataaagatcagaaataatattttatgttgc

SEQ ID NO: 116192 - DNA, 2102 bp, Cannabis sativa
  modified_base (2019)..(2028): a, c, t, g, unknown or other
atatatatatatatatatatataatagttcatattgaaaatattttcactgtttgataaatttatggttcagatgaagacacatacagattcgttacataacaagtactcttgtaattgcagtgacaactataaccggctgaacggttgcaaatagtactgtcattatactcgacctttattcctagcttctttagagcttcaactgccaagtatatataatttgaagatccaacaattagctaggaagttagatcaaacatatctatatactcacattattataataaccttagaccaattaatcgtgttgataaaaaaaacatataaattgagacggaaagttggaaagtttaataaaaaacgtaccttcttcatgaaccaagctttgagcagcagttcgaaatttagattcaggactgatcttccaaaggtgtagatgtaagataagatgaataaaaaagttggcaaaaactaggatagaattactcatttttttcgttatatagtcaaacacacttcttctctgctctgtatataaggaaaggaaaacagagatcaagacattccatcttaattttttccttttatgtacagcttgtcccacgcaaaaaccaaaaccagctacacataattctcgtgatgcacacttatttgacgaaacttttgataagttagactttaaattaaaaaggtaaatacaattttgcaatttttttttttgtaaaagttattaattggactttctattttattaaatggtaaaataaatcatgtattttataaaattgtacaaataagactctgatttgattttttatcgtattaaaatttaataataatctaatttagatatattatgacaaaattagttacattttctgtatttgttcgtgttagaaattgtcttaaagatggttatattaaaaaataaaattattaaaattgagcttagggacctatttctattattttgaaaaatataggatttattttgtcatttaacaaaatagagggttcaagtgataatttttgcaaaatataagatctaaaatagtatttacccttatttttttaattggttaaaattacttatcacatatatatataatttgtgtgtgtacatacataccagctcaagcaattttggagtttctattaattagaatatagaagtgtatagttaagatagtagaatagtgagtgtatggtaaggtacatgagaattcatctcaaaaccaattgacataatgagaggagtagcccgtgcatatttaatttcatcacattattaatgtagaactctctaacatgactaaagtaattttaggatttcgaacgataaaattggacattttattaaaaaaaattatcaattaaaaattcacaaatttagttttaaaataaatattacataaattctaaaatagataagttaaaatcatatgtattaagatcacaaaattttattagattttttttaagtatatatttattcttatgacatatataaaatgatgataattaaagagaagggcattttatataagagtcttatataatagcccaaactatgcactaattattactcttattaaaaattcccataaaaagtaaataattaaaacatcataaagtatagtatcatatgcatgcatggtgcacgaaaacaacagactctaaattgaattagcctcaagtggttctctaaattgaagatataaggatgtcatgatgtcccatcatgaacctggaaaggaaagatcatgtaatgaaatgtatacggtacctaccatcatccaatatataatattgtcagtgttattaaatattgaatcacatataattaatacaataattatttagaaatatagttatttagttacaagacgatacttttggaaagtactaagcattattggtgcccaataataatgctcataattaagcatagagtattgttaaacctaacaccacctaaaagtgacgtcttaaaattgtagtatatttgaatccaccnnnnnnnnnngaaactagttcataaaaacaatatgaaatatcctttaatatatgcattactcatcaagggatactgaaatcctt

SEQ ID NO: 116193 - DNA, 2372 bp, Cannabis sativa
  modified_base (2323)..(2332): a, c, t, g, unknown or other
tcctataccatctacaaatcacacttttccaaggtgataatcttgcatcattcaagtatttctactaatcttattttttccaaaatcaaaattagctaacagcctacaattggtgatcaatcaaaagtaggtaaacaaacattaggcatccttgaatgaacaatactttattatcaaaaacattcataaaacatcaataaaattcataatccaaggttcattaaaagttttaactaagataaattagttcatgctcaaaaatacaaaaatacccaaaataaaaataaagaagtatgaaaatgaaatacaaaagattaaaggagtagaagaaactatgtggatagatcctccttcttccggctcctccttcttccttcttccttcttccttcttccttgcttccttcttccttgtgcactcctcttcttcttcttcttcttcttctttttcttcattcctctaagtattttcaataatggtggctccaagaattgtgttcctcccttttcttttaagctagggtaaaatttccttttctaccttttcaaaaatgcccctccacatggttccttaattcccacttagagacttttccaactagatcagctcaaaaccacttgtctttcaccacctcagcctcatttttgccacatcaattaataaattgccacatcatctttttctacattagtttcaacaatcagccctgctacttttgctgcagtaaaattcttgcaaaacttcagcaaaaccttgcactttctctattaagtcattttctttaccaaaactcaaataaaacttaataatttccactaacaactccaaattacccaaaagaacataaaaatgcaaaataatatattttctcacaaaatggaaggaaaagaactaaatacaagtaaaatacacacaaattaagctaaaaaaatataacaaataactctttattcaagagttatcactaggcaatttgggtatatccttaaggtagacgtttgaatctcttttaggctgtcggcgtccgtgataagcccttcagtaacctctaagtatcattttgggaaaactttaatcctgggcactccgggtcccggagcaagggtaagcctttcatgtctcggatggcataatttttcgtgtatcctctggccttgatctattcctggcttcgtggagcctctttgtgatttgatgtcacagaggatacttatttaatgatttttcggagccttacttctctttttatgccacatgttttgctgtccaagagtgatgataacatttaccctccaagattccgaaactttgcaagttgtgggagcttgcaatcctcctctagatctctgaggcatatttatgacacgtggataatttttgggaacatggatgtgttctttttattgaattgtcgtcggttgaaagatcaagaattaagatgccactggtgtggcacacatgacatgtctttagtgaacccattgtcaacatgcgtgtgttggaggcacgttttccaggggaagttgtattgatgcatggaaggtcgattgacatgaccatcctttaatgcatattgggctcaagacagttaatgatgaaaaatttaagcattgagcagattttaaatgccatcttttcaactccctatccgttagatcaaattgtgctttttggagggagaatccagactatttattttgaattgcacgaacttgatcagactataaatagatccatcatacaccacttcctcttctttaccattttagacttttttaaaaaatccttgctttcaaatttcaaaccagagccctatttcccaaaaaaaaaaaaagttttgatcttgtgctcgttttggtcggtgaatgtaagaatttttggactacttaatctattcttagaacttcgttcaacccactttcagagtgtatagccattgcaccttgaatcattccacccctagtcgaaacaggatttcgacgtgcaagtcggcttcgaccgattgattgactgggtgcacaactcttaggcagatttccacaataacccctcgtcttccactcatatatcatgtaagtatcctgatgcttgttgaatcttgccatttcatatctaggatagaaatgcttagttcaaggtaagtctaggatatctaatatatatgaatggtaaactaatgtccgtagagttgtatttctagaacagggttatgttaaaattgccccgccgaaggaatgttaacgtcaccttaatagtcaaggtatggtgccctgatttttttaaatgtttgcatgttcttagtgttgggttttatgccttaaannnnnnnnnnttcaatataatcagatttaattattaataaagatcagaaa

SEQ ID NO: 116194 - DNA, 4035 bp, Cannabis sativa
  modified_base (2100)..(2106): a, c, t, g, unknown or other
ttgtacaattttagaaaatacaggatccattttgtcatttaataaaacagagggtccaattaacttttacaaaatacaaggtccaaaatagtaattacccatattttagctacatcatttatttacgggataattacataaaatatcattttttgtaaaaaaaatatatatatttttacgtgtaattttttttgttacatttttacagttttctataaaaataacacgaaaacagtaagaaaactacataaaaataacaacaaaaataacatcaaaacaacaataaaaaataatatatagataacaaaaaatcaataacaaattaataagagtacaacataaaaataccgtatattatgtaaataaaatcataaaaatcgtaaacatatttaaaattccgtacaactgtatttttataatttttttattatttttatatatttgtgaaataatcccttcatttatatctccattattagaatagcagtataagaataagatgagaacacatttattacctttctaacaaaagtatgatagtttagcggtgactatctctaatgcaaaattttaattttatgctaattttatttatttatttatttttgaaacaattgtatgctgaatttgatataaaaagtaaacaaatatgatattgttacaatatgatattgtgcttcaatgtagaatagcattttaagatgcaaatttacaatatcgattaaaaaaattgtagttaaaaaatgtgtattacacaaaatttaaatttatttttttaaaaaaaaaaatactacaatatataattacactataattttagagaaaaccgactttatctaattaatgatgataaataaaaagacagtcattgcaccacaatttgaaaaaaaaatgaaaaaaaagagaaaaaaaaaaaaatagatctagtacaattctctttccacccctttggtcattttgacaatctttttcggtcattttaacaatttttgaggaccacgtgttagttataggggccttatacctcaacctgctttaattgagttatccttaactaccttaaggattcccatcacatagatgacaccacctacatcaagctagctcagagagacaagcctttaatcccttcgagaggagttgtggtgggtttcaaatcttttacccaagcaaggaaagatgccagtaagagcgatccctaccactacaccacacaacacgtagtaaaaaaaacaaacctaaatatttgattcataattgattcgttttgggcccaggaagaactgaattagcacgtagctgttatagttatttttggtcatataattcagctacctataaaaaaaattcgttttattttctagcacaagtttcggatgtcagacatttttgtagtgtgctttttacagttttaaactcttgcagtgcgatcgcagtttgaaaaattattaaaactatatgtgcagtttgatttgaaaaaataagtaaaaaccacaccgctcacatcacaaacactaatgcaaattttgcatcataacaatattgtgctgaataatacaaaatagtacccctaagttattttttggtcaaaataaaacttaacaataatctaatataaaagtgttatgagaagaatcgtgctaaaaattatcattaagttgattataataaaaaaaaattattaaaaattagactcgaagtactgttaagtaccattgtaaaaaaatatatgatcgagtttataatttaataaaatagagagtcaattccaattttttttgcaaaatagatgatcaaaatagtatatcctttccaaaaaaaaatatttttggacaaataaaactgtatatttgattcaaattgatttgttgtgggccaaggaagaactcaattagtacgtaactgttacagtttttttttttttttgttggagatgttacagttgtttttggtgatgtaattaggtgcccataaaattttaccgttttatagcgttagtttcggaagtcatacattgaaactgtctaaaacaaaaggaataaacaaataataatctgtttatgtttttgctttagctttagagagagagagaaagagagnnnnnnngagagagagagagagagtggaatggggagcctgaccgtacctcatattgttccaactccagctgaagatgccaacgccctcaagaaagctttccatggttttatttattttcttttattcattatttgtttttcaatttgaggttttgatggagagagatactcttcttatttatctaatattttcatattttacaggatggggaactgatgagaagacactgataaggatattaggacacagaaatgcaaaccagagaagaaatattagacacacttatttccagctttataatgaatccctcattgaccgtctctcttctgaactctctggagattttggagtatgcacttctttattttttttcatttttcttttttataattttgatatgtttttggtgattttctatgttagtttgttaatactttttgattctttccttgttactgaagttgggttttgattaataatcaattgggaaaaagataataagggttcaaacagaatattagataagaatgaaaaggaattgattctggtatgaactttgttacacctattttaatttggaatggcttaaggataatatctcccaatcttttgaaacagaaagcgattattttgtgggcgtatgatccttgcgaaagggacgcgaaattagcccgggaagccttggaaaacagtaagaaaagtgttgagcatctcaaaatcatagttgagatgtcatgtgcttcatctcctgaccatttggtgggagtgaggcaagcttacacttgtctttttcattgttctttggaagaagatattgcatcaaatgtgtctccttcttcactagcaaaggtgaaaacaaaacacccctttaggccttaaatactcaatgcttatctattgtaaagtaatttgtatgtttttctatagcttctagtggctgtagtgagctcatataggtatgacagagatgaggtggattctgctattgccaattcagaagcaactaaattacatgaggctattaaaacaaagcaattagatgatgatcatgttaattggatactcagcactaggaatttctatcaactaagagaaacttttgcatgttacaaaactacttatggaaatcttattgctcaggtatggccttattaccaaaaacttttgtagtttcttgctttatgtatgaatagtattaatgtgcataacttgatttgaataggacattttgagttgtgggaatggcaagttcgagtctgtcttaaaagtgattatttgttgcttagactcacctgagaaacattttgctgaggtaatttttgtcttgtcaaaatgtgttgtactttaattttgtttcttacatgttgttacatgacattttttgagtaccgttaccaggtcattagggactccattgttgggtttggaacagatgaggactccctaactagggctattgtgagccgagccgaaatcgatcttatgaaagtgagggaagagtatcaaaatctgtacaaaaccagccttgatgatgcagttgttggtgatacttcaggagactatgaagatttcttgatgacattacttggagcaagaaactaatgtttgaacaaaagtgtttcaaatgggtgtgacaaaataaaaattgtgaaaccttaattattccaaacattataatttgatgtaattgatgaatgtttatatatgtttgttgttcctctttcatattccactttagtagtagctatttagtgaccgaatacttcttttgggcccaagtagaattcggcccagactgttccaagtccatctttggggttacttttcgaggaaattacaaaagtgaaaattacatcaaatatgggattttgtaaaaaagttacaaaaatatgacatttataggtttgtcatccttctatggcatttttttacatt

SEQ ID NO: 116195 - DNA, 2995 bp, Cannabis sativa
  modified_base (60)..(69): a, c, t, g, unknown or other
atgcaacataaaatattatttctgatctttattaataagtaaacctgattatattgaaannnnnnnnnnttagggcacaaaatccaacagtggcgtccctgaccgtcagggcgttacaagtctcttaaaggctcccatggtatttgttttattttgactaggtcttctaagtaagctgaaagtttcctagaagagcagaattacatgtgaaactctgacctaaaagagttcaatgaactgaatattcctagcgctaacttgaagtacccctgctaggcggcctctaccaaggtagcttaaaagattttgcatcatacatcacccttcaccgcctgtaagtccattttcatttcaaagtacttgatgtgggacagaggatcttccttgcccgtaaatatttttcatgtaggcatttttaacttaggcggtaggttaagggcattgatttcttgtgaaaagggtgatcccctagtctagtcaagttctaggtcggtaaattttgtgctagtgaagctttgtacaaggccactggatcaacttgacctatctatgcaccgacttgtaccacctcttgatctcctagaacattatagggcacatagttgtctatattaatcgactgatcattaggatggatgagttgtctgtcctgtccccttctacgattcagatcatctcttaaatcgtgtacgggtccaattctattaaagaatgattcactaggaggcctccttatttggctgttatcagtaattgattggttcagtatatcaggttgatgatggattttacactgaccattcacccaatataatggtctttaaagaaattagaaatagtagaatttgaataatgaataagaaaattgagaacatagatttgttatagaggttcggccacgtgacaatggtaatagccttctccccttttacttgattacttgtgaaaagtgaagcaagaagtttttgatctttctcgaatgcttacaattttgcaatgtaagagatttcttgaaaataagattttggatccctagattgtggaattgctccactatttatagggaataattacattcattaagtttccaaaaaagaaataaaagataaaaggggaaactatttactttcttttattacattatttacgcatggaaatcctataaaaattgggatttaatagataaataaaggaagaaagtatctttaaggctccctattgcatttcccctagcagcatatgcagagtggcagtaaaatcgacgctggtcgaatggtaccgtttactctacgcgacacctttaccttattcttcaaataagcaatatctggtgagttattcaatctgggtagcatactaagggagctatatactgtccaggcccgaaaatgatccatgtatcacctagggaaatgccatgtcactctatgttgattttatgataacaactgatatattaattataatcaataaagtaataataaaagttcaattaaatataatattatttatttaaaatattaaataatattattataatatttaataaataactgtaaccaatatttaaattaaatatatgataactgatcgagagaatctcttaactacttaagacagtgtgtcaaccgctttaaggaaatatctcaaccataataaatgttcataacctattttgaaaatcatatttaaattaatgtttatcttttgaattaattaattaattcaaaaattaacccaatgggacccactacaagtgataggcacctatcactgtattattacatattgttggcgctacctccttgtcttaacaggaaaggtggtgccatctttttttgtcctgataatttatgtctccccaattaaaatattatttattacaaaaataaataattattattttgcaatagcaaaataaatttccttctctctttttctttatttcgtaacatccattcctttgattgtgttatacaatggtaatctaaggaccacgaacatataatactaagatctaataattagattatttattgaatctcatcaatcgaataatcatatttagtaattcaactatttatctactataaatataatatttcactcttagtaattatagaattatatttactgacttacttacaatgtccattaatataaccaatactagtagtttgacgtccctgtattggtccataattagaattggttaaattactataataacatctttatcatttaataccactaattcactagcaaaaattaatttatatcaaatttaaatttgtgcacaatttttcactctcagaaataacactttaaggtaactaatattctatctgttaggaaagttagaattttatattgtaaatcaagttcccagccatctacattattaaactcccaaaacaaaattataaattttttatctaagaaattttaataagtgaatcaaagattttaataatgtgaacatgagttcatgatttcttaatacttaggttgatttactaattaatcatcattttaattcaatatgatatatattttaatgatggtatataattgtagattatttatcataattttttttgtaaattttataacaggtttttatttaatatatttgaaaattcaagatagcatttggtagtaaatttaaagagaaatgtaagtaaatagccctatttctaacgttagtgatagttaatgtcccttttttaaaataataaaacaaatatccttttttactttttaatacctaaaatacccttcattacataaatggtattataaaaataccttagagtaatatgaatataacatacaaatactataccttagagtaatatgagtattatgtccttttattatttttttattttttcactgataagtattcttttaattttatttttatttctttccttcatgatatataatataacatacaaatattataccttagagtaatatgaatataccacaa

SEQ ID NO: 116196 - DNA, 1668 bp, Cannabis sativa
aaatgtatataattcaaatcaatctcattaccctaaaaaataaaattaaaaaatctcaaaatattattcacggaccaaaagaataattctgaataactttgttaaaaccaccgtgataagcatgcactactttaacccgatgtcattaacattattttgataatttagaaattaaactttagttccagatcttttaaagtcaaaggagaatatgatgtggtgaatcaaatcctacagccaactctcatctattgaggaaagctcttcccttaaatataaattttgtattaaccaaatcaatttacttgttaatatctaaataattcattaactggtgatcatatgttgatgcatctaatcatatcttagatcatttattgttaatatgtaaagtgtggtatactgcacacttgcatttatatattgttttgaatttaggatataactacaattcagctataaaaggaacttccaataataagaattggaacttgacttgaactccaaatccaaaacccacatgtaagaattggataaaatgagatagactactttaacttacaactttatttagagggacactcaatccatcaaaatagtttcatgactttcttacaattttatgtccagaacttataaaagtgtgccgcatcttttaaaaattggtgttctagctaaagaaaatgagtactccaagcctctctaacagcctccaccaagtgctcactacaaatgggtattcctctgaactcataatttcatgttctaatacatatctgatgaaccacaaaatgaaaagataaattagtgggtttatgatgaaataaaaagacgttaaatcagaacataagattcttggcttgaccaactcccctacatccatattgtttcaaatttatattgaaataagacaatttattaactacgatagatgaacttagctcattttctcatttatttatctaataagacccaagaaaaaagacatacacttagtatgatagataagttttgataaaagttgaatgctcaaacagggtggaagaataattaattgactaattattaatgaaagctggaatattcaatgtttgttagcttatactccaaatcagaaaaaacaaagggtgtaataatgagttaaaattgtgttacttagggacttaagattcatgataaatgcagcttacattagatatttcacttagccgcctatatataattcacactcaagattgttagctttaaaaattttaatatgaaagtgagacttagtatggtggtactcacaagtctcttagagaagttagatttgtgaacgatgatggtatatccttcaaaagagctctcttaaacctcctaaagaaacatacaaaaaaactaacaattgctaatattgtgatacattaaataagatcattaacaacttacataaattaataaaaaaaattgctcaacttgacttataggtattaagatttgtcaaatttcttataaatttaggtatctttgttgtgaattcattgtgagatgctcacctacagaaaatcaaagatttcattatttaaacaaaatctttatataattcttgttagagattttataacaatggaagaaaatcaagatttattacaactctattgtaaaataatataaggactaaaataa

SEQ ID NO: 116197 - DNA, 3119 bp, Cannabis sativa
aaaaaaaaaaaaaaggaaaatactacacgagtaacctggtgtctaaaggttaaacatctacagaattttggggaatactagacgagtaaatcctactctagaagattttacttatgtagtagtggaatagcaaaaagatgcccaaaccataggaaacttgactggtgacataatagcaggtgaaggggacaaacgccttgcgatgatcgtattgaacctctgttgtgggaaaccgctaactgcgattagatattagctttctcagacatgttgcctcccgtaacaccctgaacaaaggagacatcgtccgtttgaaattggtatatttgctgtggctgattatggttctccatatctgtgggaactggcaagttcccaggatttggtgtttcgtttctttgctgcataaacgtgtcataaaaagacagaagatcagagacttttttctttccatcttctgggatatcaaggttactatcatcgtaatgagatgcctggttcatttgttgagaagtcgttggtatctcattgttaatctgaaggtttggcaatccaaacgcttgggaaggattggaaccatgtgtacaattcatctggtgattatttctagaagtcttgttgagaaagccaaagtaatcatgatacatgaagcactcagagtactcacagttgtataatccctgatccagcacaatttgtgcccttgacatctttttcctccatgctttcttctgggtttgacactgcttttcacattcaactccttgcttcgactctcttttctctttcagccgcttaaattgcatcttatccctccacatcttcctctcaagctcctccacacccatctctttgttgctaaagtcgtctctcagccgcctcatcaagatcctatccctccaaatcctcttctcaagcttgtctacgtccatctcttcatcgctatcatcctctttcaaccgcttcaatagcatcccatctgtccatatcctcttctcaagcttgtcgatatccattttaccgcaaccataatcccctttcagctgtttcaatagcatcctatcactaaacatcctcctctcaatcttttcgacatccatcttttctttgtttttacccgcttccatactaagctctggttcatatgctctagtatagggcctgaaataaagacactaccacagcaccataactcttacaaaattgtcattcacaaccttgttaaggaaaactagtctcgaccactctctatactgtattctctttcaattgaacttccaaaggttgctcaatgatatcctttatttttgtagtttccttcttaagaatactctgtcctgaaacactgcttggatctgagctcacaaacaacacatcagattcattgaataatgatgtctcttataccataaaaacaaacaaccaatacaacacacaaaccctaattactagactgacacagatacaacaagtaatcaaatgaataaataacaatccatacacaatagaaaggggcagaagtagagaaacgcataaagggttaaccactccaacctttatataaatatatatagatatagctcctgaaaaaagaaattcggcaaaacagaaaaattaaatatttctcaacaaacaattcatcctcgatccatattcactcgatcgttaaaagaaaactggagacagcaaaacctaccattgaagtaccaaattttgaagtgtaaagtatatgctcaaatatttatcacccaaacaataaactttaacaaaattgtgtcttttgtaaagaaaagaaaaagattcttcaatttcttcttttctttttattttttaaccaaccttttaactcaaattcgtatagcaaaaagataattatttttttagcttaaagttatagccacaacatcaacaaaaatatgaaattcaccaaaagaaaacaaaacaaagaaaccataacaacattttttttttttttttgagaataacttcataacaatacttaagtacccaagaattcaggcagaataaagatgataaaaatgattaacctaaacacatatgaaaacacttaatatgatgaaaatgataccactaaaagattacctagaatctctgaaagttcctgcagaaagctctgaaaaataacccaagttgatgatttaacaagaagaaagaaagataaataaaaaagaaatacagaacgaggtaaaaggaagaagagagagagacagagaataggaagaagaagattgaaaggggcgagcagggcagggcagtcagaaacaacagcaactttcctctctatctttttctttttctttttcaattttatacttttgggtaataataatgggtaatacgttgtccctgcttaggtggtgtttataactgaacacgtgttacaatacttccactccactgtttttttgccaatcaggcccccacaactacttactcttatattctctttattactttagcacgtgacaacacacctttttccagtatcgtgaaaatttactaaaacacaatctcacattcaaattggagtaacaaagtctgtgtttccactcaactgtttatgtgttttggttcatccaactttgagaatgaagataacatctaatatacacaataattaaccgagtaattttcagataaagggggcaatttaaggttttctgaacaaaaactatttaatatttatattttttattttttttatctgaaataattattgaagttgagaccaaccaaaacaacctttaaaagctttctgtggtactatttctgcttttattttctttattccctagaggtagagttggattttattttattttgtaagaacatgaaatatttttgtcaaataaaactagcttataaacgcgattattttagttgcatgagtaataaaaaaagagtagcatttcttattttttttttttgaaacataagtagcgtttcttaatagttatgggttttcatttgttaaaaattaatatatatttgcagttattttataaaaattatagttttagagtactataatgaaatattagtattatgtaatattataatttagagaaaaaaaaatagaaaagagatgagaattttct

SEQ ID NO: 116198 - DNA, 1880 bp, Cannabis sativa
aaacaactataaaaagtgacccaaaatgtagactaaaaatagcctaacaatatcccaggttgacaaaatgtcaacctaagcaccgagcctaatgccaggagtcaacgtgggtgttgcgtccaattttttttccaccagatgactctatttgattctcgaaacacttgtatctcaatctttagcgaaaaaggagaatattcctagaagacttctcagaacaactccttagaagtgacccaagttgacaaaaggtcaatttgggcactgggtcctaattttgacctccatatggctctgtttgtttcccaaaagtactcaaatcttaattgttgataaaaacaaataatatgcccataagaattcatctaaactgttgatggaagtggcttaggttgaagtgtcaacctgagcactggatccctgtttcagcctccaagtcgatctgtttctttcccaaaagcatttatttccctgttttagatgaagacaaagaaaatgctcgggatacttcttcaatattgtggttggaagcgtcaggcacttggtgccttggatgctcaaaactgaaagtgctccaatttcgattttgttgtctcaaatatgttcgtgacaggtctaattcatgtctcactacaaagtttgagccatttgcactaagacggacttggaaaccaaaccctagttggaaagtcaaactggacattgggcacctaagttgactttcgaggtgttgtttcgtgtatttttaacttccaaactttgaatttggattctttttgtcttcctggtacacaatactaaaagatggccagttgaaaacaatttagcgagatccaaatacccattttagagttcctgaagtcaacttgggtgtagggctaggagccctactaagtcgactgctatgactcgggactactcaactctgggatgttttctttcttgctacgagtcaaacattgatgtccatgtcactagagtcagtttatgggtaaacaacataaaatcaaaaattcaattacaacctagtcagtttaatggttgattttgattttttagtttttactgtcattcctaactaaaaggcactagtggtggtatctagtatcctacaacatattgttattaatataattaagtatcgagtctcatatattttaatataataaattttatgtaatatcgttaaccaatcacaaaacgccacctctaaatggtattagacactattagtgtcttatagcaatagtactctttttccaaaacttacaaataaaattaggacaataatgaataaattatttaaaaaatttacttagaattattattataactattaaactgtatattctaaatgtatgtcattgactcattgtcacataagttttataggaataatttataattaaaattttttttttcaacaatcaatcaaaaattgtataattaaactatagctactaagaaaatattaaattgtacatgtaatattgatatggaaataacatatcaactatataaacattttattattaactatatgggacaaaacaaaaaatttatagttcactattgtgaatagttgagagaatttttaaggggttaaaaagttaaaagggcacaatttgatagtgataatagtttgagagacaaaaatattaaataacctaattgataataataagtgtacacttacctcaaaataataataataataattacacaatatataggaaaagcacctagtagacaaccaattttatttgaggattaaattaagggtttttttctattttaagctaatattacctaaaataaacattaatacaattataaggagaaaataaacatttatgttatttattgatttcaaaaataca

SEQ ID NO: 116199 - DNA, 2216 bp, Cannabis sativa
ttaatctactctatgtattttggctttccataattaacaaacattaaatcaaaccaactaaaatccaatagctatgaaaatggacaataataatgggataaaatttgctccctatataaatttatatggagtttacaagttgagcaagatgcactcctaagacttaatatgaattccatgtgctatatctaatatccatcgattctctggacacataaccagattttgaattctcccctgaatttgaggcgtgcattaatttggtccaaaataattgacacaaaaaaagggaagataagatcaacaacaccaagcaatatatataactaatataatattttcaggaagtttctttaccatctatttttctgagaaaggacatttgttttggtcctttttatctcacataggcatttggtagctgatatagtctttaaaaatggtatgaacctagtactgattgagatatgtaataactctacaataacaaacccatgcacatttcaatctaatggtacatcgtccatacctccaaaataataactaaattattaggtataatgtctttgagatatctatgaataacctttacattttgggtctgagttgtggcaagtggcaagtggcaagtggggatgatggccaaaagtataagagcactcccaataatttattcaaaattttaatgaaaatttattaaaacaacaagaacactcagatactccaaagtagataaattaatatttaaaaaattaaaactaaaaacacactacattatatgtatgctctaaactctttcattttaaagtttactattcatgttctacaattatagaatactattcatttcttaaaacatattttattaattgtttcgaaattcaatatgtcttttatacgaggatatgtgtacatattaatattatatgttgatgctaaaaattattagaaaaataacaaaattgtacttccacttaggattctttccactaggattgatctagttaaaagattacaattttgcgagattacacaattcatcctaactctacagtggttttcttattcggttttgggccccgagcctgagagtatttcggagatgtattctagtagagtttcgagtaatatggtgtgttcgagaattcttccttttttgaatgatggtgtcttctatttataagcgggaacgcatgacgcacaatccctttcatctgtttggatggttccatgtggatttgctctctctatttcctcgcgcgctttctctctgatctgttcatatccaactcttcttttctagttatctcgagctttgcttcgctcttttgtcttatttttagtgaaacaatgccttttatattgttcattcctaccaatttattagttttgatatcattatcaaagtaaaattatttttatgccctcaaggttatttttgtcccttacaatttctcacggttctacaatttttgagctcgtgacaattaggtctgagcttggatgttatggaaccgattgtccaaaattattctcatgtgtctattagagttttttgtcctaaataaaacttattccatgtaatcttatatttattaataaaagaaatagaaatctttctagacttagtcaaatgcttactttacatgattatatgtttaaaacttaagttttattaaatgcagaacatataattattcatagttatagtgatgccatcattgtgaaaataattataattatatgcttcgaatattattaatctcacgatttattagtgcactagatttacacgaacgtgataatcaacaataacgtttattttcacttttggtaagttgtatgtctttttgaagacattaagcaatataaacttgtaatttgatgtatagggtttgaatcgggaccagaccgatattgaaaaatagaacagtcatcataatttaccgttataattaatttaaggtaatatcacttagtttatcagagatcaatttgatctgaattctgaaatgataaagctttaagctagaaagagagtttgagcgagggtgaaactgacgagaaggggagagagagatatgtgggtttatggctttttttgaaaactgcaaggatggaagtgtggtccgtttggaccaccggcgccagcaagagttggtttgtggtatggccgtcacaagtagaagagaggagaaagagatgagttaggtttt

SEQ ID NO: 116200 - DNA, 1345 bp, Cannabis sativa
cgaatcgaactattatcttgttacaatccgaagaaactatctgtaagttccacccaactttccaaaagagagcaacccctccggaatttccaatagcagaaacagccgtaccatttaaatagccaagcctatgccaaatttcctccatatctgatgagcttttcttcgtttccataagaaaaacaacatcaggattggcactccgaattaagcttcggagagaagagactgcctcgggtttgccaagcccgcgacagttccacaatagaattaacatggaggattggggggcatgtaaaggcccgcctcctcgcccacacaaaatcctgcttgccttgaacatctccctgagtaggaacttccttaccaactccatcgcaatccacgatctcctcttccgacttctccaggctagattgaatctcattcttcccatcaacatgccatgcccaagtcttctccgaagccgaccttatagagaaggagggtcaccacttattgataagcaagccttttttgtcccaatttcattaaactggggagtgaataaattaccagccttatgatccaatgtaatatccccaatctcgttcagtcgcctttttttacctggcccacttagagtagcattattttttcctgatccagttagagaatagaaagtcttacccagacttctaatgggcctagaagctttgtgggccggttgtgccttagggtccagagaggctttgaaaaccattgccaaatgtttaattttttcattatccacctcagcaatacctttccccttatccaccacaaaaggaccagtactgggaccacattccccctctgcatccgtaccatgcaaaacctccactaccatcttttgtccttatccaccatgcacgtaaggacctatcgcacaaagaccatcctgccccttgctgccaccagcttcagctacatctgaaacgtccgccgacttaggcacggtggccgcccttagctcaaaggatgattctcatgcctcctcatatcttcattttcctattttcacattgagaggggtgcaattttttttttttcaaatgacttgcacttcgtgtgccatttaaagcttaaataaaaaaaaaaattaccctatatattatttttttagtttttttttttaaatttacagtttgaatttctaaagtggatgcagtgctagttgcactagagattactatacgattttttgttgtcattcaggttacaacgccagttgcaatagtgtttctatatagaatttcgtaaaaatgcacaaaaaaaaaaaaatatatattttaaaatgtaaaaatgaaaaaaccaaaaaaaaaaa

SEQ ID NO: 116201 - DNA, 2460 bp, Cannabis sativa
aaaataatatagatataccataatctttaagtaattaatttgtttctaattttagaaaaaatatataaaaaaaattattaatttttttatgtgataaaaaataatataaataataaataatctatataagttattttactacaaattttaaaatataaatatttactaacatgtatagtcttacataatttaaggtttgtttactataattttatattttttatgtacttatatttctttttatttttccttttacgtatgacgaataataatcaattggtttccttaaaaaaaaataataataatcaattggatggtcacaaaaagacttgattcacgtgggaattgtggaaaatattccatacacttttattcattttttatttatttatttatttatttattttgacaaaaagacaatatattttgcaaagacattttagccttatcttattataactaataattacctatccccaaaaaaaatacttaattaaaattgtgttcttcaaaaaacaagaatacaaaaaaaaaaaaaaaacgtgccttagctcctagagtcaccgtttttgaccttcggcaaaataggtcttattttactcaagacaattaataaaagaatttattagcatctagcactctatttgttgtcatactactattagtgtaattaaataataaatttcatataacttgaaaaaaaaaaaatataaaaaatatattactaattaattgtaaaacgacacctatatataaaaattgttaagtaccactagtgcttaataataatgttctaagctcaaatatatttcttctttttttttacatattggcagattttgaatttgggatatccacaagtcattttgaatcttgagtttgtggagacatatataactctcgtcaaaatttgtacgttaattattttgaatcttcagcctaatattcagagtatttttagtatctattgttttcttaaaagatagtttttggaacataattacattggttttttatagtttcaggtttcgacacttaaaatgtaaaaattagtcaaaagttgaaagtacagtgtggaatcaaaactgaagaatttgtaatcgatgtttcgcgtgccagcaggtgccgtgatgcccaacactggcctcgagggtgccacagcgagatttttacaaaggaaacgagacttttcgaaaagcttcaagcattgtggcaccaccgtcatacgttgtggggacatttcttttttgcatttttggctgagaaatttgttttaaataaaagagggcttcaaaaattagaggagattgacagaaaactaagccctagaaaagaagaagaagaagattggagcgagaagttggcgatctgtgacaaccccaatctagtttccttctcattcttttttattttctttgtttatgttgatgtttagattagtcattaatttgaatatggagattatgcactcccaatttagatatttgatggatattattccatgagctaatattagtttattgttctttcttctttgattatgtgatttattcatcgttgttaatttattacatgtttgaacctgatcactttgagaatgatttatgattctaatatgaaatctaaaaagttaatgttacgattgctctaaatgaataaacattaatctagatacaaaatcaaagtatttacataacttgtgtgatttttaaattattgcttaatacgaattatttgttgaactatctcgaagatgcaatagaatatttaattagtattaattaataatcaaaacaattgaaattagttccctaatttcacatctagattgattaaaactattttatttttttgcatttttatttctaatatcaatttttattttattaaatagaaataaaagtctaatctaattagtacttagctataattacaactacttgaatgggacgcccacttgcatgtataaaaatctgcaacagaagagtcattcttgatctggaatgaaattaaggaatcaaatattgaaataaatatctctttacaaataattactgcttacacaacaagttaccaataaattatttatttattaactatttatttaaaaaataattaattattgcatttaatatttttattcaaatacaaacacaatataagcatttgaatatatgtgactaaaagtattagtcacaaaaatcataatttattttgattaaatgtgtttttagttacaatatttattatgactaaaactaaattagtgataacttgtatctaaatgctatgttttagccacaaagtaattttttgttgtggctaaaagtcattagtgacaaaaaattatataataactaaaaaatatcactaaacgtactttttttagtgaattattatttacatattgttaattccatttttggctatttaattgacaaaaatattttattatttaat

SEQ ID NO: 116202 - DNA, 1680 bp, Cannabis sativa
tacttctgtttctttattgatattaaataatccggattacattgaaatggagttttatttaaggcataaaacccaacaggtcatccatcacacagagtcttgagttaagttttaagttgttgtcaagttaaaattctcaagaatgaaatgaatcatttatgtgatgccagctagtttggtaaatcacatgctcttcctttcaaaccttcaaatagcaaagctagtaatattcttgacttgatacacattgacttgtgtggaccttctctcattgtgtcaaataatggctacagattctatatacactttgttgatgattgcactagattcacttggatctatccattaaaaaccaaaatagaagccattaatgcttttctgcattttaaaacttttgctataactcaatttgaaagaaaaataaaaggacttagaacatatagaggaggtgaataccaagccttacaagacactgcccttgcccatggaattgatttccattattcatgtcctcatacctcaactaaaattggtatagctaagagaaaacatagacatattgtagaaatgggtctcacgaccctttaagcacaagcacatatgcctctcaaatactggtgggaagccttccaaacctctgtctacctaatcaacagacttccaaccccaattcttgatcacaaatctccctttggtgttgcttgcttcccttgtataaggccttatcaggcacacaagttttagttttattctctaaaatgtgttaaccttcgatatagtgaaactcacaaggttacaaatgtctcactcccactggcaagatttacatctctagaaattttgcttttaatgagttagagtttcttttcaagcttggttttctaagcaactatcaagctgaaaaacctgtcataacacagagttcctcttggtctgtcttacgattttttcatcctctttcaggttcatcagctccaaggccaacaacttcaacaccttccttgagcatacttggagaagtaatttccacaccaccacactctcatgtatactctcattcttctagctcttttcatcacactcatattgcttcatatgagtcttcagcttcaggaagtgagaggggaactgttgcacatttgttgcacctgttgctgtacttattgtgtcgctttttcaagatgattttgttgttgaagaacctgaatcgaaacacactatagatgtttctctatctccaacacaaatcattgatcatcctcaagcctttgggcatctcatgatcactcgagccaaagttagaattttcaaacctcgagtgttcatgggacaagctacctggaattctacaacaatctcttgcacacccttgatggaacaaggccatgcaaagtgaaaacaatgctctcaaagaaaaccacacttcagttcttgtgcctccaaaaccatatcaaatttgataaacaacaaacaagtgtttcgtgaaaagctcaactcaaatggttcattttagagattcaaagctcaattagttgcaaagggctttcactaaaggccatgcattgattttggagagaattttagcccagttatcaaggcttccatagttagaattatactgaccattgttgttgctcaaggatggaaaattaaacaattggacatcaacaatgtcttttt

SEQ ID NO: 116203 - DNA, 1223 bp, Cannabis sativa
  modified_base (1164)..(1170): a, c, t, g, unknown or other
agaaatgtaggaaaaaaataaagcatatcagatcaaatgttgtgaaagctaaagagttggaaatgaggaaatgatgttaataaaaacataataacaggaaaagtgtctgagaaaatgggatgtttttcttttaaaagagagaaagagaatgagtaagaaatgtaaaaggaaaatgcatggatcccaatggagttagattgtacaagtgacattcttcacaagcaccactaaattcggttacttccctttggtctcgcgccatttcgtggctactaaccaagtcttctctctctcattttatttaacggtattgtcatataataataaactcgtatattatattacataaataattttgcttgcttttgtgtgatgtccagtgttgtgtagccgagtctgtcgttgggatcaaatcacaattttttctcttttttttgattcattgggttgtatagcctttattcacacacatagcttgttgcctaatttagaggcaaaagtatgttaattgtagtacagtttttcaaagctttattttatgagtaataattgtcacacattaaaacttttgtataaataagattacaattaatcttaattatactattaaatttaagaattaatacatggttcctattttaagctactgccaattttgtttgtttagacaaaaattaaatacacatgagtaaaaaaatgtgtaataacgtttttaacaacattgctcttattttattggagtataacatctatctaaaaatacacttgataccaaacaaattatattgagatgttataactaaatagagatatatacacagaaaaaaaaaaatcaaaatacaaaaagtatcaaatataacaacaataacaataaataattcttaatcctttatcataataattctccgtccaaaagttttgattgtatgggagattgtggaagtaatttttttagttcttggaaaacttcttcacatttctcggcccactcaaatttcttgtttccttgggggatattgaaaaaagtaacacacttatctcttaattttgacacgaacctgctgaggtctactatccgaccagtcaaactttgcacttcattaatcttcgttggtgactttgttgggttttgtgccctaaataaaactatatttcaatgtaatnnnnnnnattcaattatcaataaagaaacagatttattttcattacttgtttaatgtgtt

SEQ ID NO: 116204 - DNA, 4184 bp, Cannabis sativa
  modified_base (1160)..(1160): a, c, t, g, unknown or other
tcttacaaacatcaattgaacgataatggtggaaaagtaagggtgagggcttgagagttcggcttcaacaaaaaaaaaaaattgtgggaagaaaagaaagagaaaaatggttatggagacttggagaaatggaagaagcgagaaaaaaaaatgagaggaaaaaaaaaggtatggtgaaaccattaatatagtatttttgtaattataatactttttgaaacttaaaaaggtaaaaatagttttgtaaaaatatttaaaagattaataagcattaaaaatgtaaaaaaaagtagccaaatttgtcacctagtgtaaaaattccttaaaaatttctcctgaactattgagattatcgaatttaagaatttttgtccaatttcattcaattgtactaatttagtgattgtttatgtactaaatcatgctccccagacttaatatctaccaaattacgcctctcgaactttgacatgtgacaaatcatgctccctgaactttcattcatgttagactttctttactaaaattgaacaaaagtctttaaatctaacaatctcaatagttcagggagatttttaacgaccagaaaagttcagggagcatgatttggtacatgtcaaagttcgggaggtaaaaatcctaattagccttaaaattattataactgcaacatataaattgaactccaaaaacctctctagacatataaaaatgagagagaagagagaggaaaaaaaataagtaaagaagttatcgaagtttttatttatttattattattttgttattaagagtaagtaaattttggttaaatagtttgttacattatttatttattaaaaaatatataaaaattttaaatattaaatattaattttgatacaatttaattactaaattattattaaataaattttttataaatatgacaacaatcttccatttagcataactactacaagtgagatacgacgataataataattttggaatgagtgttttctatatagatttattaatttttttttagatttttattttgtgtgaggattctttatttttattattttttttattataataattgaatatatctttttgtttgtttttttttttgataaaaaatgatatgatcattttttatattattattattattnttattattattattattgttttatgtaaaaaaatagaataagtactcttattattaaaaatttatattaaaattgattaaacatattagaaaggatattaattaataataatatgagatacagtaatgaataaattttaaatatagtggtcactacaaagtgagatatggtgataataattattttaaaattatagatttattgtttttttttttttgttttaaatctctattttgtgtgaagattgttcagtttttaatttttcttcactataatgtacatttaaatatatttttttgcctgttatttttatataaaaaattgtatgataaactcttttttaaagaattcttgagagtttttttatatgaatttattatttttcttaataaatatatatttttaaattatacataaaattaaatttgaaattatttgatatgattttattgtttaattaatattcttacatataatttaaatttgtataaacaacccgtgacgtgtttacttgtttacttgtttccttaagcacagatccagacagaatcccatataaataaatatattcctatgatgccttgccatgtgcactaccctcacctcaccaatctttgacccgcgaaaacaagagacagacaccatttaattgtttattagcagcagtctctgtagtagaggttctaattaagcctcaatctcgaggtgaattctgtttgcgcaaatttcgtatttacttaaccacttgtttttttctggcctcaaggctcaacctatgatcaaaaagtcaaactatggaaatccaaagcagccccaaatccagagcacttagcaaaagaaagagtagtagtattgcacgtccctcaaccaaactcatcatttccatattttcagttatcacaattctcatactactacgaatgcaatcttcttccactttcttttcttctaatgacaaagttctaatgtcgaagctccgagactcggtcacattccatccactaaaggatctaaggtatgtcgaaaccgccaccatagggaacacttggttcatgagctccttaaacgacactcaagaggagggcgaagcagaacacctgtttttcccttcagagtcatcaaagggaagacttctgtgtatcaaaggaaacgacagaagagatggtggtaagaattcatacgccctggcatggccagaaagtcttcctgactcggcaacactcttaaagggtttgacttttgtctctgatacatactacaactatgaaaatctctggcatggagtgaatgcaatagctccttttgttgggtggtccttaaagaatgactgctcaaagccaacgagatggattttgttccactggggtgagtttaggcacagaatgggcagttgggttcataacataactcaggccaatttcggagaagttgtagttgaaagctttccagagggaggaggaggagatggggtgcattgctttgagaaggctgttgtgatgagacacaatgctggtaaaatgggtaaaaagaggaagcttgaggtgtttgacttattgagatgcaaagccagatcgttttgtggtgttagccatggtggcagggggttagaggttaacagaataggacagcctgtcgtacggttgactttgttgatgagaaaaggttcgagatcattcaaggatccaacggctgtgattactgtttttgttagggagtgtgccatggttcagggatgcgttttggaggtgtcccaatctgatgaattgagcttctgtgatcaggtatttgtttccttctatgttggtgggttgggtcttaacttgtacattttcttcagagtagcatatttgttttgatggattcaggtgaaagtgatgagcaataccgacattgtggtgtcaccacatggagcacagttgacaaacatgctgttcatggacaggaacagcagtgtaatggagttcttccccaagggatggttagagatggctggtgttggacagtacgcgcatcactggatggcagacatgtccgggatgaaccacgcaggctcctggtgggattcattgggtgaaaaggaatgccctcatccaaataacaatcgagagtgcttcaaattttacaaagaaggccttgttggtcacaacgagacctacttcgctgactgggcaagaactgtcctcacccaagccagggctcgaaagctagaaatgaataaagttaagagttcgcacttaacttccaatatttgtacttgctagttttgttgttttcttaccttcattttatacccctacctattctcaacccaagacttcagaaatccataattccaatgggaatgtaaattaaaaatattcagtattaatgataagctaagctctccagcatagtaagttttttttttcttcaaattattgaaaactagtaaagcgcggttttaaaataattaaaaattatatgtttaaaataattatatttttttaataacaatatacaaaaatataatttgatgcacacatgtattaaatcacatcacaatatatttttttttccatcttttcatactttttctatttgttaaataaaaataaaaatgagaacctatacatactataatctttttatttctcatataattagtaccaaaaaaaaaatcaagacaacaataatattatattaatataatagtcttcaattttatacatatcacttgctttctggaagaaaacatgaaacttttttttaaaaaaatagaatgcaatgatatattattgctttcatttatatatttttatattttatcaacggatctaatactataaaataattatacaaaaaaaactaaattatgaattatgctgaaaaaaaaaataaacattctcactaattgttaaatttaaaagggaaattttactatttgcccttaataatataccccatatcaaaatttataccctaaactaatttgtacaaattaatgcctataattttaaaagatacccaaattaccctttaattaaa

SEQ ID NO: 116205 - DNA, 1714 bp, Cannabis sativa
ccatatgatataaaaatgaggagattttttttaattagatataaaaattaagcataaaaactcaaaattttctaattttactcattcatgggtacccatatagcgtgtagtcatgcccactcttgaataaaggtgattgaaattacttatagcgtgtgaattatgcatgtatattgtattcttcatataacaaatcaattcaattctaatttacatttgaaataatctcaaattacatataaaaaaaaattatgaaatgtctctataaccacaatattttaaaaaaatagcttataagaaaaatatttttttattaactttaaggtcttttgaaaagattcaatgaggctttttttttagttttttttctcaaacacgttgatttcatgtttttgatgattttgttcttattcttgttgtggttgaagtatgggaggattgatctcaaatttgtcattgttattgtttaatcggattctgagaagagtgcgcgtaaagagaggagtgcttttaattaaattttacattgtcaccctttgatttctattaacaaaaaataatataagaaaagtgcgttcacggaacatgttctttgaataattaatgatttttttaatagtaaaatatatttaaaaaaaagaatgatttttttattagaaaaaataaaaaataagaattaagatgctattaaacagaacgttagacaatttatctatatgccattaaatccacatgttacatttcattatcagaaactacttatagtttgaaaatgatttttttttttcaatgaatataaaaataaaatttaattacaaatacattaatagtcatattttgacaattcattttattttctttatttgtttaataggaatgtttaatttttaaaatattttgccactttctttttggaatgcataagctatgtggcttggagctctactgaagttctctcaatttcagaatatctcagagtcaaaaaaaaaatgaattaaggctcttattggatgtcaatcacttccatgtcttcttgagtgtttgactagtacgtgtaaataatttttcttactatttgttatgttcttatatggtgaagtaaaaacaaaaaatttccatatgttgctctgatgtgtcaaattggtgagaatgcttcatattgcaatgtaagttacttactagctattgtgcactatataatagagtttttgtttcttatccttgtctttgtgctagatgagtgggtgtaaggaaggagttagctcttgcaatagcatggcttgtaagggccatgaagttgatgttattcacttctcaaacggaaatgccatacctagatttgaatattcacacaacaacatacaatttaccaatacatttggatattgatatgtaattaaattaaattaaatcttatttgtttccccttctttgagaatatttggtcattatctctatgcttggaactcacagtgaagatacatagatggaaagggtacttcaggtatttgaactattagtctatgcaaattgcaatattttcctttgtttttaagaaaaaatacgttgcttggtgctaacaaaagggcttatgctttataaaaaagaataattacataaggcaccattttttgtaaaataattacatttttacgtttaaagaatatttttttacatttatacagttttccaaaaaataacaccaaaacaacat

SEQ ID NO: 116206 - DNA, 2030 bp, Cannabis sativa
  modified_base (27)..(39): a, c, t, g, unknown or other
aggatgttaatgaaacatacatggtannnnnnnnnnnnnctggtaaaatatttccaacaaggccttctttgatgcccattttgtcatttgaattgtgggtgtccaattgcatggctcttcttttcctttccttttttaagtgacagatttgaaccgagagttccatcttgatgcggtgtaaatcaaaggagacacaaaagttgcccatgttgagggaacaggccactgaggggactcaggtgcaagttcctgcaagggaacttcactcgaatgtcaccattggaaatatcatggaggcaactccgtccgggacatccaagaagttcaaagggaaagagaaggccaaaatttatcatcctgctcagaaattcaactactccatccaagatatggatcagaaggaaatctacttccgttcatacgggatgctagaaacgtatgccactgaagctggattactcaacgtaccgggacagatgtggcataggttggctgtcctggaggagtcaacatccatgagcatggatgggttcagtgcctagagttgttcccatatctcaagtggagcacatctccgtctaagagcttactttacggagtttattgcacgcattgggattgccccatttcaactgagacctcagacttataagattttagccgaatggtatattttttgtaaaattaataagtttgatgtgctctctctggaaaagattttcttcttctacggtgtgaagcctcagccgataagaaccaactgtaagaagttgggattctacaaactcgagaggtactctagcgctcactaccctactagtctcaccaaatgttccctcgacctcagggagtattggttcttctctactggttttcaagtgaagagggtatctactctccaactcagcttctaaatcctaggtaaaaactttttcacttgttgttttgatatgtttctctttgaaactcttttctaacttgattcaaaggctgattgggattccatattaatttgttgctattgacagagtttgtgcctcggagtgctgagattgaggaattggctaaaaaggcagaccattataaggccttcacgaagcccagttaaagattgaaggcctggtcaccaaacagctggttcgcgagcacgaacttattgcaaatttccaaagcatcgacagtgttagtaacaggggctaaagttaggcttcaaaagaggccaaggaggtgatagcttgtgacttatccaaaatcatcatggaggctgctaaagaggaccagcttctggaagccacttggatgctccatcacccaaaccctttgatagaggttcaggagatccaggagaggtatgctacaatgtacccggaagagggtgctctaggagccaacacttttagaagaggtaacagaccctttcgcgtactccgtacccccaacctccatcgcatatcctagacggatcaagggggattcgacaattacttcttgaatttagaccacactaagtacaccatgattgatttcatagatagggtagatgagatcgttaggagtcctagcaatccaaagttatctccgaacactattaaggttgatccctttgcacccatgtctttgttggtttttatagtccatatcaaagttataaaaacggaagtagaattttgaatttttttttttataaaatatgaaaaataagcccaaggatctcaaaatagtgtctatagattaaatctaaactactgaaagaaaatcaattacctcttgaagcctatcagagtatccttgtttctttctgtataacaattgaacatccaatctaagaactttgttgaataatccacacattgatcatttaagccggtctcaatactcaagaatagagtgggctattagatcttatttagatgaataaatttaggtattacagtgtgtactcatctcatgactgtaatgagattagggttttgatctcacacacaccatgaatggtgtgggcatgtgagacaagagagagagagagagag

SEQ ID NO: 116207 - DNA, 1025 bp, Cannabis sativa
aaaaaaaaaaaaaaaggagaaagaaacaagtgaaaatatggccaaacaaaagtgggtattacaaccaacaaactttagcaatacacatagaagaaagtaactttattagagcaaaagtgccaaatgaggcataattctacattttggtattttcccagtttaagattataactccttgatctaatagctagtactattaacataaagaaatttgcactttttgttgtaatattattgtttaaaattaatcctagtgcaaatgtacactgtatagaacaagtacctagatgtcatctccacaaggactatttttatgcttctaattgtcaatataaactctagcaaaataattaaagtgtacaaaacttaaataaaaatcgattgtgatctaattatagaaaattaataactaattaaaaaaaaaatacaaggaataaactggaaaaatagtagcacaatattttagatatgagatattaatctacaataattatctctctaatattcaaactgtggtagtgatactagattaatgctgcagcaactgaacatttaatagtcaaaaattctaattcattttataggattttgtcgaagtcacttcaaccctttgtttaaacaatatatgtctaatgtaatttaacttcaaggataaaaattttagcatcaattctataggattatggatgttaataatatatgtttatatcattaaaatattgaaattaaaactttaagcatggataactaaaattgtgtgtcaattaattctaccttttacaaaatttaaaattaactccattatttactaatggtgattaatcaaatatcaaagagtaaccaagataaatatttgaataaacaaaccttatattgcattaccattaacatcgaattctcaagatattcaaataactaccttctctctcttcggtagctctgataaatccttagtctgtcaactgtggccaaggcgggccctaggcataggcgggctaggcccgtgcctagggcccatactttcc

SEQ ID NO: 116208 - DNA, 1893 bp, Cannabis sativa
gatgatttagcaaaaagtgctagggtgtctaaacaattagaaattttgtttcaaggggaaggtgatccccctgtgatccctacctatttacctgattaatgaacatctgttcttcaaaaaaaaaaaaaaaattatatatatagacatttttggaaatttctttgatcaatatgttttttttttctggcccccatacatttatctatagttaagaactttcaagaaagacaaaattatcagtttggatgtattaaggtcattgttgataccgccttgttttataatggtaagagtcatatagtgttggtttggttgcctgtgatgactatgaattacttattaatggatattgaagttcgtgaagcctttagttaaatcaaaagaccgcaattggcattaaaacagatattgtttgattgtggtgactttctattaccatgatctccactttttgtcatgtgattaatcattgtaagcaatttctttgtgatttaagaaatatgcatatcttctttattaaacgatgagttaataatatgggtaagaatttctgtaatattttttaattgtaaggatgttctacttgatttgttaatttttataatatatatattatgtgtaaataatatgtataatttaagtatatcatttttaaatccttttgagtggctaaacaaatgtacttactaatttattattatccaatatatatcttatcttctcggcatgcttacggataaaagagtatcttgaaaaaaaacaaaaataaataaatatataaaaaggaactactttgcaactttcatttcgattatattttcacttaattattcatttccacaacaattaatgacagtgatatttttggctctctcatagagtttttaacaagcttgctatagataattgcgtgattaattctgattcagaagagaattgcaaaaaaatgctattggtacttagcattttaattagtatcatactgttataacatcgagtctggtataagaaaataatttttaaaaaatattactaacaaatagtaaaacatcacttatacaaaattgttgggtaccattgatgctaaattacaatatttttaacaatattattatatatgtagagataagagatgtgtttcacactagaaatgacatcaatatagaaaaagaaatctgaattattatttctaaaaacgcaaataattaaacctgccttcgtgatgaagttagttaatagttatactttacagaaaggaaaaccaaaaagtgaacatatataagtgctcgtattcttctggaagatgtgaatacatgtacttaattaatttataagactacattaatcatcatcatgagttatttttttcttttttgttttcttactttctaatattttttttaaaaaaaaaaatcgaaagaaaatgatcagctagcttattaatattattaataaattagaactagtaaacgatatatatgtcattcgtataatgttttttatttaaactagtagcgctaaaatttatctttctatcttgcttttgggtagatagaatttaattaggattcaccgcccggaaaaagtcccttatattatatacatacatactgatacgtagttgctttaaagcgagacctagctcacataaacatttggatatatatattaataatatacatatatatatatatattcaaaaagataatgaaacagtttctatttgggttgtttcgattgggtggagggaccaagttggaacttcagtttttgtgtggtagatgacgataaatgaagggaaatttgattttttatacttaaaagttttcaaaattttttttttgaaccaatacattttacactatgaaaaatatgcctactttacctaaatcc

SEQ ID NO: 116209 - DNA, 2525 bp, Cannabis sativa
aatctatatattatattattataaataatataacaccctatggtgtcaattatttgaaaataaccgaccatatgtcgtcgattattttcaaataactgacgccatagagggttttttactctaattaagaatcgcctctaaatgcttttaataaatagctatgatttttataaaataactgcctctatatgtcaattttcaacaggcgagtattttacaccctttagcttccctttttataaaagttgtggaaaaaacaacctctaaaaggttgttttgtagtagtgttatttgatcattgttcccctataaatagttattttaccatcaatggttgtgactcgttcttgctcttcttccccaatcgtaaaaaaaccctagaaagtttctcaaaaaacttggaaaaggtcggcaatgggtaaggaaggtattgttaagaagaaaaattataaatatgatccccctagccctgcatcccccatttcttccaaaagaaagttagtaagtgattctctggaaatgagtaaatccaaatgttctaaaggaatcattgaagattcagattctgattttgagcaagaagatgaatatttcgagttagagaaggttacaaaggtaattatctttattttttttatttttttgcgggtgggttggtaatagtcttttttttttttatcatcaagttgttgtttatgtattttgttgtgtgtgtgttttcaatctgttttttacatatgtggaatatgttattttattgttgttttagggtttttattcgtggattttccttgacagtttttaatttttaattttgttaatcactctcagatttttaataaatttaatgttttattgtttagtatttactatttagtgtttagtattatgtacttgatttttatgctttttacggttgttttgttgttgatttgtgtttgtttttaaaaaattataggataagggtaaattttctaagtcaaaagtttcctctgatgatgatattgaagtgcccactagcaaaagaatgattgaggtatagtatttattttttttttctttgtgatttttgttaattaattttttttgttgttttgttgttgttttatagttatttttttattttcattgttctaggattggagtcctaaatatttgtatttcgatcattcgattattatcccaattattatccacttgacgtggcatgtccgcctgatgtggcatgttcacatagtcaaaatagaagacacatggaatacaacatgtccacatagtcaaaacagaagacacatagaatacaacagattcgtccttccttcatataactcaatgtgtggcatcttaaagttacccggaagtagggtctccatgatcctcctcacacaaggttctgggtcctcatctttagaatctgagagggccccactctgctttttgactagcttggttagagctgctatatgctcctctaaccttttttgtgttgcttttgagaagatcacgtcctcgcattttattacttaggtggtttcagaggtcacctccacatggcctcgatttttcacttttgtacctttgtacttggcgtccaatctagtcaaaggtctacggtggactagctgtcctcagaatgcccatcagtcgtccttccgtcctggttgacagaatcactaggctggtttttccaccctttggacttaaatactttcgtactttgcccttttggcacgattttgcgtttaggagcagaagggcgtccatgctcgaaaacactagtggccttttgcgtccttaagggttggccgggcgaattcgtgtctttccaaatatgtttaggagcagacttttgtggaggctgacctaccttgcctttacctttatccttgcgaggattcgaggtttcggtctcagtttgcccaagagcacgttctttagccattatttccactaatgggtcatcatcgaactttgcctagtcctcaaacttattttggagacgctccatcatcctcttcattttctcagtgagtttactctgttatgttaacaaacaccactatgaaaaaaattaaaaaaaaatatttcaacatgtgttttcaggtacaaaagttgactaaaaaattgtaacaagaggttgatagtaaaacacaattaggtaattttaagatatattattattattgtgctatgcatataagatataactagataattatattatcaaacacatatatttcttaatatttctcattcattatccttaaaaaattacatttctcatgtaaattgttttaatagaaatacaatttcattaaatcaaatcattcaaaaaaaaaaatatcacataaactacttaaaattaatatacatatatataaatatatatttttctgtataattaattggtgagaagtaaaatagccttaaattgagaaactaaattagttaaggctaattagcgatttttccccccgaactttgacatatactaaatcatatcccctaaacttttttggccgtta

SEQ ID NO: 116210 - DNA, 2243 bp, Cannabis sativa
  modified_base (1514)..(1544): a, c, t, g, unknown or other
  modified_base (1695)..(1703): a, c, t, g, unknown or other
tcatggagcttgaacaggccaaggttgataactgcgagttgcgcactgccaaccagactctcattatcgaactcgcggaggccaaggctcaacttgaaggcttgaaaagaaaaaataaactgttggaagacaaccatgcctagctaacctgtctcatgtgggatatgaggataattggtgacctccacaaggaaaccacagagagggtgcaaagagcgcactcctgtcaattatccaatagtacccagatatctgaaaattaagtagttggctgaggtgggaatcttctccatgcccacgaccctgcaattttttcctaccttgtctttctttctttattttgcgagcacaattatgcccttactgcggggctgtttgtaatgactttatatctttgcattattttttttacgaaatttgggtcaaaacacatttcatatcgatgtttacgctaattttttaatttcaagaagaaattcaagcgtattttttccttaagaaatttggttgaatctcgtttcttgtttaatatgcatggcacactaagaggcctgacaaagtaaacgaatacaatgcactgttgatttttggggtatacacagctaggcatgcaaccccccaaatgagctgagaagtttggacgtctccaaaatcttggtcatttttctaaaacataacttgtggcaacaatgcatcacccaggtcacttagggggagattcgggcgtgtgtcaaagttctagttgggctcctttttcgggatatagggccagattcgtgctgacaccttaatcacaccctctccacctagagtcatctgtgacagcctttcctcaaacgagagtaagaaagcatcaaaaaatgcaaaaatcttctaggaatgcttctttctccactccctatgggaaatttttaaatcacagcaaatggacgtaagcgaatgcaacaatcgttcaaacaatgttctctttaaggataaagttgaaaatgtattgcctgcacttttcatgagggtctagttgaattatacagtaaacttttggcttccataaaggaaggctgaagtcatactaaaattcaagcaagggcttcactctcgaaactgaaggtgaaaaccaagttgggcgtacaataggcttcaagtagttcctccttctggaagggagggttgaagacctgttaaatcccaagtggtattttcaaccaaatgcttgagaaatgtctaccagcgagatgaaaattgcgcggcgggagcacacgcacttgtgagaaccatgttgaattatgcggcgaactttgacttataactaaagctcattattagaaagagttgtattttcatttgatacttatgttaatttatttattttaacatatatttatttaattaaaattactaatttagataactgtaaatataaatttaatttaatatttataaaattaggatgatctaaaaaataaaatttatttttcatctttagtattatatttccaataaatattatgaaaatnnnnnnnnnnnnnnnnnnnnnnnnnnnnnnnaaattaattttcaactcaaatttcattttttataaacatatatatatataatagaattcgaaatccaatgtagtataaagtaatacaattttttcgaaattcatcataaaataaaataaaataaaactgaaaaattattctaatttatgtnnnnnnnnnattaaataaattaattttcaacataaatataattttcttatttaattaaatttttaagaaaaatatcaaatatttaagtgtctttaataaaatcaacttaaatattaattttcttatttataataatgtattgaaaattaaatattattaatttaaaatattgatattcaggtttaaatatttaaattaatattttattaagatactagggtttgaaaattaaaaaaattcgaaatttgtggaaagatgcacctgctgcccagaaaagttgctggcagccattccgcgcgcgcacgagaggactgcagcctccttgaccgaagaatctcggtcagctgtagggtgatgggcgagcttcctgggcatgcatcgtgtttgaaggttgggcgagacgcgactttagatagggatttttttcccattccgcgtgcataaagggagttttgtttgagtccctggtgcgattgagcaccatctcgacaccatgttcactcaatttttaaacattcatatctttttcaatttttatcgtaatcgagt

SEQ ID NO: 116211 - DNA, 2389 bp, Cannabis sativa
  modified_base (44)..(63): a, c, t, g, unknown or other
taaatgttatttctgatctatactaataagtaaatctgattatnnnnnnnnnnnnnnnnnnnngggcataaaacccaacaatcactaataagttaagtaggcctttgttgactaagggagagggccctattgactctggtgtgaaatggtttcatacgaaggtgctaccttctacttcgggatctaagacgaaaaagagaaaggctactaggagtgtttctcccattgttactctggtgcacgatcattccctctcttcacctaattctaaggtgttggccccttcgttgggcaagagcgagattgctcccttctctttcgggaaggaatcccccaagaaggagtcatttggttccaggaagttgaggagcaggaagtcggctaatgacaaaagcaagattgttactgtgaaggctaattacgacaatggcaacacagattcaggtaccaactccactatttcttcttctgagtttgggaatctacttgtcgaagttatagttgatcaaaattttcaaatggatgaggaggcggcccttagcaagccccctagtcccaatgaggtttctttcttggaattgtcgcggtgttgctagaccgacggcaatccaaactctaaaggcttgggtttggaagttgaagttggattgtttattttttatggaaactaagataggggtgagtcggatgagtaatatctgtaagtctttacattttgagaatagttactatattccttctactaggcgtgtggggggtatatgccttctatggaataaaggtgtggatattgtggttactgaaactctcgaatcttgttttgtgtgtactgtcaaagactatgctatctcgaaaacatggtatttggtggctatttatagaacaccctatgatgactataaaagggcgttttgggatcatttggtagatattattaattctcttgatggttcttgggcacttatgggagatcttaatgttcttctctctaaggaggacaagtcgggtgagtgtgttttttttgtatcgggatggtttcactcttcaaaagtttcttctatccacttggggaattgacttgggttttagaggttgcaagtatacttggctaaacaaacgtagtaatggccacttggttaaggagaggttggatcgggttattgtggacactaactagctggctgattgttcctcggggggagttcataatttcctgataacttgctctgatcatggcccgattttatttgattttgttgtgtttaaatcaaaaggctttcgtcctttttgattttttgaggcttggttcgatgactcttctagctgggatgttatcaaagaagcttggacacgaagtgctttgtctgaggaaccgtggtgtttggggaaaataatcaattatacacagcatgcgctccgttggtggagtaaaaatctttatggggagtgtgacaatcgaattaaggagttagagcttgagctccaaactcttcaatccaaagaagttcatgatgttaatgagctggccgaggcaactattttacaaattaaagactgggtgaaatctagaaccgaaaggagtctatgtggaaacaacagtcgagggagctgtggctcttacaaggtgacaggaactcttcgttctttcacgcctccaccatggtgagaaggaagaggaatcacatttggaatcttaagaactctaatggctttctttgttcgaatgagagggagattggagccatccttaatgactacttcattaatctgctctactctagacggtgttgtctcttatgagggtctggatactttgattaatccatccatatctcctactgtgaatagtttacttacggttgtgcttgacaaggaagagatttattctcatgtttttcaaatgcaccctctcaaagagtcgggtcccgatggctttttggggtgcttttatcaaaagtgctggagtttggttggggacgatgtggtctaatgaatccaacggttttttacctcaaaagatttggagcctgggcttaatcactctttcatttgcctcatacccaagggggttaatccaaatgtattgatcgatttcagcctattgctttgtgtaatttcgtgtacaaagttattgcctgtgtcattgcccaacgtttgagagtggttcttgaccacatccttgcccccatacaatcggatgtccttcctggaagatgggttgcggagtcatctatccttacttaggagattgtgaatgttattaagaagaagaaagggaaaggcggcttgttggcaataaaaactgacatgaacaaggcttatgatcgtcttgagtgggggtttctaaaggctgtgatggagaggttcgggtgttgggttttatgcccta

SEQ ID NO: 116212 - DNA, 4476 bp, Cannabis sativa
tccttccgtttgacttcttcaacttaagatcttcggccaccatgggagctcaacaacagacttgcgacttctaaatcctccttggcaacgatgcaaagggcagtgacggttggtcggggctgcatggacggtagatggggaacgacaacaatctattctccaccatcaggattttgccttgaaagaggtatcgaagttttatcttctaagttctctccaccaacttggttttgctttaaaggaggttctcaatggagatatagcagagaaggtttctgatattaaacttgaagaagccaattttagtaggatttatcaaaaacaaagtgaattggtgtaacaaaagatgatggagaattggcttcaaaagtcttaataatgagaaacattcttatattccattatatcgagaatttgtttaggaatttcaagatcccctcgcaagaaaaggactcttgatgaacatgttgatgttatgccctgaatttcgaagttgcatattactgctattgatttgtggtgggtggctagaaatgaaaatatcatcaatgacgcaaagttcgtaagggaaattttgtggaagagggaggaccatatatgcaatgcatacatcgcttgcaaggaaaaaaaaagaacaagaagctctgactaccttgctttagtccatgtcattcatactgccctagatatggcacctgtagttgagagtggtggtttgggacctttgggtgatgttgtggctgttctttgtaaatcgttgcatacaaaggtacccaagggttttttacttggttttttggtgccgcgaatgttgctcattattgtggagtggctctttttgtgttatgctagtgcagttccaatgttggattttcaatagtgggtgacaaactcagctgtttgttgtcactctacgacaagaagaaacttggcttataagcacaaaggctattgcacttgaggctttacttcagcctcagctcgttttcttgatgaatggaggtcaaatgacattggtcgactggttttttgagcaaggctgcctagttgcgtggtggtgtttctcttactcccatatttcatgttcagcatgattgtgtctttaataagccttgttcttccacttattacattgctcccgtggctcttcctagcaatggggagaagagcagtttattaacttggtattctgacagaggacaagccaagcctgcgataggcgagtttggtctcattcactttgaggacaaggtgaaattctgccagtataatgttagactccatattagtagggtgtggtagagtataggaataaagcgatatggctcattgtattgagagtagtcttgtgtgagatttggatagtatatatagaggtgagtagcggttagttggtatgcaaagaattgcgtaggtctctatttgcatcatggtgagatcctaggtctctcgaaatgcctaggccctttcactgtatatctcttttattgcaacattcattggctgcgatagactaatttcctattgtttttccaggctgcttccattttattcttgtcttctactaactactattacttacgggttggttcacatcaatctgaggggcagcggattttggtgaatggttaaaagagggtactatcgagtctctgagcctactatatttatatgagaaattcaattggacaagcattgtgatacttttgggaaagcacattcgcttgatgtttacccaaaaatttgacctgatgacatggacattgtttttgacatgtggcaagaagaaaatagcgttgagccccacatctcgaatagggcggtgccacctgcacgttgggcattgacccagtgcccaggtgagcactagggggcacccaggtagacacttgggtcatgatgaaactggaattaagattagaaaactcgaacatcttggaacaccacctaggtgcccagatgcaaatgacttaacaaccatagcaaagtacatgagagacatgccacaatttgtagaaatattagatagacatgttttaaatacttagcgtgtatggtacaactaagttaaggttgtaagtttattcttattttgttcttgatttttagttttctagtcctttgtattcagtctatatataggccattcttttatcaatatattaagatagaattattctcacaaaaactacatggtatcagagcatttgttgtctaaattagggtttcatactatgaggtccaattttagagaatcattttagaatgatcctctattctcacttctgactagggagtttaccagccttcgatgggcaaaaccctaaattttggtgtccatcattgtcgcgcgtgggctccacgcatcacctccatccgctgcaagttttgccatcggcgttcgctccatcgacacttcctggttcgactgtcttttcatctggggttgtttgacaatttcttcaaacagctgcatcttcgcctagttttcacctcatatagttttcaatggctacttaatctcagcgattcaatatcattaaatctcagaaatctctctcaaactcatgaggtactccacccatgcatcacaaatttaacttctcagttgttgcaaggtcaattcatcatttggtgagcaccttgacggggtgatctctggtcatcacctagtgtgcaacccagcttcaatcacgaagagtgggtgaatttcttcacttgagtaaactaagtgttgctgaatcgtgctatttcaccaacatttgaggagtttagcatcaaaataacacacagagagcaacaacattacctagtgcccatgtggtgtagcagaccacttgtcacattacttcgaaaaaagttctagattttgtagtcaagaacattatatgcctttgcggacttactcaaaagatagtgtcaaatgacactcattttgatagtgacctattcacaaatttctgcaccaaacacctcatgaagagctaccagaagttctgtagtattactgaaccactgaaaaactgctatcgaccacactacttttgttttaacctatggatacgaagctgtgctgctttagaacttttatctcaatcacataggagactcacttacaaccaagatgccaatcactaattgttggtctagtctctagatcaatttggaaaagatctcttgaacgaagagactcgcttgtcactttgtgtcgatcaaagagtcactcaccactcttaacgtgatggtccttagaccatagtcaaataggccattggtgtagtggatggagttcatccttttttgaatgagccaagtgtgtttaagtctcacttcattttcaacttagtaaaaactttgttctagtatttgatttttaaataatgaaaaacacaaatttttgctgttggtacttcatgtttaactaatcaattgcgccttgtaggaatagaccagactcatgtcatttatgataacttcggttatctattgtgagtcttcacgaaactcttggatctgtgacataatgttcaacatgttgacaattttattctgccaagaatattgataggaaatttccaccctagattatcgatagagctcatctttgaaaaatgcctacccagatttagctagaatttcagtggggaagaatggtattgtaagagagtttatagcggatgagggggaggcgggtgggtttgttgagaattgggattttaaatttagaaggaatttgttggaaagggaagttcctagtcttatagcaatgctacagcagctagagcatgtgaatgtgctcagtgtggtggatgattgtagaatttggaacaaaacccagaaggtgccttttcttgtaaatcagccttttagttggttcacttcaaatccgctccatagtggtttggagtggtctaagatttgtggaaaaggagtgttcctttgaaagtgaaagtttttggttggttaacgacattgggcaaagttagtgttcatgatagagtgcaaaagaaaaggccttatctttccatctctaagcgaagaagacgtggtgcatctgttcttggagtattcttttatcaacaatttatggtttaaagtgctagaggaatttgggttggattgggtcttcccagtttctgtccaaaaaatgataacaagtaagttggttggttgtagacgtaagagaactttggcgaacgatgattttggcaacatttttagctgtttggttggatagaaatgctagggcctttgaagactgtgaaagttcagaagtgatcctttgggataaaattaaattttggacagccacttgagtttataaatgcaaacactttgaagaacttcctttttagacctgaccagggaatggaaagcactgatgtaaaggaacacttttttttaacggttctatatatttggttttgtgttttgttcctggttaccgtttttagtgtatttcccgctgaaacatat

SEQ ID NO: 116213 - DNA, 1331 bp, Cannabis sativa
aaaaaaaaaaagaaaaagaaaaacagaggaaaaaaacaactgaaggagtttgtcagcaaacaagttgtgggagaagatcaaattttgggtagctagcaacttgcgtataaccagagactttgttaaaagggacctgctgctttcttgtctctcatcttttctgggccgcgtgttctctgtattttagttatttaaaagattaaattacgttgtttgtttggattattcttaattgggttgtttttatcattttaggttacttgcacatgcaaaggttgagtctgcaaaatcaaaggaagcagctgaacagaggagattaaaaaagaaaggctggctttcatttacatggtttgtcaacactccctttttttctacctatttcttgaaattagttactgttctctctgctggtttgtttgttagggctattgcacggcttggtattaataagctgctatgttcagtataacaattgtttaaagttttgcctggtcatttttctgtggttttatatgttgactatggcaggggcaccccctctgaagaaccccctgttggagattctcctgagggaccacaattattggaggaaacactgactaaagaagaatggcaggcaatcaacaagttgctaagttgtcagccagacgatgagttgacttcactctcagggaaggaggcacaaaatatgatccattttttggtaactgtacatgttagtcgtgctgctgccaggatcataagcataaatcatactgagattatttgtggtagattcgagcaacttgaggtggtaaccaagttcagacatcgtagcactcactgtaatgtgctgctgaaattttatggtttatctgcaccggagggctcacttgctgaggtttgtttgcttcacttataattttgggctgtggtatccatcatgataggttttatgacctctttttaagggtctaatctttttgggaattgtaatttaaatgtaagttctctttgcttatgttgtgtcgaaaataccaagtgaactgactttttactattgtacaaggggggagggaggtctatctattctaatagagacatcacaaaacagggaaaaactaaaattgaacaattaaactacattgtgccagttttggacaatcagaatgaattaaagaatcctttattttcttagctgaattcaaagccacacacacatgcatgtgcaaatggatgctctctctctctctctctctctctctctctctccctctcacacacacacacacacacacacacacacacactgcgtggtagtgacaatgttttttttctttttcatcacttta

SEQ ID NO: 116214 - DNA, 3511 bp, Cannabis sativa
tatggagaaggagattgatgatagtgttgggccaaaaaacttattgaaggtgggtcttggttcccaagcccaccaagcattatgagtcttttatcttggaattgccatgggcttgggaacccatgggcttttcaattcattaaagaccttgtggtccaaaagaaacccaatattgtgtttttgtgtgaaactttatcaaaaaaagatgttattgagaggcttcgtgtgtctatgggctttgagggtgcgtttggtgttgatgctcaggggagaagtgggggggttgctatgttgtggagagatgctgaagaggttcaagtgcttggttatggcgtgaattacattgatgtgtgtgtgaaaagtagtgactatggggattggagactcacaggcttgtatggcgagccaaaccgtagccttagacagagaacttgggagttaataaaaagcttaaagaaggagcaggaggaaccgtggtgcataataggagacctcaacaatgttacttctcaacaagataagcgtggtggaaatgcttacccaaattggctcatcaatgggttttgtgggatgcttgatgactgtggacttcatgacttggatttagaaggttatccatacacttgggagcggggtcgaggcactgacgactggattgaagttcgtattgatcgagctattgttacacaacaatggcttgatatttttccaacgggcaaattgcttaacttagaggtatccacttctgaccattgtcctcttcttttagctactgtaaatgctactgctactgctggaaaaaaagtgtttaaattcgaaaattcgtggctaaaagaacctctttgccataagattgtggaggattcttgggatcaatctttgggtattccgattatggagaaaataaagaaatgttccactgtattgtttgaatggggtaaggattacactggtaattttaagaagcgtatccaagagtgtaaggctgaaattcgtttatggaagagaggaagggatgccgtggctgttagtaattacaaagaagctcaggttaaactccataacattctgctgcagcgtgaagtcttctggaaacaaagaagtaaacaactttggcttcgggaaggagatcaaaattccaaatattttcatgctaaagcaacatcaagaaggcgtaacaacttaatccagaaactcaaggattcgaatggtagttgggttggctgggaagatgagttgccgagagtagtcattgactattttaagcagttatttagtaatgagagtgttgattgtggagaggttttggattgtgttcaagctcgaatttcagaggagcagaatggaaagctattggaatttgtaacagccgaagagataaaacatgcgctttttcagatgcatccagagaaatcaccaggtcctgatggtatgacccccggattctaccaaaaattctggcatattgtaggcgatgacgtggttagtttggtaaggaattttttcattactggaatgttccctactaatcttaatgaaactaatattgtgttgattcctaaaaagaagtcgcctgagtttatgagtgatcttcgtcctatttctctttgcaatgttctttataaagttatttcaaaggtcattgctaataggttgaaaactgctcttccggatgtcattaaaaaagtgcttttcttccggggcggttaatttctgataacatcatggtctcttatgagattatgcattacttaaagaggaaaaggatgggaaaggaaggatttatggctcttaaacttgacatgagtaaagcttatgatcgagttggttgggaatttttagagattatgttgggccgaatggggtttagtggtcattttgtatcgcttatcatgagatgtgttacttctgttgagtataaagtgacttatggagggacagttatggggcctattatccctggtagaggaataagacagggagatccactatctccttatctttttctagtttgtgctgaggggtttagtgctttgttaagacactatgaggggaaaaatggttgacgggatgtcaagttgcaagaggagctcctcgtgtttcacatatgctatttgctgacgatagctatatttactgcaaggcgaatgaacacgaagctactagagtgctgcaattgcttcaggtataccaaagagcaacgggtcaacaggttaataatgcgaagtcatcaatttttttcagcaacaatactagtgaggcggttcggcaaaggatgtgtgggatgttgggaatggaaaaagccttggaaaatagcttctatttgggattaccatgtacaatgggaagaaacaagaatgctattcttggcttccttaaagataaaatccaaaaaaagattttctcttgggagagccgattcttgtctaaagcgggaaaagaaattttgattaaatcggttgctcaagcgcttccaagctatgccatgagcgtttttcttctaaccaaggaaatttgctcaagcttagaagggatgatgtctaaattttggtggaaatcccaaacgaactcttctaaaggtgtgagttggatgagttggaagagactttgcaagcataaaaatgaagggggcattggttttcgtgatcttcgggattacaatttggcttttcttggtaaacaaggttggaggttattgaccaatgaaaactcattggtaagtagaatctataaggcaaggtatttccctaaaggtagttttctcactgctaccttaggacaaaacccaagctttatttggaggagcttatttgaagccaaagagttggttcggtctggtgcaaggagatcaattggtggaggaaatttggtcaatattcttgctgatccgtggctacctgatgatcagaatccctatgttagttccagccaccctgcgctagaaggccatctggtgtctaatctgttctcggtggggcagaaacaatgggatcttgaagtgttggatgatctatttaataatagggataaaaacctaattctttctattcaactgagcgactctgtggacatggattcctggtattggaataaatctccttctggtttttatactgtcaagtctgcttataaagcattgcagcaacatgacagcaatatgcttattgatcaagacagggagggttataaaaggctttggcagattgcaattcctcctaaggtgcaacatttcctgtggcgtgcgatatcagggtgtcttccaacaaagatccagttgaatacaaagcatgtgaactgtgagactcgctgcccgttctgcaacatagccgaggaaaccatttcacatattctgcttggatgtcgatttagtcaagcttgctggaacttatcttgtgtgaattttgctgcaactcaggttgttgatttcagatcttggttctttagcttgctggagttacaaccgattaatgtcatccatgaagcagcaatggtctgctggaaaatctgggca

SEQ ID NO: 116215 - DNA, 1473 bp, Cannabis sativa
cattgacgaagaagcacttaatcatactctttcatgcatccctaccatggttagtgaagattttaatgaatcacttgtcaagccttttacactggaggaagtatacacaactttacactctatgggacctaataaaagcccaggtattgatggcatgtcggtcatattttatcaaaaaaactgttcagtagttggggatctagttacgaaggtggtactaagcattctcaatcataatgccgaccctttagctctgaataagaccgtcataactctaattcccaagatcaagaaaccacaatgtatgcaagattattgtccgattagcctctgcaatgtaatctccaaacttgttactaaggtgcttgtttcaaggttcaaacttgtcctcccattagtaaattctgaagcccaaagtgcctttttgccaaatcgtctgatcacagataatgttctagtggcgtttgagctggtacatgcaataaaaaacaaaacagaaggacgcaatagattcgtctccttcaaacttgatatgagtaaatcctttgatagagtagagtggaggtttgttgaagaagttattaggaaaatggggtttgctgaaagatggatttcattaatcatgtgatgcatgccttacaactaataatttctcctttctcataaacggagaagttacgggagctttaacaccaactagaggtctaagacaaggctgtccattatctccatatttgttcttgatctgcttagagggtctttcaagattgttacaacatgaacagaatacccgcaaccttatgggctttaagctaacacggaatgctccaccaatcactcgtttgttttttgttgatgacaacctacttttctgtaaagcaaatgagagatctttccttgccattaagagagtcttggaaacctaccataaagcatcaggcctagaggttaagttaaacaaatcagtgatgtctttctccgaataccaccttagctgcacaagtgtttttttccaccgacaactctccatgtctatctgtgaatgtcacgaaaagtaccttggtttgccctcttactcttgccatgataaaacggagatgtttagcaacataaaagaaaaaatttggaagttgatgaacacttggaatgagaaaatttaaactgcaagtggtagagaggttctcttaaaggctctggtccaatcgatccctacctacgctatgagttgctttcggttgccagcctatttttgtaagcaagttgaatccatgatggcaaatttttggtggggcttaactaaaatgggcttgaaaatacattggcgcttgtggaagcttctttgtaaatctaaatcgaagggtggcactacaagaaatataagttttagctactacaaagttggtagcaaataatctatatttggtagctaatactttttttgctaccaaattttttggtagcaaattggtagtt

SEQ ID NO: 116216 - DNA, 1817 bp, Cannabis sativa
  modified_base (29)..(39): a, c, t, g, unknown or other
taaaaaagagggtaaaaataaaagaggannnnnnnnnnngggtatagagtgtaatttccccaactaactttgggtgcacagtgcacacctacatggacgccattcaagcctatagtataggcccaggatccaacgtctcaaaataagacaatccttcagcagctttagttgattatgaacatgtcaagtgggccggcccattcttcaggcccaattcatcccgctccaatttcacaatagttggattgattcttttcttttctttttttttgatagaaacaatagttggaatttaaagtcgagattttagtgtatagggtaaaaatagattaaatagtttggaattaatttgataattagaagcgtaaatatttaagtttaattttttatggtaataatacttaaattatatttttaaaacctccaaggtacctaatcattaagtgtcaagtcaatagccacatgaaagtcactaattggtccaaatcattaaatttttattttttatttaaaaatttatatacatacactgataagaaaatgatatgtgaatattaacttgacacttaacggtcaagtacttaccgaagttttagaaatataactcagatattattatcttaaaaaattaaatttaaataattatctataatctgaagttaaactcgcaaattatttataatttgattaatacattcaaaaaaacaattgttaaaatctgattaatttaaaaatcatttattaatcaaaataagaaaaaaaagaaaaaagtaataatcaaagagtaatgatttgtgcacatataaattatataagattgaagatttgatgattttatttatgaaatttaagatttttttttttttttaaattaaggttatgaatcttccatttaatattttgtttttttaccgatacctaatttcgttaaaagtaataggtacaagtctgagctagttcgatgaatcttaacacctaaaaaatagtgtataggcccgagatccttcacctgaaaaggcttgttcaaatctaaaatcagttggccaatcaagacattattgggattcacgattaaaaaattatctgcatgaaccaattataatactatgagatcattgcccgagccataaataaagagggaagcatcagatttggaggcaaaaaagcctttgctaatcaaggtggccttaagattatcattccacgcgcgagaggcttacttaaggccataaagggccttgtgtaacctgcacacatgagttggttttgaggcatcaataaagccttaagactgctccatgtagaccacttcacgaagatctccattaagaaaggcattggatacatctagttgattaacttcccaaccaaaggagacaaccaagataaggaaaactcacattgtagcaggtttaacgactggagaaaaggtctcttgaaaatcaataccatctgtttgtaggtaccctttggcaactgttgacctcaaaaagtgatcaattgacagtggggtcgtgcgaatctgatgcttgtcacgtgttacacaaataagaatgaaaaccaataaacacaagaatttgttatagaggtttggcccccttgtgattgcgggtaatgactccccttttggttgtattgatacaaagagataatactattcggatcactataggtgggatatgatatagctctctataaggatacaaaatataaattagtaggcaagatctctaatggaagagtaatattgccttaaaggcatgtgagagagatgaagagaggagagagccctattgggcatgagagagagagagaga

SEQ ID NO: 116217 - DNA, 1239 bp, Cannabis sativa
atcgtacagaaactcctactgcaactagcgctgcaaccattttagaaactcaaaccgtaaatttgaaaaaaaaaaagttaaaacaatagtatatgagataattcccctacattttatttctgtttaaaataaaataataacatatacttaacattatattaattaataattatagatttaaaaatagtaatattttatatttgctatgttcatggttataagaattaaaaaaatgaaattaacacatctcaattatctctaattacataattactatataactacataattaaataatattttaagcctttttacaaaaacaaaaaaataaaataaataaatactttgagctttataattactatgaattacacttagagatgaaaattgggtgagtaataagcgaataaggcacctcctaatcctgtcccaattttctatttatgcccatcattctcgccctcaccccgctcaattcccaatgaatatagggtggataaatctccattaggtatgagaattcattggatacccattaaaattaaaattaaaacaataataataagaagaaaataatgtaataaaattcaaaatgaaaacaaaaaacaaggtattaactataaactaaacaaatattctatccattaaaaagcttttattacacagtgaattaagaaagaataataatcaactttgtaagtataactaataaatttaatacataataattagaaaattgtatgaaaactttaaaaactatatattttggttgaatataggatgagtagtatcacccctccctgacctgccccaaatccgtttcaggtatataaacaccccacacccgttctattattcattaaggcaagtaagctctgctccattcgacatgagtacccgttcccacgagtcaaatttccatcactaattacactcaatttcaattacatactaatttttcaaacacactcaatgtaatagtttgatttgtgaggaaaaataaagggaaagaactaaataaaaataccaattatgtttaataattaaatattttaataatttgactaaataatattattttattttacatagaggataaagattctaacttggacctctccgaccaataaatagctaaaataggtaaaaaaaaaaaattgaaaaactatacattaaaaatcctaatattttatacctaaaccaatacatttcaaaataaaaaatatatgacacttttat

SEQ ID NO: 116218 - DNA, 3688 bp, Cannabis sativa
ttcagggggaatttttaacggtcataaaagtttagggggcatgatttggtatatgtcaaagttcgggggaaaaaattgctaattagccttaatataaaagatacacagttcagaatacaatttcatccttttagaataacaaacatcacatgtaaattctagttcttacattgcaggttgccataaaaggtgctcccttgacagaagtagttctcgaaatcctaaaaggaaaatgggatcatgagagaacaaagctatcattgccaccattattgaatcttgtaagcatgcgttttatactttccgcttgttgctatttgtggtgaatttaatttattaatagcaattttcagtttttcaatgacaatgtactactttttaacccagtcttaatgtagttggaactttactcgtgtttatctaattgatttctgtaaatagattttagttgcattttggatcctgtgattttggtttacagcattgatgtgcaccttttatagctttttgtaaaaatagatgcagctcttgtgagttttgtcccctaagtgattggtgctttcacagttacttggagaaccaggaactggaggatcttccacaccatcaatggtaggtgctgttaaaaaatggcagaagtctgaccccgaaaaatcacaggatacatggacaaagttgtcagaggctaattttgcacttgaaacacagttaaatgcattatgtaaattggcagaagaacactgggatgaatataaggaactaattaacagctgcagctcacttaaaccagagaaggtatgaatcaagctgctcttttttttttcctgatgtcgtactgaaactaatgttagaaatcaattttatagctgaacttcccactagctaaaacttttctcagaaattttatttgagcaaaaggttttctttttcatcttggttggcttcaacctgagtgaataattacaaaagccaacactttgttttcaacggtaaccaagtgtagcttttatgaaatatatagtgcttctcgtttattaacatttggaaccaaatctgtcctgagatgcttggatgcaatttttaacaattgaaaggccattaaaagctaaccatatatgagtcagaatgtcctaattctgaaattcaaatctacgagttttaaaaattgcaaaacctccaccaattttcttttggtttaatttattgcagttatttctgacttaatcagttgcagtctatctccactatcatgatctttggttctaaggctggaaaaatgtttttgttaatttttttttttcagtttttatttttttaattttttttttcttttcaaatagagaagctactttcatttataggaaaccatatgctgtgaagattggtttttgtggtgagcatcacataaaatttagttatcaaaatgtatcaacattaattttcatgaaaattatatactttatagctgtctggcatatacaattttagtgtatatacatatatattgcattttagttttccttaataaaatgcaaatcacatttgtaagagttaatattgtggagatagtatgctaaaatgatcctctaactgcaacattctccatttatttgaaaaaagtataaaaatgaacaacatgatgatttagaatagtatattatacattgctacatttgtaattttcaagttcatttgaatgtgtgttttagtttttgattatagggatgagagaaaggtatagtcctttgtgctggtttgtactttttctgcacttcatttaattatgttttcatcaaatccagttttgttgttgtaccaaagttgtttccagataattgaagttcaccagagttcttaagaatgaacagtgagatgcaagatattcaaattaattgtatatactgttgagtgttaaataagttgctaaacttttggggcaacattgagaaaagatttgtaaacttgatattgttacacatccaaagctgtttcatgatgatttgcatgtcttatttgaatttcatgtagcaaactacatattttattttcagtgaggttttcttcatcgtcttctatttggatgttagaaacctctttttgtcaattatgataaaatcatattggatgttgcatctgttcattcttaatgaaatttagtcgtccttaaaaaatttatattttaccattctatacgtgtgatagtggatggagcaagccactaaacaaagtcaagaggtcattgccaaagctttattaggcgccagagatgctatgcttgggatccggtatcatatgcgtctgatgggcgaggctgcaggcattccggtatattgatctgtcttttattggattcttgtcagtttacttgcttcagttttgggtttcagtgtgatttttattgttccactttttactcttttagtaagataatcaccacacacaagtttacaactttattcatgttaaactttcaagtcaacaaacagcacatatacaaatgcatacactgtcacacacaaatgtcgtacatgtcttggtccactgaacatatattgatggtgcttgattttgtccaaagaagatggtatttaagtgcttagttgcttgttagattgctgttgaaatgtttttagaatttagtgtgtatataataatggggttgaggcagagatcccttccatgaatagcatgtacataaaatatatttctcttcggaatgacgataaactgttgtgagagatactagtgcacaatatatggaatgatctcttaattaatatgacacttgaaaggatactgtacctcgtaatttgttagattttggaagaaaaaaaagtgtacacacgtagttatgtacttgattggcattctgagctcgctcacaatcttatttgtactattagtttaactattttcctaatagattttggggctttgaaaattgcagattgaacctcgttcccaaacacaacttttggattctacaatgaatatggaaggagtattgtttgctggagttcctggagcaggtgggttcgatgcagtgtttgctgttactttaggggactcaagcaaccatgtcataaagtcatggagtttgcagaatgttctcgccatgttagtcagagaagatcctcgtggtgtttctttggaggctgctgatcctcgaaccattgatattgcttcgtccatttcctcagttcatatttgattaaggattagtatcttcgattcgtgtttgatacaaaatcagttggtaaaggtcacagaacaaaaggtgaagataaataagttaaccaaaattttaaagtagggttttgctcttagttttcataaatgttgccctacaaagaagttgttcatgatcaatttgatattgccaaattcatccaaatatgttactgcttgttttttttttccttctcactaaacaaggtgtaactagaccatgtgtaatgtctagttaaatagtgagcttgtattagttaaatattaatttaatatatatttttttaaacactttccttttttaataatgtggcctctgggcaactattttaagaataattatgtatcgtgttctttttttttttttaatatatattataaaattagataacttaaccgattttaatggttttccatcattaattactagaaattcataaaatttttcaaaaatttcaaa

SEQ ID NO: 116219 - DNA, 719 bp, Cannabis sativa
taacaaaacagatggtccaattaataacttttacaaaatacaaggtcctaaatggtatttaccctagaataaatacccttctaaagtttttaaaaactaagataattgattttaaaatgactttcttataaaaacattagacttagtgacatttcaatggtttatccacatacttttatctttgaacctgagcttttgctttcttaaataacatcgttattaaagttctaaataatttttaataactaatcaatttttacttaccaaaaaaaaccaacacatgtattgtctaactcactcacctgaattattcatgtaattaactcatacacacgaagaatgctagtcattaagacttaatatttaaggtaatatttatgttcaaatcactaccaagtaattgtcattaataaattgattcataaaaccaaaaaaaaaaaaattgagatcatattgtactttaaaaattccataataactttccactaaacagagaactaaaattagtgttggcaactagttaccttgaacagtggaagaatgctcaaaattatcatattgagacgtcatggtcgggtcttcaatcggatgatggagttgacgctgctctcttttgaaattccgtattttaatatttccagtttgattatttaattaaatgattaattaaatgcggaataataaaactggtactgaaaacagttttctgtagttacaga

SEQ ID NO: 116220 - DNA, 1978 bp, Cannabis sativa
caacaatctcaataatttagggggtatttttaacgattttaaaagttcaaagaatattatttagtacatgtcaattttcgagggataaaattcctaattaacctttaatataatataaatataaaagtatattcagcccattttgagcgatcaagaacttaattatattaaaattattattattatataattttttttaacgtagtttattcacaatttgattagagaatccattagaaagagattatataagctataatatgccttggtagtggaaactacaacctattacaaaatcttagaatgtgtccatgaaatatttcgactttacatgtttgaaaagctaagcaaatatatgtacatatcctttaagatatcctcggccactcacttactaaagatatatacattaaaataagctttcattacagcaataataagagcatgacattacttttttgagtctttattcttgtggttcttataagagatgatttggttcacaacttcacatgtttaattttgtataaattaaagtgttaatagtttatcaatacatatagttagtggcgcctattaaaatccagctctctatgttccacctaagccttcagtttttataaatttataattattattattatttagacgaaatataaatgaatattaaaataactttactataaaaaagaatagttaagattgagtcgatctttgagtacaaatcacaattgattcaagaattggtatcaatataattttgctgagatattgggataacatactttatcaccactaaactcgtcaatttttattattattattctcaatttttatggaatggtcttgattcatgttaattttgaattagtttatctttttgtcccattaaatgtttggagggacaaaacaaatgtccatgcttacaaatttttaatgaggaacgtagataaggtttcttgttttttttttatttttatttttttggtaggaatgtagataaggttaacacttgttaattatttaccaaaaatatgttactacaactatgttgctttacacccaacaataaagagaaaaagagctagaaaaataaacgtttctttatcgcttttcagttctgatgtacacatcattacttttcttttattattataaaaatttctccatacaactttagaattaattgatcagttggtttgttactatttattgataataattaaatgcgtgagatggcagtgttttattagtgtgttgattaaaatttatcaacgtattttattatgttttatagtgtattaatacggaaaattatagcaaatatttatattatattattttttgttatatataaaaatcaataatttcttttcatattatttttagaatttagaataaattacttaaagattatagattatgatatatttatattaattatatttattttaaaattatgtagatttttttaattttgtatggattcttgtgggttgttggctagtatataaattttatcgtataattctgttttgttgtatggtatattattattcttatattatatatattttttttattttcctatacataataatagtatataattttgttagcataatataaatattttaatgtatatatattattttattggcatggtatatatatttaaataatatttgtatatattttaattgaatgatataaaatttattttaaataatatttaattagtttctatttttttatatacaatgatggtatataatttggttagtatagtttatatattaataatatatattttattattattattaatggttagtatatatattttggtgaatgatatatgtattttttgttatatatagtatatacttttttaaaaatgatattttaaaaaaaattaaattttttgttgacgtgacataaaatttttttagtacggtatatatttttatttttattt

SEQ ID NO: 116221 - DNA, 1227 bp, Cannabis sativa
catcgagatctcctcgtcagtggtggaataggttttggtcattgaattttcctaaaaaaatcaaaaaaattgcttgaaaagttattaatgaagctatccctactgttgtcaatctcgtgcatagaaaaagtttacttgcattacaagcaagtactgatttatttaaatgtgatggagcaaaagaagtatggaatcaaactcagtattaagtgtctttacaaaatatcagcaaccttagtggtcacgatatatatctactcaaatatatatagcagcttctcataacgattttatattattctgaaggagcaattgttcaggattattttagctatagatgtcattgctgcattttcaaaatcaatttgagattgctattcattaaaggagatggaggctactacatataatgatttacagtataaaatgggctctttcaaatcggttggacatgcattttattgaaattaactctctgttagtcgctaatgttgtaagcaaattatcttctacttgttttgtaactcgtttctatatgatttggtagacaatatttccatccatttattttatttccttagagcagtggtatctcgtgtcaagcgagattccaatcaagccgccgctcaaggtttaactaagtttgctcttcgattggataaagattattcttagttggggaaaagcatacatcaattttgtccacattaataagggataatttcataaatacagaaaaacaatcaaaaaaaaattataatatacagtcgtatagattttaaatatttttatagtttttaagattttattaacaaaaaatataattttttgatgtatttttatgttgtacttttattattttgttttttatttttcttatttatatatctaattttttatgttattttgatgttatttttctattactttcattagattttctttttgttttcttgtgtttttatagaataccgtaaaaatctccacaatgtaaagtagctggtattagcgccaaatagtaaaagtaaaagaaaaaatcaaacaaatgattaatcctcaacaaatgatatggaggtacataatcaaactggcttataatagtcttgttcctaagcaaaattcgatgcagtggtatggtgaagtttagggtcagtttattactctaaagtaggcatgtcaaaaagatctatttagttggagcgggttggagctccaatccgacagatc

SEQ ID NO: 116222 - DNA, 1395 bp, Cannabis sativa
  modified_base (1356)..(1358): a, c, t, g, unknown or other
gtaaaataatttccaacagatgagtcgtctcaacctacaatggagtcgaacccagagtaagaagcatggcttgtgcacgatcaactactgatgggctggatctatggatctatgactattgcagcagaggtcatgggatgccaatcttcctttgagctatggagtgcccttgaggaactttatggagcacactcaagagccaacatggatgatctctgaacaaagattcaaacgacttgcaagggatctcaatccatgactgaatacctcaagcagaaacgaatctgggcagattccttggctttagcaggtaatccttaccccgagaaacatctaatatcgaatgttctgtctggtttagatgcagaatatctgtttattgttgtgcaaatagagtctagagagcatacaacttggcaaaagttgcagaatattctccttggtttcgatggcaggcttgagaggctaaatgcctttttgaacaacaacaagcaggtcaacagccccactgctaactttgctcaaaggccatctggttcaaacaacatgaatccctctggagctttttgcagatccaacacaaaccagacaaataattaacacttgttgctacacctgagatgcttaatggcgacaactggtatgcagataggggtgcgagtaatcacctcactacatatccaaacaaggtgcaaaataagatggagtataggggtaaggaacaaatcaccataggagatggtagtaagcttcctatctcacatattggaacaggttttattaattctgaaattgataaaccactgctattacacaatatgctgcatgttcctacgatttaaaaaaacttgataagtctttctaagctaacagccgataacaatgtctcaatggaatttttctctgattttttttgtgtgaaggagcaaccaacagggaaggtggttctgcaaggaataattaaagatggtctctatcaattaaacacgcataccaccaaacaaccagcaaggtcttcctcacccttttcagccatagcagtcaactctcctcaatccagtcaagtttttccaagttttctaaatgacatttggcagagaaaattaggacatccctctactaatgttttaaatcaagttctaaaagtgtcaaatgtaaaagttcctatcaatgaaaattcaagtttttgtgatgcttgtcaatatggtaaatctcatgctcttcctttttcaaaatctacatccaaggccactactgttcttgaactgatccacaccgatctttgggggcctgcttgttagaaatattttaccaggatcttgatttactaccaagtatgtttgattaacatcctannntgaattctaaaacaatgaaagaaacacataagagttt

SEQ ID NO: 116223 - DNA, 1112 bp, Cannabis sativa
atacttattgtgactaaaactaataattagtgacaacttattgtaagtaaatactatgttttagtcattgtgattaaaagtcacatttagttaaaaaaaattatgttgtgactaaaaaattatcactaaaagttgcagttttttgtagagaattttttattagtttcataaatattaattaatatgaaatatatttattcactctttaatttacttattttttaattttaattttttttttaaaattataactctaaaaaaaagatattttatttattagtttagtttaactctaaactaattgtatgctcgatcgtaacttataattaaaaatgtttttattaaatatctctaaaccatatatatagttatacaactattaattatgaattattcaatttgtatcttggtcggggatagggttatgagttaaaattttaaatgaaaatattcataatattatataaagaagactaaggtacacatactcagaggactagtttttctatcaaaaaattactttaaaccctgcttgataattctaaaaattatgtattagtgagttcccttagaacatttccaaccatactctttatttttagcctaattttaattaaaatagctaaaaattaaaatagagaaccattttttatttttgctccaatcttgctctttattttagttaatgtttgattgttttaataatattttataatttaaatttgttaaatataaattaatttaataaaataatgaaaaagtaataaatttttttaattaaaatactattaaaaaatttagagagcttcctatcaattttctaatataaggagctatttttgtatgggtggagcttattttattgaagctcactccctattttaggtaagaagtgtgtttggagagcatgaatattcgagatgctgttcgtgcttagagatagaaggaataaactttaggaaaaattaagtgataattaatatcttgatccccactaatttatatttgtgagtaagtgtatattatattcttcttcataatatatatgttacataatatatatagtttgtgtatcttctactatatttcttatatatatatatatatgggtg

SEQ ID NO: 116224 - DNA, 1454 bp, Cannabis sativa
aaaaaaaaaaaaaaaaaggtatagtaatagtaaccctactccctaaaccatcaacaatggagtgtgtatgcctttatatagtaaaattgactatacaccgttgatctatcaatattcttattagactcttatgattactcattatccaccatcaccacacaccaagccatattatataatggtcccaacccaaacagttactccccaaacttcatcctgtaattaccagcttagtatatcacttaagccctctttaatattatttttattatccaaactaattaaaaaaaaaagtgtgaataaactaatgccacagctctttttaaggttaagtttttataatattaagggcttgaccaatagctattcaccaacaatagcacgcggtctctggttggttggtccgcattacattacattacattctattcttattttattaattaatttgttttgtgacaccaaagctttcatgaattgggtcccacaaaccgacccaatactatacgataaggacacatctccaatacagacattaaaacgttctgaaaaaaaaaaaaattagaaatggagacactaaaacaacttttttctttcaacttaaatactctatataatcaacaaattttttatggttaatatttttaaactaaagttttagatatttgaccaaagttgatgttctttttcatgtattcttttgtataaaaaaaattgacattgtattgtataacaaaaatattaactgccaaacaatataaaaacataaatccttaagcaaattgaagaagcccaaattagctgggctcagatcgttaagccgagccgagagaagtggaacaagtcagctgcagcaacagcgcgtgagcgtttctctgccattggtggtggagcgtgggccccactcagtctcagtatgtggcggctggtagtagtccggcgtgggctgatcaacgatcattaggctcaccattcaatgttatttgcacacataatccaatttagagaaaaaaaaaaaaacaattataaaaaagttatttcttttagaagaagaaaaagtaaaaaagacataatttatatgtgatatatgaataatgagtactcatcacatattttgcctgtaagggaaaagtgaaacgcaggcccgttcgtggatgtgggctcaccactgttatcccgttctgggcccatcaaaagggcccacagctgtctttctctgtattttttgccagtgaagcttacgccttgcgctgctgccacgtgtagagatgtggttggggaatagggcatccccaccacacacgcccacatctcctcttgtccggagtctcgggccggttccgtctttaaactttaaaccctttaagcaaaaccttattatgatattataaaagggagttatatttgcaccccataaaattataaatacaccctattattaaaaaaaatataaa

SEQ ID NO: 116225 - DNA, 2259 bp, Cannabis sativa
cttgtgtgtttttacttttctacaatgtttgtttttctggtttcttctggagttacagagttattttttgtagctacagaaaaactgtttcgataccagtttcattattccgaatttgattaagcatttaattaaattataaaaatagaaatattaaaatacgaaatttcacatatgaccaagatgaccaatctgaataaataagttattgcccctacaaccatcggtaagtagatttaaaatgaataattgtataatttataactcttcataatattattattatgtattaatatttttacacatttgtttgtgcatgaaaatatttcattggatgcttgtattcatccaatcaagtacgcagacagcggcgtacttaaattccaacaatggcaacgtattggatgatttgaaatttagcattttcacgtaagttctatattcaacgtcacaatatgttagtgtgtttcatatttaaatttatatgctaactttacttttcgtgtagattgtttactatttacaataaaataacaaaacaacattatagacctatcaagtggataactcctatatgtctagaacaaccagatgacaaacaatgtggatactactgtcatgaaattcattaaaagtttcatgatagtagaagattcaataccagaattaataaaattggtaaaataattaataagtattctaatgaatattataatatatattattctgtattaaatagtgtatgataataggcatttactaattaatatatatctttattttacagagtaagttctccacatagtacacaaatgacgagataaatactatgcctgattagtgaattcttcagtgaaagcggaagcagagcgacaatggttgccatgttgattagtgtatagatctcaatttactgttactatatagatttgtaaataaatttagatgattattggcattagtttatttattgtttctatataaatttgtaatatatttagatgatattagcgttagtttaattattaatactatataaatttgtaaatatatttaaatgatattagcatttgtttaattattgttattatatagatttgtaaaaaaatttaaaaattaatgcagggaaaaaaatggcaaaatatctgcattttctccttatttttccaatgtaacgactgaaaaaaaaattcgtcgctgaaaaatacacgtcacgtgtactatatggcatagtttagtatagggcacagttataaaccatcacctatacccaaacataggcgacggtttttaataatcgagaagttcaaattggcaattatttcgaaccatctcctatttcgcccattttgtgacgatcatataggccacagttatagaaatcgacgggaataatttacccaactgtttaaaacgttggagaaaaccaattttgtagtagtggtttaagcacttttgtccaaaaaagtgtatttccccatataacacacatagtaaaattgaaaattcttctgagaataaacaagccttaagagattttctagcgtagtgtttaaaagataaaaattgttgtgtctaatggatgaaccagagtctctatttatagagttttttagaaccaagcttgggaaatagatcccatcaatttagtggttgttaccaattgtgtaggagtgagttaaggatcagagttttgttcgtaaataagtgtgaaatgttcctcattgattgcataacttcttgcaatatctatctcatgaaaggctcgaggccacatgtcgtctggaattataccaaagaacctttcgagatacatcgctgcacgttgaaaaaattccaaatgttcttttctattttgaattaattttcctgaatcaagtttcaaaacttctttttcaagctaactagatttcaaacattccaaaacatatttaagtgatataaattgttttgtaactgtttttaatatttagaaacttcccaatttgaatccataactcccaaatgtaattgtactcataactacacatttccaagcaagattcatgagttgcaaaaccctaaatcaaatttgtaatttctctgtgttacaactttgagtgattacatgtaacctccaatgactttatatgttatacacaaattaatatataagatatctgaaaaatcgagtttttgcaaatgtcactaatatatacgaaaatataaaattgtatacgtctgcagaagcagaatgtaattctgttactgcagagacca

SEQ ID NO: 116226 - DNA, 1278 bp, Cannabis sativa
  modified_base (1127)..(1133): a, c, t, g, unknown or other
tgtcacgtgtacactatgtccagtagtccaacatgacacttaacacctaagatggacggaaatggtaaattgctaacagaatacgagtattgggggttttaccgtccaagtttgaattttggagttaagtgaaatcaaaatgaaagttttaggagttttgccgtcatttaactaaaagttaattgttactagttgtgtgtgttgtgtttttatcttcttattcaatatttattttcttcactccggtcgaaaatataccctacatacccaacttgcataattaacttaactaagttcgtataatacaaaatgggttatcataactataaatcataatagctttttactcatattacatagctaaagttttgaatttttaaattttaataaatgggttattagatccaacgaacaagtaatttcggccattttaacttctaggctcacttctagccttttgtaaaattatataaattttaattacttttcattatgagtttcgagaatgcgattagatctagcttgccttagcttaaagttaaaaataatgaattataaaattcggtgaagtgttaagttaaatatgatgaaagtaattaattaacactctttaaaaatacttttagtaactaatttcacaacttcaaactaagaatagtaatcaatagtgaaacaaatattttggagagacaaaatatttatgctttaaaaacctaaaatattagttatttgttatacatgaacacacatactttattgctaagaaaaaacatatttactagtttctaaagtatgaaagcttactaaaaacaaaatggcaacataggtggaaaaaaaaaaagaataatatgaattttctccatctctcgaattatgatatttgtagacttttatcctaataaggattttgcgaatgtgcttattcagttatattttgttcattgtttacaattgacttatgtgggggacaagtataattgcagtacaataattattttaatataatcaaatttgagattctttatattggcacttaacatataaatattaactctaaaattgtagattatgtcattttagtgctatattagtaaattttttaatacaatagaacctctatttaagannnnnnnattcaagaataacctctaatttattataaaataatcaagtcccgatttgggccagttataaataaaaataacctctaaattgtaattagttatccatttttttcagtctcgtattaacaaagtatacctctatataagaataatt

SEQ ID NO: 116227 - DNA, 2460 bp, Cannabis sativa
  modified_base (44)..(55): a, c, t, g, unknown or other
ataataaataaaaagggtgtgtgtaagagagagagagagagagnnnnnnnnnnnnagagagagagagagagaaattgagcgagggtgtgtgtgggtgtgtgtatatgaaagagagaaagtatgacttcttttatagtaatgggtgagagaaggaattatcaaaattgcaaataggacgacccatttggcgtaaatgagactcaatctcctttgcctttgacactattttcttaaaaaaacttttcagcctttctttcttctcttcctttatctctctactctctctctctctctctctcttttatgtgcctaaaagttaaaacttttttttttttaaaaaaaaaatgcctcattcttttttttttttcttttcaaaggccaagctttcgtatttattttagtaacaatattaacaatattaagttggcttcatagttcaacctttgtggttttgtgtgggaataatcgaagctgttaaagttgtttttttttttttttgccctttaattcttttggttgtcaaaatatattgttttttttcttattctgaaatcactttggacagtgtataggggggtaatttggtatttatgataacagatggccactttggacttttcatcttattccagcctcgtaagagtgaagtcaccttatgtcatgatgacagctgtacttcaccaatggcttaaaggcaatgcctcaaaaatacctttatacccttctttttcttctgaaaaataaatttttaacccaaaaaatagttgggtgctattgcaaggggaacaaaatcgttgagtgctcaacaacgccttttattgaatagtgaatgtacggactataaatacatgtatttataggtgttctaggtgtttgtgattttctcttttgtttccttttgcacaaataggcccttaactaattggattcattattaaccactttgctttcactgcttcttagttagtaattattagacattaattaaaagtattcacaaacaagtgagctataataattaaacttgtaaaatttaactcaaaatcataaaaaaaaaaaatacctctatgagataaaccattgctctattttagctcactatattttcttaactaaatgtagttaagattgggattacctcttctctaaacttattttattattattttagtcattttctttttttctctttctaaattaactattatttaacttttttttttagttagtaaaaattagtatttaagtaatataaggaaaaaaataatagaaaaactaaagtatgatataatgaaaaattagaagtaaaatataaaaaatagtgttttgataaaatattttaaagaataaaataaattaagtgttgggagtgctctaaaatggtgggatttagttgaagctaatacaaacatggaaatagaaataagaataaaaatataaattaaaatgaaatataataaaatttaaaatgcatataaaaattaataaaatatcattaatttactattccatcaaaatagtataaaagccattatattgcaatgatatattaatatatggttaatatatatgatatatgtgataaataatgtttaataatgcaccaaaaaagtagcataaaggggttacaaaatttgaaatagaatttataactcatgaaccatatatgattaattgtgtaactatgagttattacacaaaggagttatgagattaataatggtggttatatgacccttataaaacattcataactcatttatattattaaattgagtgttggaatatttttagaagagttggcatgatgaggaatttcaaaataaattgaagcgtgtgcttgaaaacacctggtgacatgtcgcccaatgagtggtgaaatatcgcctgaacatgacgaagaaatgttacatatttttgaaattgggggtgcagaaatcatctcaagcggcgtgccgtccaataataggcaacatgtcgcttagaacaccttttttggaaaaacattgcaaaatgctcacctcttaaatgggaacgtttcccactttgataccaatagattatatcccattaatgcttctatttcggctagtaacgtcctttaggatgtgagtttcaaatatggttcacctacacaataaatagggacctaagagattcattttgtgatactagagtttccatcaacgagagcaccttgctagagtgtttcatttgttaaaacctagagtgttcatctaggttttggttttcttattatgatctcatactattcttagaataggttgaagagaagcttgaacaagtgtgggtcttcgggagaagacttttccaagtctcatttcgggaggaagtgagcgtatatcttcggaagaagatttgtttaagccttacttcgggaggaagtaagcacacatcaatagttgaagggagttcactacttggtgtgtttcagagatc

SEQ ID NO: 116228 - DNA, 1330 bp, Cannabis sativa
tagtattgcactatcaaattgtgacaattactatggatcaatcaggtacgcatatacctaattattatatattgttatcgtgttcatcatttttagataagtctaagagagagcaaagcctttactgaaaaaatgcaagagaggctgaaactgtagagagtgcggaagcatcgagagaccaaaacagtttttttttcttttttaaatcactgaaaatcttttccatcttgaagataaaacataaaagcttccacatctaagtcttgccctttttttttctaatggctggtgtccaaatagagcacacaattcttaagtcctcactttgaagaacaaggtatatgtgatgatggtaataattattatttttttctaaatattttatattaaaaagtctcactttttttttttaatattggagagtacatttaaaaactaaaatttaatcacatacacacaagtacatcttaaccaatgtatacactcaaaaatcatataaatgattggttaataaaatgtctctatagtataggaacaaaaccaatgtcctactatagaattattctacatttatatacataaatattaaatacataaaatataattgaattcattaacattatttatttggccttttcaatttgtttttaatccttatatattcttaccatttttttcgtgtaagtttttatgtggcatcttaatcttatgatccataatacctatttcttactttttctatttttttctttttaaatcgtattgattataaaagttattttcttttattattatcgtcattattatatattgtacatgaactcaaacactttttttttagtttaataggagcattcactaaaatttatttttagtaataatgtgaataaaatataattgttacttatttctctttttgaaagttcattcctatatgattcgccattttaaattcttatgtctctctcaattctaattatatgtaaatatacatatgaggtatagatgactaacaatataattctatttttaagtttatttctatatgattttcttatttgcatttcttcttcatcctcatgtcatcttcttatgtcagaaagattatatttacatctctcttatttgatgactgtacaatatgtatttctatttatctctaatttaaatcgacattttatagaatttttagttttaaattttaagcattactcaatcaatgttcattccttttgtttgtatagttttatttgactaactagcttcagaaagaattctacatcatcgatgtcttcaagaaatggtaagtttaacatctaatctcttgtaa

SEQ ID NO: 116229 - DNA, 2987 bp, Cannabis sativa
atatagttttacataaaaatattgcataaaatataatttaatataatactataaaatacaatacggtgtaccaaacgaaccctaactttttcaattctctcttgcaggttgtttagagtcttatatattatatgttgtcgagagaagcaatgaagaatttgtataattacataatttttttagagtaatattgcgttatttttgaaactatattataattttgtattcatgtataatatttgacatgtaagtatttttttaattctatttttagatggcaacgactaaagatatcattatatcattcacagaagaatatagtacagaaatataagatgaggttattctttattgtccttttattattttttcttatttgtgtttgtttattaaattctagctttcatggaaagatttatgcaggtttacaaaatctagatgtagatttataaagatactctaattttttaaacacgcattatgcataaaagaaatacggtgatgagaggctttgaatataatagtgactacaagtgaaatatagtgatgacaaagactttgaatataatagtgactacaagtaaaatacggtaatgacaacattgactttgaatagtggcgactataagtgagatacggtattaatgacaacaatgacgttgaatataataatgactataagtgatgggatatgatgatgacaacggttttgaatgtaggtagcgattgcaagtggatgattacaataattataaaatatatgatcatttttctataaatttatcaatcgtcattttttagatctctatattgtgtaatggttcttcaatttttattctctttttcactataacaattgaagatatctctttgtttgctttctttattagataagaaattgtatgcttaattttttttacaatattaatttatttttttgagttaaaaaataaaaatttagtaaaataattatttaaataaaatataaccacacgcaaaacgcgatttattttctagttaggtaatagaatagaaatgaattactttttatgttattcatttatttaattacatttaaaagtctatttgagtagaatgacttccattttcaaaaggaagaaaagaactttaaaatgttagatgaaaatttcattttttttatgcaatttaaatgtcatttcattctattcacattttcgttcttgtatttttattgcttacaacaaaatgtaccctttagtttattgctttcagatgtaaatgtggccaatcaacactaagtacggaagtctgtttacaacaagcactgaactaggtatctaaaatatttttgtacagacctacaacagcatctcattgatgaatactacggccacccaaatcagcggcagctttagaggctcgattcaaagctttttagacccaaagagctcctttcgagaaatagctactgtttacaacggtgtttgctgctgcacaggcagttcttcctgttgccaatacagctgacttggtcatctttgagacatggtacttctcatcaacagatttggcagcttgaactcctgcagagattgtatttgcaaggccaattctttgactaagctcaacaaccttagaggctgcagttgctgaaacttgatgagattcatcgtagtctttggccctagccaatgcatccttgctcaaaacaaagcccttggccaccatagttttaaccacttcctgggccatagtcactgcttctccagcatcaaaaacaaattggtttctttgggtaccctttatagccgtaaagcgatacaaattagatatcacttgaaaatgaccttaaacagaggcctccctctttttctaccaacatactcttgtaaaattgaaaagaattaaactttggttaccttggaactagattcatgttcacgagtctctgaagaactgttccaaaaatcaaattcatctctgtactgcccccatcgtgttatgcatacacgttgatctacaattgtggcaccctaaaaagataagataagaaaaccactcataaatccacaactagaaaccttggcatattaacaggaaggagtataaagaaactgagccacattaccaatctaaccatataaaagactcaaaatgttttgcatacactgttgttaacctacaattttgtaaaggagagaaacccttggaaattgttatggtgctcctcataaggaatccaacccagaacatgagagaaaatagaatctaacactttccatagaggagtatctgaatatattataacacagacaaatgtggtaaactcatgaactaaagtcattttgtttgtttctttcttctgccaaatcgttcattgcagagaataattaataatagtttaaagaaacaaaaaagttctacagccattcaacaatgaaataatcgacatggcagggagtaatagaagaaactatatactgctttcatttaaagccaaaatttacagttgggtaacaacagctgcaatggtatattcaaccatacatcattttgttaataatattaaataaataaattgacaagaaaacataattagttgataagcaagaagtgaaagttctcacactaagcaagcacgcagtgtcctgtgaataagaatctttaaaggtcacgtaggcagtacatgcataatcacctgatctattcttagacaataaaaaaattgtagggaatcattaatctccatttatgaaacactaaatacaaattgaacaaaaattcgactaaatacctgatgatttcgacatgttcgatgttaccggaaaaagagaaaaaatcagagacatctttctctgtggctttcggagacaagcccgtaacttcgactgaatatccacctttattcattttgatacgaatctagaaaagaagatttcaagattaacttccaaagggaaaggtattgtaacaccctaactaccataggcgtattacgtgatttt

SEQ ID NO: 116230 - DNA, 1710 bp, Cannabis sativa
ggtcagacaacatgccaacaaattgtaattgtgtaatgtaatttacctcaacctcaaattcaaattacacacaaatctaattacattgtgaatttccaaacacaccctaagtaaaactttatactaattagttacattcaaattttcttttaataaattattaaaaaaaatattcttttaataatttaaaaatagagtatttactgacaagattagacgaaaattatactcaaaattctagcttgagctaccttcctaacttctaagctcaatttactaggagagacataagccaaatcaaatatacatctatttctgcttttccatataaatggcagcaacaaaaactgtatttattatacgattttggaagtcaagaggaccccgtaagcaccattgacggacgttaaagatatctttcagtcacttcacatatcccatccatctgccaatttcagcaaaaggctttcttggagtaaacacaattaatgaagaggtgattatgtgtttccatatcagaattgcacactgggcaaagatccgaggagaggctcatgaatttgcataaaagatcacgagtaaggagttgatgattgtaaacctgccataagatgaatctatgttttggaataataagtttattccaattaactccactatacttcgcatcatgagcttcaataagcgagttacataaacgtatagcataaaatttacctcccttttcagcttgaaacaaggatgtctcgttaatactcattcgaagtttcaagagttttttgaagtaccaactcatgtcttgtttgatgggtaggctccataaacattgctcctttagataaattgaatttatccacttcacccaaagattttctgcttgctagcaatgccccaaaggaacttgtccatcaatgctttattccactttttaccatctcgaaaaccaactaccccaaactttttgagcagacaaaccttctcccaggaagtaagatggagcttgctctggttccctgtagtcccccataaaaattccttacagctctcatcaatggctgttgttattttatttggaagagtaaagatactcatccaaaagtttctaactccgaggagaaccgagtgaatcaattggacgcgtccagcaaatgagcagttcctactagcccaacagtttagattcttatttatcttgtacaggatcactccacaatctttagtcttccattttgttggtcagagcttaacccctagtatttgagagggaatgagccttcgtctatttttgactaagtccagcatctgagctttagttccatcttttactccaccaaagtaattatgggtctttgatttattcgcaaagagatttgttgcctgtcaaaagctcaaaaatgtatcatttaagtgactaatcgatttgagattcttcttgcaaaatatgataagatcatctgcaaaacacaggttagtaagcttaagatgtttgcataaggggtgaaactcgaacccctttttccctgtgaactgggcatgagtctggtcaggtactctatgatcaacacaaagatgagaggggacataggatccccttgtcggagatctttctcacctttgaacttaccttgaatcctaccattcataagaaggttgtaactagttctgtagcatccccgcttcaagcttccattgggcccttacacccacaga

SEQ ID NO: 116231 - DNA, 2624 bp, Cannabis sativa
  modified_base (676)..(683): a, c, t, g, unknown or other
attcaggactgaaataaacaacaagattcttataatgttatgtatttcacattttcggatgatctttctataatgtgtttgtttcaggagaaaacaattctagattccaaaagttgcctgctacaacaagaaaggagagatatgagatttttaaaagaatgaaaataatgagcgaatatgaagaagctaaggctcttaagctgattagcgatttcaaaacgacacgtccatttttcaaggttataatgcaagaatactatggtcagcaactggtaagcttcagtctgttttaacacttcctataccaatactacttttggaatgattataaaatgatagagctataaaactatgcttaacacgtgttactctttttaattttcggatggtttcccacaggtcatgctaacttccttttattttttgttcacactatttatacttacagtctaaactgtttggataattgtatgctgtggtcattggttacaagttactatatactatgcttagttaattgccagctgaacttctaaaatgattggctcgggattgggttagtttttccagttaggattagatactcatagtaacctataaatagcttttatagtcctttgttcgttaggtctaatctactttgtaaagcagagtgtgtgtgtgtgtgtgagagagnnnnnnnnagagagagagagagagagttctcctctgtttagtcttgaaactctttactgttctagagttagaactacttgtaactctctgtaaactgttggtaattaatgaagataatgatggctgttgttcagccgagatgtaggacattgtacatggctcgaactcgttaaatcctggtgttatttctccttggtttgccttaatcttttctcctctcttaagagatttctctacacttttgataattttatgttgtggtaattcttctttatgtttctgtagaacttgccagtagagttcgcaacgggtaatgactatcagccatgtgatgatacaattccccttcaaatctcatatggagatggaatgaatagtagtccttggcatgcgggctacaagacctgggatgtggagtacaagtttgaagtgtataatggagtaccaacacccacattccaggcaggttggccagcatttgttcaggacaataatctgaaagtaggcgatgtttgtatgtttgttctgctcagggagatgtacattgcatttaatgttttaatttttcgagttggtacaaatttcttcaagtctctaggtaaacaaacaagcgttattgtatgttctttactacatactcttgcttttcccatttaacatttcttaggtgcaaatcttgtcagagcccaaggaatattgcatggtgggtggaagaacatttttggtgcgcaacagaggtgaattcagcgaggacagttcatgtccgaaccagcaagtgttcattgaaaaatctaggcttattgaaagggctctatttaaatcgaaaaatcatttcttctcggttgttatagaaccatcacttcttggttcaggtcgtagtttggtaagtttattttttacttaaaactgcagcaacattttctttgctttgggttttgaccattgtaaagtaagcgctatttttcttgtacattttcagactataccgctctactttgcgaaggattaccttaaaaatgagggaattgtcattcttttgacagacagaagatattgttctgttcaatttgaactaaagaacaaaaacaatagcaaaatgagagccgtatttagtggtggttggaaagactttacgaaggacaattatttgcaagttaacgatgtctgcattttcgagtttcttaagggatctgctaatgtttttaaagttaccattcaccgtgctgatgaatatgcatccgactaaaatctcaaaggttatttacttattacattcaattttgattttgacattatgaagttatgtagtgttttttggtttgttactaacataaattgatgtgtgtgcagctagtggaatcaaagcaaatacaaaaggagaagtgggagataagttagtgacttttttttttgaaacatatttgcataatggtgaagttgttatgcattaaaactcaaaactggatgtatggtgaatgaatctataagggatcaaataccttattagatacagtatatatttatttttattatatgtgggatgttaatttaacatgaacaaattatcttttatggatgacctctttttagttgtagttacaatatctgttcaaatatacagtttactatgtgtgtttcaaaaaattctaacatgtcattactaaccaacaaataataaaagataatgttgtaataaacataaagtttgaatctataatgttaaaaaaaatcatgattaccgtttagaacctcattggctggcagagtgtaggttttttccggcgggcgatggtatcgttcctatgcctttggtctgcttgtcttaggctttcgtatgacctctttgggaaatttgattttctatacttagaaaatcttaaattttttttcctaaatacatacttaataatattggtcatatatgaccacattcctaatatcccacaaat

SEQ ID NO: 116232 - DNA, 1335 bp, Cannabis sativa
catggtcgcatagtattttttccgttttcactaaatgaccatatgcgaccaaaagcgaccaaattggtcgcacatggtcacatatcacaggtcgtcttcaaccttgaactgagattattttcacaccatttttattagaataacttaaatttatggtttatattgttatataattgtataataacgaatactcaattattaaacttgagatcaaaataagttgctaacctttacaattttaggatggaattttcgcttcttctttaagagttttttatttttttatgtcaaatgtaaatgcatctcattgaagaataaatacttgagtagtgttatgaagatgaagataagaactcaaatgaagatgaagatgaagagagatgaatatgaaaatgaagataagaaatgctcagttgtgattccatagtttaggtgtgaagtctattttttttttaatgataagagaaaagttaatgttaactgtgtttattatattaattattaagttaattttaaaagaatgttattttgctaattaaaatatttaaaatattattttactaataaaatttttcataaaggttattttgcctcactcttcttacttctaccttgttgtgatttttctctctcatgaaatgagttatcccttattgtgttatctctatatcgaaagtcgatgtgctgatgtaataataattaatataattattcaacaaaactaatcaaaaattgatcattacctaaaacaaatgtttgaccattatgaaagtaaatttataaatgtaaataaaaataaccactgaaaaaaatcgtagattaaacaaaaaaaatactaaattagaccaaaactactcaaagtaaattcaaagaatcaaaaacatatataaataattaattaggatatttttttatcttttatattttataattataaaacttaaataaatgggaaagggttataaactaatcaacattttaaagtttaaatgttaaaactaatacactgagacaaatttgaaataatctaattgaaaatatgaattattttaacaaaaatttattttatttataaaaaagtaaaaattttaaaactatattggcctattttaaaattataaatatatattaaaaataaaaagaaatatttaatttttttttttgaggtgatatatcgacttcattgaataaattagcattctgaatacaaaagacgtaagagttcgccagaaatggaaatatcagaaatactacgatcagattgataccgagaatgtctagcaacataatgtgctactcggtttgttgatcgtctaatgaaaaataaattaacat

SEQ ID NO: 116233 - DNA, 1385 bp, Cannabis sativa
ctatttatagaacatagaaactctagagatagccacaaagtcgaatctacagctgtacaaaactttcataagaaaaacttgatttgcagcattagatccaaattctgtcgcagcaaatcagacgagaaaaggaaacttgccaaaaatgagttcgatcttgtattgggtcttgatacctaaacagtgtgtatgatctgatttatcaagacacaatcgaacttattaaggaaaataacaatagtcaaagtttcctttaaaaaccaactttctataagagaatttcttctcctacaagaagtttctatacaagaaaagtccacctgaaaaatcaatatttcttaagatagaaaagagcaataaaaccaaatattaaaggtgataaaattggattgaaagcacaaataaaaaaggactttacaacatttatgaaagaatttattaattagggatttttattttatttaagtttctcctttaatgatgaagattcttataacactgattttgctcagtgaaagatgtttcggcgtgacttaaatttgaaatgggtatgagctaaattatcaaattgttttattagtatgtctccgtagttttatgttattaatgtaaatgatattcttttatttagatatactgtatttattttatttgtgagggtgaagatattatatatattatatatataatatcctaggtaagtgtatgtgtatctcattttcatatgccttgaattcggtagagaatttttacaaactagttttaaatgatttccaaaggataggacttactaagtccaatttaaattcaaggtatgatatggtttgaagttaaatattatgttttaatttgtaatgcttggctaaaattcttttataacagcttatctacgccaagttccccatcccatagtgttatgcattttataactctctaccgctccattaaggtatttaataagactatgtaagttctaaatagcaagcattttacaaatttttttcttgagtttacatcactctgtttttaatttaattttctttttcaaatgtttgactatatggatgttatttcatggctagagtagtttaggactttatttacataattaaagacttaagtgacaatacgattataacaggtcaattggttggtctattatgaacccttctacttgtattaattatttaatagtgtgatattaattcctattgatcttttgatctgtttcattgtaattcccattctcatgttaattctttcgcatcactcatgaaaaaccaagtttttacaaatgtcaataatatatatgaaaatataaaactgtatatgcctgcagaagcagaatgtaattctgttaccgtagaaaccagttttgcagcaac

SEQ ID NO: 116234 - DNA, 2265 bp, Cannabis sativa
  modified_base (1233)..(1236): a, c, t, g, unknown or other
  modified_base (1416)..(1422): a, c, t, g, unknown or other
aaaaaaaaaaaaaacaaagataaagacatagacagcttatgccaaaattcacatgcaaccaactagaaaagtaaattaataataatattgagttgggttaaaattaatattcattcaccttgcaacggagacagtccaaggagtaacaagctgatccaccgtggcactatcctcaccgtacacgtcgtcaacgcctccactagacttgttatccatattatgaaccaatgaagaagaatctccaccgttgatcaatgtactactctccattaatgctgccgaaaccttcctttctcctctgccaagcaacgttattgtgttcttctgcaaatgcccaattcaataatacaacccagaaagtgaaaaatggttttaaatcaaaactcgttgtagtattttgaaaactagatgcagagccaccctgtttttataggtaaaattatagaagatgagagaaagaaagaaggagactgcacgtgtagaatgttatgtcaattgtcaaagacaagaccggagactgcacgtgtagaatgttattattcaaacgaaactaatcaaaaataaaaagaaagaaaaaagaggtttgttggtcatatgcctaccagatggtttttagctttcagcaacaatatcatactggaggaacgtgtaagggaatcaaacttaatattattattattcactctcaccttgtttttagagagagagaagggatcaaagtagaaaggtcaaaggtggaagttgggaggtagaaggtgaaggcattattaccctttttttttttaatgtatatatttttcaaaataaagagatgagataaaagattttttattagagatgactatttatttattttttaaaaaatgaccttagaaatgattttattttattttaacatgaaattatgttatattttgatgaaaattttacaataatacttcaatacattagaacaaaattagctttttcttatataggaaagtataaaaaaatcaacaaaaggatcaaatttttgagagtatataaaactttattaaatatataaatataacataaaaagttattaattacactaacaactggtaaaagaataaataaaaaagtgatatctttaggctaattagcatctttgttctttgaactttgacatgtacctaattatgctttataaacttttaaggtcgttaaaaatgtctcctaaactattcagattgttggatttaaggatttttnnnnaatttcattcaattttactattcaataattgtttatgtcctaaaccatgctccccagactttgatatttaccaaatcatgtcccttgaactttaacatatactaaactatgacccctgaactttcatccatgttagattttttttactaaaattagaaaaaagtctttaaatccaacaannnnnnntagttcagagaacatttttaacgaccttaaaaatttagggagcaaaaatactaattagcttttattgttaaaattttattcttgctatatttgtgtcaaatttagtgcaaatttaatttagatacgtactaaatttagacaactttatacatatcattaaaatttattgttataaaaataagttaaaatatgcatatgtaccacactttttagcacttaattataaataaatatgggacaacaacacttaattaagcatgtgtagatccaccactaattatacctaactatcatctatcattattgagacttgagaattgagagagagacagagagagagaagaaggtaataataacatgtatctatttcccttaactaattaattacgcatttgtagtaactagtaataacatggatatgaaaagattgtttaagaaagtttattgtgaataccacaataaatttactattaatttttatttttatattactaattattttaatataaccgtaaatatagatcaatctcataaatactatgtttaatttattatttattataaaaaaaaaggttttttttttttagagaacaataatagagattttgagttgcaaattacaattttaataatatttaagagttattctctacttccaacaatcaaccaagaataacaatcacaaatattatattttactctacaattgaactattaaccttacagataattacttatcccagtctccctattacaaatttttatacccgaaattctgctggaggacacgtgtcaagataaaataaatgtgaagcggtgcaatatctttttatggaataactc

SEQ ID NO: 116235 - DNA, 4069 bp, Cannabis sativa
atgtaaatttgaattagacgttaagtctaaaaattaatcatactttataacaaaattattagttatattatttaaaatatctaaacttatttacttattttattgtttaataatagttatatacattttcttataaataaatttaaaaccatattaaattttagatagtttaaaaaatataattgtattttattagatttaattattattatttttaataattaagtaatagcaactgcaagaaaataatacctagtgatattaaatgtgactatataagaaaaaatgatgtttttttttcaaagattataatttaaatttaaactcactatgtagcataaaatatatttttttaacattgcatttcaattttaaatccattgcatatatctaaaagaaatcttttattatcatttttttttacctaattcacataaagtattttttttaacattacaattcaaatttgaacccattgctcatattttaaaaatatctttctattgttagtttatttaactaattcatgtatgtaatatatatatttctattattgttttcttttgaaacaataaataaaaaatgagtttatacttcttaaagtaatcactattgtgatatcattactcattatagtaactaaaaaaatatttttgtataataattgttttagaaaaataataaaaaaaagagtgtatgatatttcttaaaaaattaaaattattgggattaagctaaaattataagttttgaccttgcttttagccaacaacaatgaatcaactaaagcaattagaaataataaataataataattgagcaataagagcacaaatttcttatagaggttcagccccgtgctagtggcaatagcctactctccttttacttatattaactcgtgagtaaagaagcaagaatttctggaacttcctcgaaagattttagagagattttagcagtataagtgctctattgaattaatgaattaaaatccctgaatagtaaaatgactctactatttataataaggaaagattacatccatttagtttcccaaaactgttaagaaataaaatgggaaacttattactttcctaaattatgtcatttacgtataggaattccataaaaatagggatttaatttatatataaaagagaaaagtatttttaaagcttccactgttgcgtttaccgttggcggcatatgcgaaatgcccctgagatcgactctggtcggatggtaccatttaccttgcatgaaacttttgtcttatttattaaatacattgcatctcatgaataatttactttgaatggcatatcaaggatagtccgcccaagtctgaaaaagatccacgtgtcaacaaaagaagtgtcgcattatcatgtgtgaatcttaggataacgtttcccccccaagtccatatgagtactttttagttggtatgtggacttgcctgacccacgtgctaggtaaatagggtgacacattcttggcatgcaaagtgggtgaacagaaacatccttttaaatctttgagctgttatttcgtatcttgatgcattaaatactctctattttgagaatcacgctcttggggttgacggttgtactacccaagagtactgattatactttttttgtgagaaaaattccaaattttgaaatgtaaaattacgaaaaatgccctttcaaaaacctataaaaggttttttagaatttatttgtactcttttaatcatttcaaaactcaaaacatcataataaaatttcatttctctctcaaatcttcaaaacttcaccagagcttcaagggattttcaagtgactaccatcctttgtatcacttgtctagtcgacaactctccaataatgagtaagttcttgagcttttatgtaatttctttttaatttattgcattttcttgtagaattgcttctattaaaatctggatttattagcttaaatgttcttcatttatgggatttagaatttataatttcattctgaatgtatgtgcatagactataattgttagattcccataaattcccatgttttcttaagaaatttctttaaatatactctgtgcgatacttcgtatgaattctaggtttgtcccattttcttaagcaccttcgaattgggattcttgtcaataggatgaagtttactttttttgatctcaaattttgttcggccagaatgttgaagttatttttctttcaaattttacgtcgttgctcagtccttacctccctttccctctattgtagatgaaccaggatgacttttgggaaggtaagaatcgagtggacgatgacctacttaaattactccacgaggaccaacctatccttcgcgcagcttcgtcttcgtcgagtgagagtttgatgtctagttttgacgagtgggaagtgacaagtgaggagtcagaccctacaaaacctactacacaacacaattattacccagatcgtattgggggtgataacttcagacaattcattgggaactgaatcaagggtatagacaatattttcctacttcttggacatacagggtccgagcaggtttctggatactttacctgagggtgatctagaaccttcaaagaggcctagtgtagaggctaaaatagtagtcaatgttgcccatcatccttcatttaggcacctacctaggaataagaaagtggtgcagactaaacagacttataagaaagtttcgtctgaaggccctcgtcttgccagactaatggtgttattccatgattcgtacgtcaagggataagatgaggaacacattgtgcatgttggtgatgtcgaagtgcaaaaggttgaggattagggtgaggttcgctttgatcaagctaatgaatcggcggttgccctgccctcaatgtctatatgccttttaacagatatggggtatgtaatgaggctaggcaacctgtgactacgcgaggggaaattctttaagggaatatgaagaagcccaccctttcgtgcaccaagatccacccgaggagatgtgggtctctacgccatccatcctcacatataaaatgctagtgaacttggataagaaatgtctcctcggggaagacgttgtggctttcttaccattcgatgacaaacttgctaacaatcctagtgagggcttctatgcctagtccggtctacatgctcagcagagggctttactaccacttcacccttacttccaaaggcaagaaaatttctatagtattttcccaactcagttcacgccaaaggttattaagtattcagtagcgttgttcatgctatacatacaactaggatggggaaaaccttcacctcacaacacaaactagctctttgacttgaaatctagctcggggaaaaatcgctcgagttacttctatttttctcaacttgactgctcatggttggctgacaccaatgtcaagtgagtaaaaaatattggaaactacgtctaggactactatattgtccaggaatgaaggccaagaacttgtcattctaaatggccaaagtttatgatcagcaccctaactcttaggttgagggatagggcccaatcaaatttaccaattcctcgtgaggcatgagaccttttttagttggccgcccaatagaattttatcaagtatggactatacttgcctggtcggttttagatgaagagttaaatgttaaggtacccattcctacatttgtggcacatacttatgaatcaaagaagaataaattgaaagccaataggaataaggctctgattgaggttcatattagaattaggtaagttgttaaggagcctggacgtcttgtcgttaagcctggttcaaggaaagggaaagtcattgttgaggaaatacatgactcttaagatgaggatgtcccatccattcttctttgagaaggggctcctctagcaatcgagggtagaaactattattattaatgttgggaatattttaccaggatctagatttaataacaagtatgttgaattatcatcctaaatatgaattctctaaaaaaatgaaataaacaca

SEQ ID NO: 116236 - DNA, 2189 bp, Cannabis sativa
atttttttggatcggatcagatccttccaatattttaggttcagtatgtattggattggattggatccatccaattcaagaaaaaaagaataaaattttaatgtcaatttttataggaaaacttacaaaaatactaattagttcgattggatgttggatgtattggttttttggacaccccatccaacatttgatctaatccaattagatatatatattcaaaaataatatccaatctgatccgatcacaattagatatccaataattggcggtcggttataattgaagcggtcggttgttattggattgtatcgatttatgcacacccctaactaccaatatataacctcatagttaggttataattttaagtatttctaatttagcccctcaataaattagaaatatcacttaagatatctacacatttaactcatcagactttcataccaatgacctacaattactaaaataatttattttggatcaaactttaatccatcaaaacccaacattagttgtaggttgtccaatgcatacagtggatgttgttgctgtcattgatgaaaaaaggaataagattgatttcggagtagtagtaagaaacagtgaaggacaagtgcttgcttgactagtggtgccctgttcatggaattttgtttcatcaacgctgctgaaggccaaactttgttgcattccctagtggtgtttgttaatctctttaccaattttatatgctgaagtagctctaaggtgattgtggttaaaataatgcctcctaaggatattgttagcaagattagagcttctttccctagcctaattctcgtttatgtttcaagacaagctaatcctttagctgataaattagcaaagaaaaggtactatatgactagttaatgagttgctatggaataaaaatagtattcacattattcaactattacgtagtttacggtacattagtgtttcgatgagaaacattattattttgctgggaattaataatatgaattttagttacaagttgataggttattttatttatttatttttttttttgaacatagttgataggttattaaatgataaaaaaaaggttgagttttgcattattttcttagtcaatggcccttttaagtcaatgagcaacataaaataaatattttaatatctatttgttcatagattattctccacccaattaactacataaccataaccaacaaccaattttcttttctctccaaaactctctcctcaaactccaaattctcttcccttttagtttcatgaacactccaccagatttctccggcggtggctactggcagcagcagcagcagcaaccgcctccgtcgccgccaaagagatcccctcagctccaaggcccacgccccactccattaaaagtcaacaaagaatcccacaagatccggaaaccacctccgcacccccacccacacccacagttccggtatcctccgcctccggccgatgactaccaacaacaacaacaacgacatgagcctgttataatctacacagtctcccctaaagtcatccacgccgaagtatccgatttcatgtccgtagtccagcgtctcactgggccttccccgccggcgccatccccttccggtgccggggatctctccccggcagcaaggctggcctcaattgagaagactagcccgtcagatagggatagggacagggagaggcccgggatcagcggcagcggcggtggagatttatgggatatgatagagggggttgaattgggtcagtttccgggtatattatcaccggcaccggcgactttgcagccgatttcatctgggtttttctcgccgttgacggatctttcgtttttaaatgatctgagtccgttttggcataatagtaacagctttatgccgagcccttcaggcttgctttcggctccattgatttccccaagtccttcgtcatctgacatcttcaacaatttgtttgacttttaaacctcagctggtaaagatttttgtattcgactgacttttctttatattttttattcctctcctagtgtagttatatttttaaatataatatttttttttaagaaataattttgttttgccggtatatttgaccgacttccttaaatgagtttgtagtttttagaagtaggaagagaaaaaaa

SEQ ID NO: 116237 - DNA, 2640 bp, Cannabis sativa
cccgccctatactaaatttcaaaatcataccccagaatttttctcatttatgatgctttgatactactagctgttgttctagcaagtatttcaagtttcattgatcctttcttactagaaatttgtgtcccaacaaatagggctgcctctcttggacgacccacactatggccattaattgatgctcatatacctatttagtgtgagcttaggaagattagacttgattgtaatacacaacaggtttgtgattttgtatcagaatttcccctaattcctgacctcgatgcatcaacttctaggacaaatggagctgaaaaaacctcccgagtagtgaaggaccaacacaaggcttatttctttagctagtctgtaagaggctgagctatattgccataccctttgaaaaaatttcgataatgataatagcctgtaagtttaagaaattcctgtaatccttcaatcgactttggaatcggccaattgttcatggttgagagcttgttggggtctactgaaactccctcgatagatatgatatggccaaaatatttcactcattttggggaataaacattttttttcggttagcatataacttgtgtcgctgttgttgccccaaaacgagttccaagtgttgatgttctatcgactaggttgtacaccagaaaatcatcaaaaaagacccaaacaaatttgcccaaaaattcccaaaatacatccattttgaggcttggaacgttgttaggccaaagacatgacaagaaactcaatgtcccttgtgagtgcggaaagccatcttctctcgatgtcgtgggttgatactctaatttgatgatacctcgatttcatgtccaacttggaaaacatagttgcactgtacaattcgctaagagttcatcaactccaactccaactcccatctttctttcaaacagactgcattgggcttgaaatagactcatacttggtcgaactatccctactctcaacatttcttgcattaactgcttgatctcatccttcaacacttgagcattttgatagagatatcgatatagggccatcctcttattttgagagtattttgtatttgcgaggtcgtttaggaggcaatccttgtggcattttgaacacctactcatagtggtgtagttgggttaatatctgcactattggaggctgctagttggtcatttcacatacggttagggcccccaactgcacccaaaagccctgatgctcttgttgaatggtgtgaatcattgccttaagaaaaatttgggatttagaaaggttaggatctccttgcaatgtcacccacattcttcctgtcaccatggtccgccaatttacttgcttacttcctaaggtttccaaccttttgattcctaacatacatctctctaggctctccaatggaaataatttagtgactattgcccccaaatccaattaattccacctaaccataattccctttgtgcaaacaacactctagtgcctagtaacactccataggaagtagtggtgatgggaatgttcgttaaggacacgatattcatagaaatcaacatgtgttgccccattgtctatccaatatcaataagacatggagaatttatatgcctcttatctaacttcttgtcaaacttttaatatacctcgtgtgccctcttatctttaaattagctcggtcaatcgatgtatgttaggagtcttagggagcttggtggaaccaaactttgttgaagatggatcatggagttgtaaaagacgatacatgtgcaactggtatcgacttgtcttgacatggagtaaatgaagccttggttggaataaggttcggtttcgaattgggcccttgagtagtttggcccatgtacaaggattgatgaccaacttatctttattagcctcaacaacttgttttggagatgggacgacaaccatgaacgaacatccgatcgattttggaataagggaggagggtttttgctcgtatttagcctccacatcaatcgacacacccaccgaacactcaacttgaatcatccaattagtgagatttgacaatgtttagtcaccaccacggataccacggatgaggcaaattatcctcacttgctcgagaagagcttgatccattagctccttcacttgtgctatcttttgtgtaactcttcctgccatagatggcacaaattcaatcttcgagtcgactcacccaacataaattaggaatgagtgctgtgatacataaattagaaatgagtgctatgatactaattgcgaacaatgagaggaacaaattatcttgctaagcacaattaatcccaatagcaacaaaatagtagccaaatagtagagaaatataaatgtagagaagactctcaattcttgcataacttcctattcctttccaacttatatagggttcctttggtacctaaatcgtattgcattgtataatattacattaatacccaagtaacttcaatacccaagaaatggttgagctcccttaattctttcgtgtgaaactgggtatgaatgaaagactcaaggggtgagatgctttcagtatcatttttagcaataacgatgtcatcaacatataccactaacaaaatgatacca

SEQ ID NO: 116238 - DNA, 2035 bp, Cannabis sativa
tttattttctatttttaaaattaaaaaacgaaagtgattacagtatttttatttttcaaaaataaattttttaaaaataaaaattttacttttatttttgtgattaaaagtacaaaaataaaattgttacaaagggtcttaaaatattatgaaagttaaaataagaaccggtaagtttacattaattaagtgcaaaagtacattagtttctcccattaagaagcctaattattagagtaagggagtttatacgtacgtacgtacacacaacggaaaataaaaatagaaattaactttaattagccattattattgacataaccgtttccgttaccgttatcatcgtcgttgttttcttctttataatccacacattcattcatgtaatactcaaatttcccgacgacgctctcaggcacggaaacaagaactctaacggcattaacgtcacctataacgggcaaaaacaagcagtaaatatcactcgctactgttcccatatgcagtggctttcctctaccgaaatccaaatcctcaagccctagtttagcccattgagatatcaccagactcatcgacagatccgttctgaccgttttgtcctccaaaagatcgatcatggaccttacgcagccatcgtcaagagccgacttagccacctggaccgactttaccccgtggtagaggttgtcggagacaagatctttcacggttgaaagcgcgcaacccaacacgaatccattgccataatacccctgagggatctccggtatcaacttcttcctgacatttacggagaaaagaagcttgacggtgagggaaggtgatgagagcagctggtcaagggagcgaatccaggagcgccacgtgtgagaagcgagggcttcgaaggttgtgcacttgagggacggaacgcactgtcgtttaaggcggaggagatgagctggagagaaagtgaatgaagacggaacgaggggctgagattggaggaaggtgaagatgtcgacgtggccggtatttgtgacaggtttcgtaaattgtgggtgagtgaaggtcatttgttggtgttttcggggtttcaacacgtggcgagagtggaacggtgtgattggtagatctagattctctttagctgtgtggtgggcccacgcgtgtaggaactgtgacgtacctattgcgtcgcagatgcagtggttgatggcggtgcacactatcattcctccacaacgaagattcgtcaccttgaaaaaaaaataataattaattaattaattaaattaaaagtcggaaatggaaatgtcatacttactaattaattaaccaaccatgtattttatgaaaggacccgcactccactcactcactcctatgtagttcatatttatttatttatctatttgactaaggaaaaataaaagtagctactttctttcttttccgttttttttcttgataccatttagctttctttacaaccattttttttcttaaaacattgccgatcgcaacaacgtggtccacttgattggaactttgtcagtgagaaagaacgcacataactaaaattataaactgttataaaaaatatgttaaatactattttagctttgtgttttgctaaccttattaattaattagattttttattttgttaaataataaaataaatattatattttttaaaatagtataaataggactttgaattgactttttgtcaaaataaaatttaataataattttatatagaaatattataacaaaaatagatatattttctataactattcgtgttaaaaatgatcttaatcagggtcttattttgaaaaatatatggtccattttattatttaacaaaataaagagtgtaattaatattttttataaaacacaagatctaaaatggtatttactctaaaaaataataagagaattaagctaaaataaaagggctatttacaaaaatatgggaaaataaagataagttttgatatatatggcataaaaacttaattacactaaatatgacattttt

SEQ ID NO: 116239 - DNA, 1328 bp, Cannabis sativa
ttatgtaaaaaaaatagaactttaaaatttatgaatatgtaaaataatataatatgtaaatatataatgaaacacaacgtgctttgcacgtagttgccgtctagttacgttaaaaaattggtaaagattggcaggccaaatgtggttcagacccttggattccaggccacaattcttttcttccaacttattatacaagacctccaaatgaaatagtagcaaatctcattacagaggaacgacaatgggatgttaccctactcaatatatattattcagttctggatgtagataaaattttaatagttccattgagtttttttatcaagcgaagacaaacttatttggcatcataaaactaccggcatctacaaaagaagttgatcaatcttcgacttcctctttggcatcttactggtggaatttcttctagtctcctcaatttccacaaaaagttaaaatctttgtatggtgtgttctctatgatgcacttgtagtagctacttcattggttaggaggaaaaccattaccaatcatacatgatcgatctgcaacatgtcttgggaatcaataagacatgccttttttgagtgcaaatatgccctgtccgtttggtgttcatctcagttagtttttgattgggacaaatcttctctttgcataagggtaattatttggttcacgtctctattgtgtattcaaaggttgagatggagctaatcatttgtactctggtgtatatggatagagaaaaaccgtgtgattcatgggcaagctactaagcttgcaagggtgcttgcctctttttccaccacttcttttgagctgcaaaagttaaataccatcctacagtaagtcctactctgaggctatctccccaatccctgtgcccgtgccatgaaagctgctgactatgggtgaccttaaatgaaatgtcgatgcaactttggatgcaaatcataatattattagagttgaagttgtggttcgagatgagtatggtcaagtaataactaccttctcaaagtccactgttagtaattttgcatcacatgaaatgaaagcgaaagtaatgtttcatagtttgaattgggtccttcaaatacaattgccaatcacacgaattgagacaaatgccttaatggtttcaaatgctttgagattttctttttttttttttgcaattcttcttttaaagaattttttttagcgaatcttctcttaaggatttaattatggatatttttagtagggaaatttgattttctatacttattaaacttaatttttttttttaaaccaatacattttacactacaaaaaatat

SEQ ID NO: 116240 - DNA, 803 bp, Cannabis sativa
atatattcttaaaacatcattaattaaacaaaacaaaatatttatatgcacactactttttattagaggaaataatttgtacgtgttccttattgtaattacaactacaagagaaattgtatttttctttccaaatgtggacaaaacataaaaccaacaacaataattgtttcataataaattgagtactaatataataattacaattgcttttgggtcaagtaattttctcaactgatcaatatatttatataataatataaatatatatatatatataacttaaattaattgattaaagacagaaagaatgatgtcgggacattgacgggccgttatttcaaattaaagaactgcttttgcacccttctgttatcggtttgtcttttatttttagagaagccaattatatggctcacattttagccaatcaagctttgttatccaaagttagcgctatgtggattagggtttcaccccttgtgttcgtcatgctcttcgagctgaggagccattttctttgtaatcgtttaggtttataaatgaattccttttttaaaaaagtttaatttgttaaaaaaaatacacgacagattcattaaaaagctcataaaatcaactaaattttctcaactgatcaatataaaaaaaacaattaatactatttgatgcatatacttaattcagtggcaaatgtcagtagttaattaataggtttttttacacaaaatgacaaatttgataaattatttacatttttaatgtcaggtgccatgttttacttttatacaatttaacttttt

SEQ ID NO: 116241 - DNA, 1406 bp, Cannabis sativa
ccaactgaaaaatacaaaaatcaacaaaactaaccagtaaaaaattgtgggaacttaacaggcaatatgacagcctcttgcaaagcctgtttagcactttcaagcccagccacatcattccacttcacatcaggtttctccctaattatcacagagtcaaggccagccctgagctttgcttgttctggatcttcaccatctccacccttaggcttcgcctttcgatcagaattgacagcagcgttaccgttcgaattcgctctgttctttcctccactatcaagaatggccctaatctcctctgcccttctcaagtactcaacaaattttcgagttatcgcctccttaatctgaggattcttctcatacttcaaatgggtcctgaagtactctaaagcactcatatacaagggaaatgccttactataatttccagcatcatcctcctcaactgccttcttcacgtactcaactgcgtggtccttaaagttgcaatacatctttatttataacaacaaacaacacaaaaatcaaaaacccacaaaaataattcgatcttgggtacaactatacagtttctctaatataatttgtcaccacaaccacccaaacgaatttctttcagaaatcaataaaatgataaaaatgatcatgaagtttaaaaacatcaaaactcaacaattatacatacccccaacccaatactgaaaccacccactagtatactattccaaaacaaataaatattacaaaattaagcatgcgtacgtattaaattacaaacaaattcaatcaaaatacaatttaaaactgaaattaataaagaacagaccttgagttggagatcgatgaagagagatcgtcagcaccaaaattgtgaaaggcataaaaggagcgtgtatgtgttttgtgacataagattttttgtcagagagagtaatctaccaatgaattttagtcgggtctgtatcacaattagacttttttttggccgaacgagttaaaagtgtatttataggtaataagataattaagattatattagccgccttaatggctattttcaagcttaggttgtaagcatgctaatttagtcttctatttttctttttatttgctatatgacatgacaaaaacacagactttataaaataaaatacaaattgtaatttggaagaatagcgacttaagattaagaaattaactacttgtattaaatgatttaattcacacattgaattaataagtagtgtatctatgacaaaagacatctttttaattagctttattaattttttgggtttaaattttgtttagtttatagatcctaatataaagaaaatttatatagacaaaagcagatatactatctatggattcacactgtaaagttttttttttttttt

SEQ ID NO: 116242 - DNA, 1594 bp, Cannabis sativa
tttaatctttcaattaaatttataagattaatgtatgccatgaaactttttttttttaacattattaaatttaaacaaacaaaacaaaactacacaaagtgaggccaataaacttcaaaaatagctgagaccctcgaaggaaagctttcaaaccaaagagagaaacattctttgttcttataagctaactgagctaagtgatgggctacttgattgtaacacttcgggggtgaaagatggtggcacaattagatagcataccattagcaacaagatcatctagaagattgcaatatatgcattccatggttattcaaattgaaattaattggcagccaattcaaacaaactctccaaacattttttttatcttaggactaattgcgtgccaatccccaaataaactttcaccattgttccatgtgagtataaaaagcgcattctgctttggcatcaagcatacctcaagttacataaccactatgcactgtgtagtttctgttgggtgtgaagtggcaaataaggtcgtctggccactgagacctgctaggctcccccttaataatccaggtgacatcctccaggtgaaagaggttgcagattaacgactcattcaagttcccattatcctgaatcagtgtgttgatcatggtgttctcaaggacagcaagaggggttcgaagggagaaagggtaaggtcgaggcagccaacgatcttcattaatgcgcacattatatatgtttggatcttattctccaccaaagcccatgttccaaaatctcacgatcccagagcatgctatgtctcacatataggaactaaagtgagatagcttcgcctccatgagagaagtattagcatagtaactggttttgagaactctagccagcaaagactgagggtcgataagaactttataacataatttggctagaagagcttggttgtaatctcccgtaggacaaaaccccattacaccacgactttttgaaagacacttcccccaatgaagtttttgcttggaagtagatgaaccccagcagattcgagcttccatggtatgaatatcttcgatagtgcccttaggaaagcaaaaacaactcataacatagcaagggataacttgtaccacaaccacttttcccaactgaatccacacaaaaacaaccagtaaagccaatatggacacgaacccactccatctgaaaagatgaagcctttgttcagagatgaagatcacaataggagaatgcttacacgctaaggaaaggttggaatgcattgtccaagggttccccaacccttgggcataccaacaaaggcaaatcattgctcatgccactcaaggttcgctgcttccagatcaccaacagggtttatggaacaagaaacatccccctccacatactgtttgttcatgctctcctccatcgtgtcattatcattcgtagccaaataaatagggtccccaattgctcattatttctgataagaattagttaattgtcattagtgttaattgctctgttttcagtgcttggtactaaggtgtaatcaacctttattttctgttatttcttgttcccttggtgc

SEQ ID NO: 116243 - DNA, 2519 bp, Cannabis sativa
  modified_base (2481)..(2494): a, c, t, g, unknown or other
cagaagtttggtaaagttacacccccccccccccccccccacaaaaaaaaaagaaaaattaatggtctcatctgtatttgagaaacttccttggaaattgtgtaactgtcagttacgttttttcatgcacatttacctatgtaagtagtgatgacaactaaagatttaaaaggacatgacaggatccacgtcaggcaggtgcgaaatcctaaaggtcggatcacatgagaaaatatacgtgccatttaatcgtacaaagaagaaactaggaagtccacgtacgaccagacgctcctacatggacttagagtgcaaatgttaccctaaaattacccaagtgacgtggcacgaaacaaaatgacacatggcgttaaatggaatgctagtaggcatgcaacaaatccagaaggtagaagattggacgaattaactggaagacaaggaagtataacgtactatgttaaatttgttgaatcaaccgagacaattcagcattgacgacgaccaagcgtccaagtagttggagtgaactggccaatcattgtgaacgaccaatgaagattaagttgatttctttaaaagaacgttaacaaggtggcatcctgcccgggccatccgaccagaaaaaataatggacttattccaaatccacaatattaactccacaattcctgaggatcaggtcattataggtatctagaatcgtgggattgagcgaataatcatcctttaatgaatattctgtaattaatatcatttattaacttgtaaccccatagatagtggcttatatcactatttagatggatttttgatactcagagagagctattatgctacaaaaacattcatttgaaatcctttggagaatattaagaaattcacttgactctagttcttgtgatcttcatattccaataagaaatactaagaaaggggagtaggttattaccatataattgggaccgaacctctataaaatttttgtgtcgtttatttatttatctcatattcaaacactttcattgtcgtaacattgactatgcgttattgacctaaaacagagtcaacatgttgtttggccaaatattttgaaaacagttttctaagaactaagttaataaaaaacaaaaaattatataacatcaaaaagttattttctatttcaaaagcatattttcttacattttctctctcacattccagagtttggatatggggtccggggctggggttgggtcaaagtctgatgttcgggctgaggccgagatccgtgactgaggccgacgtctaaagtctgtactagggtcagggtgggttgggttcatgtcgtgatgtataatattgaaattttcttttgggaaaattataatataagtctccaaaaagttcactttgatgcagataagtccctaactttaaaaaattactataatagtccctaactcgagtttggagattcttactgtaatttttcaaggttgaggatttatctacatcaaagtgaactttttgagaacttatgtcacaatttaatatcaacatgtgactttttaggagaaactaatagatttattctaagggagtatacagttgagaaagggagatgtgggttgtggtgggttgtggattgtggctagtaaagcagattgggaccgggtagattagactgagagtgaacgagaagaaaataaattagaaaagataaaaaaataagttaataatttagtttttaaaataatttatttatttattttaaattatttttaattaaaattataatttagaccaataaaatatcagcatttgacaatcttgggagcaacaagtcgagctattaaatttggcacttacggactaacgataatttcaaacttgaggactgttactgcaatttttcgagattagagccttatgtgcattaaggtaaactttatgaaagcttttgtcgcaatttaatatcaacacgtaacattttttgaagcaactacgtatctgttaaaatgaaaactaacaagcttataaaaatttcgagcttagagactatttttgtaatatttccaggttgcagagttatgtgcatcaaagtagatattttggggattatgatgcaattttttcttttcttttccttaatcttcaacgtaagagcatctccaatggagatgcaaataagtggtggaaagttaaaatataactcatttaacaaaaagtatgctctaatggtgtgccaaaaagtgatgtaaatttgttgctaaatttggcacaacatttgctgtgatgtaaaatttacatcacaataaatacactacttttttatttacatttatgtcatttgtattattttattagtataattaactatagcataaaattatgaaacatttatattatttttttattgtcttacatattaaaataataataaaattaataataaaggaaaatgatctcatatactaattttttaacttttttttnnnnnnnnnnnnnntacggtttgagtttctaaagtagtt

SEQ ID NO: 116244 - DNA, 1495 bp, Cannabis sativa
atttttggagttttgaaaaaagagtcatatttttcatagtgtaaaatgtattggttcaaaaaaaaaaatttaaacatttttaagtatagaaaatcaaatttcccatttaagattagggatggagtttagcgatgaatagcgatgtttaatgatattttgcgtatttagcaatatttagcaatgattttagtgatgtatttgcgatatgaaactaaaaaatgcaaagcacgtcgctaaacatagctaatcattgcaaaaatttgaatgtgatttagcgatatttagcaatgtattttactgatgttgcgatttagcgatatttagcaatgtgttttagtgatgttgtgattagcaacatttagcgatattgtgaaaattagaaaaaaaaaatatagaaaacgaacgatgggttgagaacttcagtgatgagtggagatttcaggggttttagggtggttaagctcgtagattttggggctttagggtggcgacgtcaagacttagttagagtgagaaaattagagagtgagagaaaaagagagagacttttttaaaatgtaagggtatttttggaaggaaaatatattaaaagtatagatagcttaattctaattgagtgatatattaaaacatcatattttacatttaagcatactaagtcaaatttctcatctaaaacaagtgaaaagactaaaattgtaatagccaaaatatcctttgaaagggtttaaaataatcgatttgactagcatcaagcaaaagaatcacccaacaagaaaaataatttcttaataatctaccataatagtctactatatcaatataaacaacaaaatatttatacatcttgccccctgttaattttgtctaaggaactaggttttttcttcctcttagcttgttagaattcagcaaggtgtatgaggttgcatctcaaaactaattggtaataagagaagaaactcattcatcttatatatggtattactttcccacatattagggatgttaactatttctaatacaccttcttcacgtttaggcctgaaaaagtgtgggataatgaatgagctttaagagatcacaatatcgaacatgatatttgaaaaattctcaaaataaataaatataaattagtattctgaaaattagccaatcataatatcaacttaattaatgtctcaatattatgatttctaaaagagaaatttgattatacatgcatactaatgggaaaattatttccctaaacttatgcatttcaaaattaaaaaaatatgaccactttccattaaatccaaaaatacccctcatttttcaaacctcaactctctctcttcctctatctctctcgttgttctctcattatctcactctcaccaaatcacgaaatcaccaccactaagcaccaaatcaccgcctacccagaccaccgaccaccgtgagacgcgactccaaccctctaccaccgagcttcgaacggagatgtcgaagg

SEQ ID NO: 116245 - DNA, 1983 bp, Cannabis sativa
tgttatgttcagcgggtattggaaaaaatgggtttctgcagtcaatggatttcacttctcatgggttgtctgacaacgaacagcttcactttccaattgaatggtgacacaatgggttctcttattccttctagagggatgagacaaggttgcccccctctcaccatacctttttttaatttgttcagaaggtttttcccgtttgctgcaacatgaacaacacatgggtcatcttcatggctacaaactcactaggagatctgaacccataaatcacttactctttgccgatgacagtttgcttttttgctatgctaatgaagaatcatgtcttgctattcagcgagtcttggacacctaccaccgggcatctggtcaatccttaaatgctgaaaaatcggtaatgtcattttcaccacatactacactagcagcacaagtttttttccatcgaacgctctcaatgccgattcgcgattgtcatgaaaagtatctgggtttaccggcttactctggacgtgataaacaactcatgttgagtgatgtaaaagacaagatttggaaattgatgaatagctggaatgaaaaaatcttttcggcaggagggaaagaaattttgcttaaagtcgtgattcagtcaataccaacttatgctatgagttgtttccgtctaccggacactatgtgcaatcaactagaatcaatgatgtccaacttttggtggggacgaacggaatcaggctctaaaatccactggcgcaattggaaattgatttgtaaatcaaaaatggaaggaggcatgggttttcgctcttttgaacaattcaatcaagctttattagcaaaacaagcttggagactccttgaaaacccaacttcaatgctcagtcgacttttgaagagcagatattttccacataatactttccaagatgcaccacatggtcattctccatcactatcttggcaaggaattacacatggccgagaacacttattggctgggctttgctggaaaattggggaaggacgaaatatcctttgtgggactgaaccatggctgcctggtcatgacactttcttgccttttctttataaaggacccccgactgcgatagttgccaatctcataaccgatgagcgccaatgggatgttcctctactccaacaatactttcaccaagcagatattggaaggattcttaccattcctttgagttacttcccaagaaatgacaggctgatctggaaccatagcacaaatggtgtgtatacggtgcaatcgggctatcactttgcaacaaaactagctgatcaaaacatctcatcaacatcgatgactgaagcatcctggtggaaatttttttggtccctgcaattacctgaaaaggttaaaatttttgcttggcgtgtgatccatgatgcactccccgtggcaacatctttagtcaaaaagaaagtcataaccgatgctacctgctctgtatgccgaaatgcttgggagtcaattggtcatgccttttttggatgtcgatacgcaagggctgtttggcgctgtgcttcttttacttttgattggaatatggctgctgctttatttaaaggtgactatttgaaacatctctcttctacacactctaaagctgaaatggaacgcatcttttgtactctctggtgcatatggtatgaacgcaatcaggtagtccatggaaagtcgccgcgaactgctgcctcacttggttccttctcttccaactacttgcaaaattttcgtacatcgcagcagaaatatagaacaccagcagcaaatactcctctgattttggcaaggactccaccacctgctacatggcagccaccacctccgggtactttgaaactcaatgtagatgttgccattgatgagtcacgacatattattggtgttggggctattgtgaggacttcttcaggtcatgtcgtggctgctttttcaatgcctac

SEQ ID NO: 116246 - DNA, 3064 bp, Cannabis sativa
aaaaaaatttctctacatttagctcatgaatagtgaagaggtaaaatgtattttatattttctctttctctttttccttcaattaattaatttttttactcattttcatattttttatttaaatgacatagagaaaaatatagagaaattaatgtgtgagataaaataaaaaaaaataatgttttagtgaggtattttaaaatgcactcccatcagctacatatgtatataagaaaactacatatatactcactctaagattttcctcctacatatagctaaggcatgcagctgctttattgtatttttaataatttatttttgtcagcattcacattctctctgtaattaaacattttttaataattttttatttaacttttaccttctctctctcttactatctatttctttattattatttttatttttattttaataaatataatatttgaatgatgtaaaaaaatataaaaaatttaatatgtgatataatgtaaatatgtgatgtaaaataaaaaaaattaaaattttaattaattattttaaaagataggtagataagtactcttaataattactttattttattatttaaaatatctcactaaaatattttttttttttattacttcacacatttacattactatttactctatacatcaaattctttatatttttttctacatcatttaaatattatatctttaatttttttttattaatttaatattatgaaaataataataataaactagaatataatttttttttaagaaaaagacagaaacataaggtataaaaaaaataatataaaatgttttagctgatgaatcgatgttattggacaccactactttttataggtaacgtcctacaattggttatcgatattttttaaaagttatttttttatataagacacggtatttaattacaccaatatatagcagtataacatcaaggaaaatactaggcaccaataattttatttagtatttttgtgatgaatagtttgtaattatagctacatttagctaagaaaatagctcatataattctttagctaaattagagaccattaaaattcatttattagagaattttttttttaagctttagctattttttttcttacctcctagctattacaaatcatttattgagaatactcaaataatatgtagtaattataattaagtttatgataatagtgcgtcatatataatatatagcatatgtgtaaacatttatattatttgtaacactacaggaatccaagagcaacaatttatccaacagttgaaattccaaaattatataaacctgcaccaatggtggctaacttttcatcaagaggtcctggatattttacagaaaacattctaaaggtcacacactctctctctccctctctttctctctatatatctatatatctatatcctaataatgatgtgagtgtaatatattaaaacaaaacagccggatataatggctcccggagcggcaattttagctgctgctagggacacaacaaatttcaggttcgattctggaacctctatggcttgtccacatgtatctggggctgctgctttcatcaagtctgttcatcctacatggactccttctataatcaaatcagcacttatgacaacgggtatatatatatatatatatatatacatacatacatacctctctctcaattctataagttgaatttttttaaattgatgagtattttttttaatacatttattatttagagtaatttactgtataaatatttaaattattaaataaaattaaaatatatatatgagctgaagttttgtttttttattgtgcacaaactagcaagtgcatacgacaacaggggaaaaccattaacaaatgaactaaacgttatggcaagtccacatgaggctggatgtggagaattaaaccatatgaaagctgtagacccagggtttgtattcaatacaaccacacaagactattttaatttcctgtgttactacggttatacagaggcaatgataaaatctgtaattaagggagtaaacttacaatgccctaaaaactcacgtccagaactcatcacaaacattaattacccttccatttctattggtaatctaaaacgacagcaatcaactcctacaatcgtcaaaaggactgtaaccaatgtgggaccctccacctcaacatacactgctcgagtcaattctcccaaaggcttagttgtaaaggttaatcctgatacctttgtgttcaacaacagtttaaacaaggtttcttttgaggtgtcgtttgatggcaaaggggcttctaatggatataattttggagatattacttggtctgatgctcttaatcattctgtgcgtcttgtgtatgctgtcaaagtagtataattctacgtactttgctaattatatagtaatatatcttaataataatcacatgtcatgattcatgtgtgcatatgtttttacttggcaaacgcttgttttgtccacttaaaatagttctatttgaattttgtagatcattatcttctacaaagtttgaatttaattattgtgtaataaaatatattattgaataaataaagtttttcttttatcatctcctttttttttttaattattatacttaagaattagttatcccccttaccattcaacaacagagtctctttgattaagaaaccgtgtaacatcacattcttttcctcccttatgaaatcttgatgtaagcaataattgcattactttgtagcaatactataagtgtaaaggcttagcattactatgttttatgttttttattgtactttctttttcttttaaagaaatttttgttgtgttatagtcttacaagacttttcctttagttgttgttttatcttaggtgtcgtttgtcattgttttgtgtcattattgttgttgcttttaccaaaaacatttatatatagttccagaaatgctaaagggtatcagtggtgcctagcaccctcctatgtgtcaatatcgctattagtccaattaag

SEQ ID NO: 116247 - DNA, 1876 bp, Cannabis sativa
gatctacttgtgagtagatctaagatcttggtaaaataattccaacacatatttggctgggaatttgagaaaggccttagatagatatgcaaggtcttagtgacatgagccaagagcgaaagtattggaggtttagaacgtcctctaaactctcaatgccacaagtgtgatccaatcacatttggagaatctaactcagatcatgtcagctatcatcacaacgatcctttagttgttgaggtgtagatagaaaacattatggtggcaagggtgatggttgatgatggagcatctttgaacattctatttataaaaatcctaaagtggataggtttgtcattcaaagacatagagccatgtgaacagctaatgtatggcttcaacagaactgggataactccatgtggaatgattaatttgacttactgccagcactgcccctaggcataccaccatcatggccatattcatagtggtggacgtgaagtctccatacaacatgatgcttagaaagctagctttgtacgacctttgagccatctcgtcaatataccacttgtttgtcaaattcttgacaatagctggtatcggttacctccttggtaatcaagggactgaccgcgagtgttacaatgattcactaactcttgcaaagaagacctcctctgttgttccaacattaggggggacgaacaagacctctactgctaaggccagagtgacaatgatgacctctgaggttgtaaccaaggagacaacagagatggcacccaaaaccagttgaaggtgcacccaagacagggagtacatcgacccttttttaggaaaatagactagagagttggtttgattgaggaactcgaggaaattcccctcaacacaacagacctgaccaagatggtaaagattggtaggaacttgatggaggcaataagactagctcatatggtttgcctcaagaaaaaccaagacatcttttcttggtcacatgaggacatgattgggatcgaacctgaggtcctctgtcatgccattaacatagacaaagaaaactttaaacatgttcaacaaatatgttggctccttcacaaagagctctctaaagccctaaaggaagaagttgaaaggttacgggaaaaccactttattatggaagctttctactcggcctaactatccaatcctattctagtgcataagccaaatggtaagtggataacttgtgtgcacttcactgagttaaataaagcatgccctaaagacatttttcccctaatagataacttggttgatgccacaaccggccatgaactcctcatatattcatggatgccttttttggctacaactaaattagcatgcacgcactagacgaagagcatactagtttttggatagacatcaagctatagtgtaacaaagtcatgcccttcgaactctagaatgcgggtgctacatatcaaagactagtccaatgtatgtttcatgacttgattaggaaaagcatggagctctatgtcgatgacatgctagttaaatcaaagagatatgaagaccacatcaaagatttgcgtgttcgattcacgtcgggttcaataccccaaagttaatcccactcttttacaaaatcaaattaaattaggtaatgattagcttttctctctgcttaggccgtgcagcactttgttgaagctatggcgaaaacacgatcgaagaggggaaggaagctgaaatcagattcgaaaaaaccgaagaaagatgggaatcgagttgggcacatggagctacaatcacaaattaatcttcctgatgaggttgaggcgttagaaatttctgggagtgaagacgaaccagatgaaattgatctggggagaag

SEQ ID NO: 116248 - DNA, 1512 bp, Cannabis sativa
gtgtgaacaaaatgattaaagagatgaataagaaaattgagatggggaagagcatgggatattgcatggttgaggtgatcaagtcatgcagctcctttgagttgcttattagagccattttcatgatattgcaatgcttgggcactcacggtttttttttggttgtagatttttgagcataatgcttgggctaaatttaaaagcccttttgtactcagaatgctaatatttcaatgaagttatgatttcatcaaaaaaaaaaaaaaaaagtttagttcacttataaattttctttatttatattaatctttaatatcttttatagctaattactaacatctttaagaaataattagtggaaaatgtttggtgctaagcactattaaaagtatggaataaaaattagtagtggtgactacatcattctaagtgttattacgagaatattgtcctatgtaaaagtattgagccatatataaaaacatgtgctacttcattcataaccaattgagtttgagattaaactttataattcttattaatattgttattgatttaactaaatattatattattagacgtgacaaataaccacactacacaaacttcacagataaaaatattcaatcaattatatttgtttaagaaagttcaacctgtcaatataattccctacttatcattagccacccgtacactttgtaaattattaaggagaaatattatttgtccaactaagtatcaagtctatataatataatattttagggagtacatagctaaccaatcataacgtgacatgtcgagaaagtactaagcaccactcatgtcttatagcaatgctcattatcaaaggtaacagttattgaattaaagtatgattggatatttaattacacttgttaacaattcaatatttgcggtgttgtttttactcaatttccatatcattactgttactctagagaatactccacaataataatgttaacagataaacgacaattggtcgttggggtgttcctgaattctaatccaaatcttctttattatcatcaaaaaaaaaaaaaagataacaataaagccaagaaaaatattgagtaacaaatcaattcggccgactgccactatataatagagacaatctattatttatttttttaattatttttttgttattttattttctttatttattttttttctgaaagaagagacaatctatcattttaaaatatattcttgcttattctggtcggtattgtgcctcagacttagcaacatatatacctaatattacgtgttgtttttcagatgaaactaatattacgtgttaaatgctcaaacttgtaaataggtgcgtgtttgaaagtaactgtgtaattattaaataggataattactcgagtagtaattacacagtataataattacactatattttaaaatacaaggtgtttgaatataaagtggtaattacatataaattcctaatatcttgtttggcaaaat

SEQ ID NO: 116249 - DNA, 2956 bp, Cannabis sativa
agtcctcgtgggaacgatctcacttacctgagtattacttgttaaaacgatacgtatacttgcgtgttggatttatcacaacaaaatttaattcaaggatgacttcttctaaacattcggtctctcccccatcaatacaattgcatttctattaatacgtaagtactaccttttctttaaaacttggttttgatttttcaatttataaatcacaggcatttacttattattattttttattgtattgacagcggtgtcgaagaggcttattccaactcccgagatggagaaatgacacaagattttcctaggtcttccgtttggattgcgatcagtcgattttttactgaatgaaatcaatctgaagacccgtaatcttctcggcagcaaacagtctacctacgactttaagaatccaaaatattcgaagtggcagcaagttctagttccagctgacgaggaagacagagattacgtggctcgtatctacttcttgaagaaagtatcctcttaggaagttgaagaagaagcatctcgaggtaataattgtggatggtctcccacagtacttaggggtgaacgtacctcgctagttaaatttaaggatagccagtacaacttttatatctggaattgtgtagatcgcataacccgtaggtttgacagctggtaccctaagtatcatgtccaattaacttgtaatagctcctacttcagattgctgaatactatggtactaatttggatagggcgagccatctagacttagactgggaattgtctccattaaaccccctttgacctatatatgatcattggttctagggagtttagtagttaaaatagtttttcctcatcctcgtctgataattatggtaaattaagtaagagtttaatccccaccttctttttgtttattttggataagtgttgacatattttctcttttcctcgtagatatgaattttgaaaaccttttcatgagcccttcaggtttcaagaaaggtaagaaatgaattgttggctcagaaacttcctcgggaacaaaccctgaaccgttgaagagagctaaaaagaccacaacaaaaataaaatgtgcctcgaaataaatttttattgagcttgacaatccccagacaattcctccaatcctgccagttgcgaacaacgatgaacgggtccttggatatgttcatcaagttaagttctcgggttctcaacccgagatagttttcttggagcctacctaccctttgttgaattgtgtcggcattatgggcccacaggcctgttcgcagcttgccacttcttgttggcgtcacttccaatctttccagcatgatgactaggattttgtcatgaattagattttaagagcttgtgtgagaggagtttaaatctctctttatcgataagtattaatcttcatttagttttacaaaacttctttctttacctttaatatcctcttcctaaattatttttgtcttgtaggcatctctcttttctcagctagctcatgaaagaggcttttagagagtcatacaactggagtctgagcttcaaacaactgtcaagcaacgtgaggttgttgcgaggtaatggaatgactctcggaccaaagttgctcgtttaatgaaggaagctgaagaacaaaagaagatccataagaccgagctcgatggtgctaaaaaagatgcaaaggatctccgtgaagcatgtagaaagctcaatgaagaacttaacgaggcaaaccaaaagcttaatgaagcaaaccagaaacttgatggggctcaaaaaaatgttatagccagagttaactcaatggctaaacttccatgtatcatgcctgcttagctaaacccaacatggatttaagctttttgggagaaggagtcgcggagatgctggcctattttgagcaaaccaagaaagatgaggctgcagagaccgaggaagaagaagaagaagaaccatccaagtctccaaccatgtagacttggtttcattcgatttttttatttttggaaaaatggccattaggccgagacaatggttgctccttgtagcattttgtaaaaacttttgcattgttggatggccaactttacttatttatacatgtttactttttatgcctcacatcttgcttttgagttaaatatgttaatttattgcgttttatttcacaatctaaacatttatctctcgattttgcttaagatactttgagttgaatgcatctccaatgtcattttttttaaaagatatacaagtagtcaataatctaccatgtctttcgcaagcagtttttcaatctgccacgttctacgcgagcagtttataatctgttacactttttagagcaaacttaaaatattttgaataattcaccttaagaactattttgaatatcctttgattgctcatatgagtagttaatcctctattcatatttttagcttaagtattttttttttcaaggcacattcgtgtctcatttataatacatgccaaaacaatgcgagctgttacatattcaactcgtatatagcttttcgttattttatgggaaaatctcacttacaactgctattttgatttttccttttaaagaaaaggtttttcaatttcttgactttatattgtcaaaagaaaatttaatcaattatcctttcctttgtggaaaaaaaaattaatttttaggtatgcaaatacattatatatttctaggtggattctagttattatacacatatacatgcccccaagtaattttaaaggaaaagaactttgtaattacttgaacaaacttttattttattcataacaatcattaatcattacagagataaatacaacatttacacattaaattcatttgtaataaggtcgtaaatgttcactatgatgggaatattttaccaggatcaaaatttactaacaagtatgttga

SEQ ID NO: 116250 - DNA, 1654 bp, Cannabis sativa
  modified_base (576)..(578): a, c, t, g, unknown or other
tttttaacatttttaaaaagtatttttttaattaattaaagaaaatttaatataaatatacatacatgcttacacatttatatatatcacccaaaaaaattaaaaataaaaattatatccacattaagtttgatatatttaatattattattattaaaataaaaattgcatcatatatttttaataatcatattatctatatctttcggaattggaacatttcttttttttctctttttcttttttgcgcatgcacaacttggccacataaaagctcctacaaagactttacagtaattgggttataataatctttaattaattttgctgctttaatttaaactataatgtatagtctgtctttgtaaggttgactgacattaatgaatagatcattactatataacgacgccaaaaaacatggaggctggcttaaatgttgtaaagtgtgtgcatgcatgtgtgtctttttatctctctaaatatataatgccaaaggcacacacttggtttagtttgcgactgtttttatgaccatcacatgacatgttaattggatatatataaatatatatnnntatatataaacataaatatatatgtgtcatgtgtgtattcttcatcaatgtaacccaagtggttaaatttcttccacttgcggaagcaccatgcattaaaacgataatacagaccagaatattataactacaagacgtacagtatcaacaatgtatcattttagtgcatatgcataaaaataaaaataataattaagtcaaaaagaacttgcactaaatgtatgcatatctcatcatccttaatccatgctctgcactagctaataagaaattattagaaaattaaagaaaaagacaaaggaaaaggaagtaatttgacctaaatattgctgaatattggtttactattttcttattaaaggatatatatagggggaaataaattgataaacaattaacataaaaccgacgatcgaaaagttatgtccaataaagaaagggaaaaagcctactattctgagtaagagtaatataggaacttggtctaatattcattaaattcctttatcgataagtacatccccgcgagtggcggcgccgcgcggtccacttagatggtaatagaaagtgccaaagtaaaaaaatatatgaaagagttatcctgtatatatacctttacatatcctcttagtagaataaatatatacctatcatgcaaaaaccatgtatagataaatagatattcaaaagaaatatatatttgtatgcatatccaatgtgttagatacattcatcaacttgattttttttaacgtacgtcagcattatatttacgtaatatacagatgattattaatgtatattctaatctttttagtgaattaaatgttctactttgtaaaacgcactaattcctttatgattatatttcacaatatatttttcttttttgacgtgtatttcacaatatttataaaacaaaacttaaacctgcaatatctatattttcatccaatattgaagcacacaataaataaataataataataacgatgaacagatcaatgaggatgaaaatactagtaatcagcattactactactaaatttaattatattaaggtgccgtttggtaac

SEQ ID NO: 116251 - DNA, 1589 bp, Cannabis sativa
  modified_base (26)..(48): a, c, t, g, unknown or other
  modified_base (939)..(945): a, c, t, g, unknown or other
  modified_base (1309)..(1310): a, c, t, g, unknown or other
ctctttctctcttcatcttcttcttnnnnnnnnnnnnnnnnnnnnnnntattttatattattttataacatccttttattttcgcttattattattgcagaaaatactattgtaataagtaattttcctaaaaaaataaacaaaaaccaagactattaaaagcaacccccttcgagtgagctcaatatttgataatgactaaatattataattgatgttctccatttaatgtattattcaatgtaaatttttaattgattatttaatatattatagttaggtaaatattattttagtcccttgtgttttgtaaaagttataaattggactctttattttgttaaatgacaaaatgaatcctgtattttctaaaattgtacaaataggaccctgaactgatttttttgtcaaaataaaacttaataataatctgatatgattttttgtatctgttcgtgttagaaattgtcttagagttgattatattaaaataaaattgttaaaaattgaactcggggtcctatttttaccattttcaaaaatataaggtctattttgtcatttaacaaaacaaaaaatctaattggtaacttttgcaaaatacggtgtcaaaaataatatttacccattataattagataatagtaatattgtttgttttgggcatactgatttatttttgggcactttcctcgaaagttggcactaggtaatttttacttattcttattaacttaacttgacttgatatagaaattagagcattgttattggattttagtggtgcctaatacttttcataggtggcgtcgcacaattaattagcgatattgtttaaaagttatttttaaagagcattgctattaggcactaatggtgcctagcaccttctcgacatgtcgtgttgcgattgtctagcgatactctttaaaagttatnnnnnnnaattatatgagactcgatacttagttggaccaatagcgatattgacatataggagggtgctaggcaccactggtgtcttttagaacttctctattttaaattatataaaactcaatacttaattagactaataacggtatgatatcgaggaggatgctaactactaatgttaatttgtagcaattctcaagaaattccactgaaagatgacggtcttaaatgcataatgcaaaatgtgataaatattataattaattagattgataactttcaccctgacattgatcaacctattaagtaaggtaaagggtgaaagagaatcaagcaaatccacaaaagcatagaaatatatatatatatatanntatatatatatataaaagaaaaagaaatgggataatgatgatgctgacatggcatgacagtccctagaatgaagccatatttgcagagaatctcactcacctcaacttctcaactcaccccttgagaaagcaacaatggtttctttctttcatatgctcattggatcacataaatatatatatagctaattaggatttttttctctctttaatatgtattaaattatgtcccttaaacttttaatgtcgttaaaaatttgagattgttagatttaagga

SEQ ID NO: 116252 - DNA, 1673 bp, Cannabis sativa
gtaatgggttttatttagggcacaaaacccaacagctcgttgttcggaatgggtcgggactactcgttgaaggttgcaccatattgttctttggccaagttgaactcgtgcttgctgaagccataggcgtccgtgaggccttaagctggatcaaagaccgtagatggagaaatgtgtatgtcgaaacagactgccttaatgtggtgcaagccattcattgttccacagagatgatttcgttgtttgggctagttattaaagactgtaagaatttgcttgctaagttaaacaatgtatctgtttcttttattaagcgatcaactaatgtagtggctcattcctttgctaaggcgactacattgtatcctgattgttgtttcagtttggagtctattccaactgagttgctaccaagcttagtagcggaagtcgttatttaataaagatcactttcattcaaaaaaaaaaaattaaacctggcaaattactaatccaccctccacacacaatcacactaaataaactctacgggtaaattagttattaaataattaacctttttaatcctaaaatttttaaacatcacatacaatatcccttagtactattaaaatacaaacttataccatcgtgatattttgggccaaacaattgagtttgttgctagatctaaaaatattttattacatataatgtatatataatacacacataatctaataaaatctctgtaattaataaattacatctaatttgctcatttctaataataggcctagtttctcatctaaaccctagtaagattataatcttactcattaattatactagtacacattacttctcatatttaataaaatacacgttaattattaattaattattttttctccttaggatattattacatgcacgttgttgatataggtagtgcacattaatctatttaaaccccttttaactgtatactcccatacctatatagtctcaaagtcattacacttaacaccccaaataatgtaggattgcatagctcctggtctttctctttgcgaattgttataggataaattttttatctagaataacaagtacagtcttgtatctaattgacacatagacttatagatcccaataggaaaatgatgatgtgttaagaatatgaaccccggtagggtatcctctgatgataggaacatgcgagaaggtgcgaccgagacaaaagtctaattggacactatgtcacgcatagtgaaagaaatcgggacatagagaggttaacacagtcgcgacgtgtagcgattacacgcgaagacccagtgttcctcccccacgccatatgtaaagactgtgtctttacaacagttaagtgcacgacaactcaccttgaacctgggagttctatatgtttttagtacacgaatactcgctatgcaatcagcataattggaaagtttgtatgtataaaactccaaggggtttatatacatctataatggttcggagacccgagagacccgatatgcaagtaacacaaagtaaacccatatgttcatccgctactaggaatacgaacgaccaacactacaacaaatatagttattaccggcgggtttattgccggcggaactcacccgccggtattaataggggtattaccggcggaaatagcc

SEQ ID NO: 116253 - DNA, 913 bp, Cannabis sativa
tttaacatagtattatataaaaatatgatatataatctaattcaatataatacaatacaatacaatacaatacgacctaatgcgacgttccaaacgagccttataagattggattaatcactatcggaaaatcacttgagctgtcattgttagtaaaaaggttgttagagttttcattgtcaataaaaaagttctcaaaaaaaccatcaaagttattgtcgttaccgaagttggatattgtaatttgtcatagaaaaacaaattaggtgtattaaaaaatgtgatcaaagaaatctaattatgtaaagtaactaaattaaaattatattcgtttgtttaaaaatgtgacttagaaaccagttacataaaataattaaattaaaaactacacaaaaattagttacataaaagaattaataaaaaaccaattaaaaaacagcacaaataaaatatacctatattaacaaaaaagaaatactcacaaaaaatatctcatattttctgtaacatcctaatagaaaacacaccatatttcttaaatatttttatataaatcatcactttgaaattggaggcccatatttacccaaaataatgggttggcccatttcattcactaagccacctatagttaatttttatgtgtagttagttcttgagaaatgataaagtcactatagtgtttagtaatcctgtgaggtatattatttttttctttataaacccaaacttttattgaaagagaaacatgtagcgtcccctcttcaagtctctattggatccttacacccacaaaatggtgactcttatacacgggtacgccactctggctgcttcatggactgatgactggcctaacacgagtgttttttagtgtgctttgtcctcactcgcacacttcctgggaaaactt

SEQ ID NO: 116254 - DNA, 1337 bp, Cannabis sativa
acacttattatattataaaataatataacactatatacataatgatactcgttgtctttaagtttgttgcttgatttctttagtggtgaaaaattttgtatagtgaaaatggatgcttcaactctatgttgtatgaataatgaatattggttttaaatttccagtcttttttctgaaagaaatcacatatgtttgagggttgagtccccaaatattgtagggttaggtgagaatcttagaaaaaaataaatgaaaccctctactttgatattgtaatcctttctttcatttaaagaataaattacataagcctaagaacacgacgacctaaaggagttccaatgatattcttctgtggtgggtcaaagaggttgaacctagcaggatcactttgtgggttgatgaggccgaaacctgatccaataatatagaaatggtatccatgaagatgcatgggatggtcttctgctgtgacaatacttgtgtcatgcaatacaatttgtacattgtaatcgtatttcagcttgtagagcttcgttccagtagatggctgccatagtccttgcgacacattacttgtgtaatcaaactgcatagggaaacataagtattccttggtagtaagcctgcatttgagaggacttcttgggaatacaaaagagacgttcaagctagcagcatcaaagtgagttttgttggggccttggcaacaagggctatttggatttgaactgttgtttagtcctaactccattgtgaagtaaaggttcatatttcgtagggagaccagccttcaaaagacttctgagcccattagtaaaggcccttgtagtgattgtgtcgttgaatgctggtaattgcggtaaaattggtcttggagctggttttcctttcttgcaagatgtagccttataccgaaggtatgcagtggtggttttcgttgaggatttcacctctgactcagatgctttaaaaagaatgcagatgaacaaattgtttgggtgtgaaagagatcactggaacccaccttggatagaatgatgtataaagtctaatgacaatggaatatatttcaagtgcaacacgaaggttgtggcatagtggcttgtgtagagtggagatgattctatccaacttttgttttggtcttctgtttgagtacacaatagtttctagggcattttgtaatgtgttcactgttcagtatgggtattgagtgtaacttgtgtggataattaggtccaaacatggtaggtgcctttggtaacacttttttaatcagttttttatttttaaaattaaaaaagtgaaagtatttttcaaaaacatgttctata

SEQ ID NO: 116255 - DNA, 857 bp, Cannabis sativa
ataaaattatacaaggactatttgtaacaagctgaatagattaaggggcataatagtatagtgtcataagtacagggggtaaaaaagataattattcttaaaatttttggtaatgacgcctaatcctacaatgtagattttttttttttgaatggcaataatcatttccataaaattaacaataacttatattataatttatatatattaacaataaacactatatatatgattagtaaaaaaaagaaaaggataatgaataacttaccattttagtagttgagttgagttatgaaaaaataatagtttttttttttttttttctttgaagtggaacaaattaatggtgagaagtaataatgagagaaaatatataaaagcttgttataggaattatgtatatatagataagaaagcttaatagttaaggaaatcaatcatatatatgaattttcttcctaagttcttatatgatgtgatgcatgcatttagataagattcagactaataacacattgtcaaataatcatatagtgtcactcgatcatttgcataccgtcgattcatctctcgttcaaacaccaacggtggagatgacgcaacaagtatcccatattaaactttgaatattcaaagtccaacaaggcaacttgtgtggacgtgtgagatcaagatggacctaagccaaaaatagagatagttttaatattatggcatatttcagtaaacaaatttaaattgttgtctttttctttttttgtttatgtaaaagtactttagtttttgggataagttgaaaaatgcctcttttattaatcaattaaccaaatttgcctctaattttatatttatttgaa

SEQ ID NO: 116256 - DNA, 2080 bp, Cannabis sativa
tttttttttatctctcttagcccaataaaacaacttcaaccatataatgcaaaaataaataattttttttatttaaaatttaagcacccattaaaagttcagagccggttgcactgcttccattcctatcaagactacatgcagagccggttcttcttgcataattattagaagctataagccagtgtcttatgttgtgctctagtttgggattccatcccctcaaagagtgcttcaacctctagtcttggccctatggtatggctggtgactgctgcagaattgtcaactatatatatagggcatctgtttctgttggcaaagagggatcttcaaaaggattcagctatagttcactgtaagctttgtttttctttcgaatttcctgtttttgttcgttcacagctgcgctggcttgtgtctgttgtcacagtttctttgttttgtctggtttaggctttggctatacattgcctttcaaagaaattatgggatttattcaaataaaaattgcctaaaattttggttctaaagctccttttgatttacagcttttgcattcatttttatgcttctgttcttttccatatcaataaggtagccacataaacacacatctcacaaaaacagaagccttttctttagatattgtttcccaaatccgatgaaacagaaaatgattctcaatttctcttaacaatacacaaaccctaatagccttatcaattgaagcattaacaagggaaattgtaataaaaattattaacatgattgaagcataataagagaaaaaaaaaatatatagatcaaatctgagaactaaaattccaaacatgctaatatattctcatcaaacagaagaaatgtttaaaaatctctagctataacaaacaaaattgtaaggcatacataactagtttcaataaaaaacaccatcacaattggattggaaaaactaaaaggaaattcaggcaacaagaaaattaacttgttctgacaaattaaatttaatcttcctcctcaccctcgttctcagcaatgttaaagtacctaagttcataaacgttgcgatccttgttcgatgagatcacgcgaagccaatcacgaacattgtgctttttcaaatacttcttagtcaagtatttcaaatacctaaacaaaagaaagaacatcagcattatcatcatcatcaaaaacacacaaatccaaagctctgttagtacctcttggagaaattactgtcagatgtaacagtaatcttgctcttctcgcgggtaacagtgactgagtcaccgagagcaccagccttgccaccgaccttaatcctctcctgaagaaacttttcaagagatgcaatgtccatgatcttatcctccactggcttagcacaatcaattgtaaatgttgctccctttttcttccctttgggagctgctgcacttcctcgactcatatttacttcttctcttctgtaccaaaacaatcaatcaaataacaaacaaaaaccacctcaacacaatgtctctctcttttggacaatgtataaacattcaaaggtacaatttcagctatacaaaatgaactctcccagaaataaaatcaaaatcattgtttgcttcatagtaagtgaacaaatacatatattgattcgattcactagatacagatatagcttgaaaccttccagatccttacttttacatgtagaatttcagcagcgaaatctacccacgaagttgagaaaaaattacctgatagaggcggcgtgcgggagaggaaatggagtttcagagcagtgaaactgtcacggcggctacactcttctctccgtccgttctgatgaaaatgaatgagtttgagaggagagagagaagttaaggagagagctgagttagggctagggtttcaatattggactgggcctttattttcgtttgggccaatacttttaattttgggttgagatggaaaatggccctaaatatagtaactaagttagtaaatgtctacttttaaaaaaaaattaagaaaatggccaaatctaataaattagctaataaaaattataaaaatagattta

SEQ ID NO: 116257 - DNA, 966 bp, Cannabis sativa
  modified_base (42)..(44): a, c, t, g, unknown or other
aattttccataattaaacataattaactgctaatttctaaannnaactaagcggtctttacatttactattacttagagtaatgttgattctaaaagtagtgaagaggacaagaacaatgttgctttaacctatgtttgtcaagcaattttcaggtaaagaaaagatttgtgtttgaataatactttgactgatgaaaatgaaaaagaagttgacttagattctaactagtcagaacttaataagaaatcattggtagaatcatataaggtaatgtatggtaagtggttacaagtttattcaaaaaaaatatttttgtagtaaaagttaataacgaattgtctcacaacatcaaggaagttgaattgaaaaataaacgttgtgaatttgatttgtattcttaaaaatctgagattaactatttgacaaaagaactttaaaattttaaaagaaatgttattatgtagaattcaagctcatcgatttttgaagaggttcaaaatacagatcaaggaagcatgatggattgagatttgttgaatctcaatcgaaaatgagcactcaatttgttaaatatgaaaaatatcttctagttttttccttatctaacatcgcaaggatcttgctctacatctggaccttatgttcctagaaaaaggaaacagttaggtaaaagtgacaattttcatgggaaaagaaaagattcatttctgcatcacttttgtgagataataggtcacattcgacattagtgtttcattcttcaaaaaatattttattctaactactttgaaacttttaaaatgatttaaaatagacatatttttcaaaaatataaacgggttatcaaaaatgaaatcttgttgattatattatgaaatattagtattatgtaatattataatttagagaaagaaaatagagaagagatgagaattttctgagtgttttattccaataggtgatc

SEQ ID NO: 116258 - DNA, 5664 bp, Cannabis sativa
  modified_base (5632)..(5635): a, c, t, g, unknown or other
aggaccttcaaatcatgtttgagcatatgttcaaaccaaccctctccccctctttgaataaggctggaaagagtgcccgccaagttcagataagggaatgctatcaacaatgacagagaatgaatttttgcaactttcatgtcctgctacttggagtcgtattttgatgcttatagaaatagaatttgaagatgatttcttcatgatatttttatatctttgaagttctttccaatcgtataaagtttatacaaataatatatctacaattaaagttatactcattttactacggatgcatcaaagatgacgggattcataaaaaattacgagtttgatgcgaatatggttatgagtacaagtttcaatgcaagattgattacaagtatggatgagatatgcaagcaagtttaatcacaagtatggatgcaagaatgcgtttaaagattttatcaaagaatgatttcttaatgaaactacacaccattagtggtgagaggtatccttaaaatttttaattttaatttagtaaatttttaagaatgtgtttgagttaaatctgaatatctttttatttgagatagaacttattgtgaggttcttgagtataattgtgagtttaaagaaccattcaaaaatagttgttacacttgatttgtttatgaattattgatcatcttgtgagatttgacatttgtaaatttaatcaaactaatttagagttataggaactgataatgtgatcattgctttgttgaataaatttaattgggtactttatttgatgataagattttagtaacttttattaaatttaatgcaattgatgtttaaatcattgtacctccaaaaaatttaattggcttatgtttaaagatgaaagtcatagccttgattaaatttgatacaattgatgagaattaagttggaaccctaatttataattatccaattaattaaaaatgtataaatacatgttggtcttgtatttagcctgcgacaataagtcaatgaaagagattagaaataattaaataatattaataatgatcaaagtaaagcaaagagaataccgaggttattgtggtaataaccttctcttattttacttgtactaacttgtgagaagagtcgcaagaagttcttgatttccctcgaaagctcttacaataatttttgagtatttctctcttgaatgtatgattcttgtttctctctaattttgtgtccctaaatagtgaaatggttcaactatttattgagaagaattgcatcaaactggtttcccaaaactaataagaattaaaatagggaacttgtttactttccttgaataaatgaaattaaatggtaaaccggcaggtttccccttatttatttgccaatacaaatctatcccatgaaaatagagatatgatcgtgacttgcaagtttgaagctttatgagacatttctctaaagatatttaactcacattatttggtcgaatgtatacgagctgactgtgaactgggtgctggttggatggtataacatactctgtccatacattcttagctccttccattgattgaatatttactagcaataaatctccctggatgacacatcgtaggaggaattgcacatccagcccatagaatctttcccacgtgtcacccagatggatgccacatcaccttatgtagaaattgagatgatattttccctccaagtttgcgcaaaaacttcctagtcgcacgtggacttattcggtcaccaagctgatcagatgggtgacacgtgtccggtcttcaaactactcttgatctgatgtgactgaatgaatgtctcttcgatgtctcgggcaattaatgccttcttgaaagttagacctcgagacaggtaacaacagttgccaggtatcgtatacgtgacatttgcacatttttaatgagtattaattgtatttttttagggaaaaaccccaaaatttaaattttgaattactgaattacccctccaaatacttataaaaaagagatttaagcttctctaacactttttagccatttgacttctcaaaccgtcagagccatattttcctttttcctctcaaatcttcgaagagttcttgctggaattttacactgccgaagccatctaagagcattttttaagaatctatgaacaatgagtaagttttctttcactattctacttcttttaatttcatgcataacttactttgaactattctctgaaattttgggctcttgaaattgttcttagatgattcgaggctagggtttttagttattgatgttaatatatgcccaagacttctaagcttctaaatttctagcttaacattcttttaggaattaaagggaattggagtctcatttgctttatgggcttgcaatttataaaaaccatccttatacttgtcaccctttttagggacagaaagaagttcataaaaatataaaatttctgcaggtgctggagtaggctaacccctggctgtataaaaaataaacaggcatgaaagtagacgataagtttgtggaattaattggtatggggctagtccaacaaaaactaaaaaaaattaatgaagtagtcctggagtggtagcatggctcctgacatgaggtgagtctggttctatgtccaaaaactgttatagttgtgattggggctttcgttgtccctagagaggcgatgatatactctggaaccagtaggcttgatgacgttcttgaagactatcttttccagttggtgggcacacgttagggatgaaagtagctcatcgacttcccaaccattagaacaacaagtgtattttttgtcaggcaccaaaaccctgcattgccacctctaaagggacaacttgtcaagccaatataattggggcagatgtgccaataagagtgccattggattgtactatagaattcgacataatgtcttcagaaagaagtttgaggatttctaggtcaaacccataaaattcgtgattgtgaaggtccataagaacttcactcatttgaaaaataagagggaacccatcaattaactccccacattaagccctgaatagaaaatggaatgggggtcccctaaccattgggaagaggccccctctagatgctggcaggacagaaataaaaaatttttgttgccatacatctggtgcaagataccctagccacaacaatagcacaaagaaaagaagtaggtaaaatggaaatatctacaaaccctaagcatgtgaacccttagcctaaatacaaggcaagaatggccgagaaaatagcccagaaagatggcagttcagagagaattgctacagtcatttaaaaacccagaactaaaagaaaaacaaaataaatgtgtataaatgtatatgtaacagttcagaaaagcttggaaaattgaaacttacatgctaaagaaactgcagaaagtgttgaagccaccgtaggccagtaatacttcgcttgacagcgattgaggaaaagcagaaggtagtttgaaaagtttggaatttttgcaaaatttggaaaagctctaaaaagaaaaaataatgagtaggtgaaaattttgaaaggaaaaaaacatcggattttatagacattctgggttgaatattgatcagtgaccatccgacgatcaggattgaagctattaaaatacccttgatccaacgactaggacaacctagcagagaaatgtggtaaaaagggcggttgcaatactcgagtattttctgacagttttccattaataaatgtgtcaatcaaataagtgggaattaaatcgcttttgcaaaaaaaataagaaaagcaattatgaataataaatgacccacacgtgtgctggatgaagtccgatgatgtcatttctagaggcaggtatcaagtttcatttcacaaaggtacaaaataaaacttgggaggcaaatgttgccttgaatttctcccgacacatgtggtaagtcaacagtaagccatgtggaatgaaagcctaagcaccgggagtgattatggtaaaactcttgagaaaactgttggggactcagtgtctatgtctgggaatcccttccaggagttgaagtcatattttgctagcccaaggaatcaagcccatcccgaggagctggataaaatacacaggtctggtcgctaggtctcagacctgagtcattatggacgcattaaatgcggcatgggaaaaacatctatgagtggtcttgaaaagacgtgtcaaaacctttaaacccattattatgcgattatacattgccccatgttccttatgatagctgcataatgaactatcacatcaatcaacaagagttaaggacctatcttaccaaacacctaaacaaagcctacgtatcctaccaaatagacaaacattccttattaacccaatttgggaacttgtgcaagtaatgctcctacaattatgacaatggtaaccttttcaccatctttatgaggctataaataccccaattacattctgagaaaggggtcagaaaaaatggtgcaaacactcatttgtaaagagctactatattaatatcagtgactcgtagactagggctctttaatgcccaaaccacgtaaaaatctttcgtattaactctcttctaatcattaaaacaactctaattaatagatgtcgaaaatttcactcaacataagtcatttaaactaattaaataataggttttattaaaattattaatttaattggtaaaaatccattaacaagttaactatgattaatttagatccttggacccattaacaagttaaccatagttaatttaggttttatcaatttgttaattaattaatataataaaacaaaattgtaacaacttaggatattcagttaaagtaagtaattttattcaaataagtaaataaaataaattttaaaagttagattgacaaacaacttgaatatttattcaaaatttaactaacttatcaaattcaaatttttattttaatattctaaatgctattaagataaaaaaaaaaaaatggtaaaatatcttaatagatatgtcttttctcacttttcttaattttaatatttaaaataaataaaataaaataaatttgaaaatttactaatttgattatctaatttaatatatctaggtttttaattttatcatttttatttaaaatatcaagtaggataattttaaatataatattatagtttaaaagattattttaaacttaatatttctaatttaaaataaatgatctcattatttaaaataaaagataaaattaatttgaactaattttaaataataccatatttaattattaacttcaaaagctcctaatatccaaaaataaattttattaactaattaataaataaaaattatttttttctgatattttggtttttaacttgaaaaatgaatcttacatgaaaaattaataaattttagcttttgaatcattaaaaaatgatttttaaaatccaaaaaatagcaaaaacaagttttgcctgccaagcatgctcgttgcgcgcgcatatctcaaatagtgtttgagaaacttagggcttactgttgagaattaccatgttgagaatcatggggttnnnnctcaaaaccaattggcaatgagtggagta

SEQ ID NO: 116259 - DNA, 826 bp, Cannabis sativa
ggtaaagaaaacatgctcccccacttcaacaggcgactgatcaagaacaacccgattatacagctggttcacgccttgtcgaaccacacggcggcgaacggagcaaacggagtccaacgaggcattgcttagcatctttaagacgcagacttttctcaacatccgccattcagggccatacggtgtccacacaatgttggtgatgccgtagatagaacttcgggttatgctgaggacgtcccggttggcgaaaacaatgtcattttctttgagcacttggtgggccaaggtaggtgaggtgatgatgatcttgagcttgctgcctaggcggagctttaggattggaccttaggtgtgtgcgaggcttttgaaataggaatggagatctggtttgagggttagaaggctgcccactactgggaaacctagtggaccgggtggcaatggtgaggagtactggttgagtttcttggataattttatgtaccaaattaggagtgtgatgattattgctgaaagagtgaggaagaggcttgtcaagttggaagtttctgtcaaagtggttatcatggtgtgtttgggtattcggagatgagaggtatatagttaagattttgacagaaaaatgttgataaaatatggtctaatctttttgatgttggagagtatgataaatgtagagttttggggaatatcaatatagtaggacgacgggactaagatcaagacaactcatttgcttagtaacctaaaaattattttgccaaattttttaaaaacagttttttaataattgagttttaaaaaattagaaaatagaaaacat

SEQ ID NO: 116260 - DNA, 2087 bp, Cannabis sativa
  modified_base (1065)..(1078): a, c, t, g, unknown or other
cgttaacaatctgttaagttaatctaaataaaaaaaaagaatcgttaaaccaagaattgccgttagataaacacttttaatatataaagatattaattaatatcgaattgttatttcaatctgatcaatatatgtatataggacattttttattagttgacaatcattttctttaaattctaaagaaagggccaagccattttcgccacttgaatacttgatcaaatctttcagcactaacgttattatattatatcgatatcatcatgacaaagcaaaaatcagtcaattaatttgcagtgcatattagaatatattacaatgacgtgttatcaaacacaaagagatttaattagtaaagtaacccataagaattattcacttctgctcaaacgtttcttgtgtaactatgtatatatattcaacaaacactaattaaaccctagttattaattaactatattattattaatattatatatatgttttctatggggacaagtacagttagttggggttttctgtggtaaataagtgtcatttcagcaaagaaattaagtaataattaattgattaacaacgttggtccaatattaattatctttatttatcttcatgattaaaaaaaatattaattatcttaattataatatattctctatggtgccttaagataaagatagtttagctacctttcatcaatgcctgcgcaatgttatatataggttcatgaattaatacgttctatactactctttcaaaaaatatataataaattataaaaagatgtatcaaaaacctaactaatcactcatttataatatataataatataatatgtaaatatattgagaagtacaagaatacataactataaatattatatatagaatatcatatgcttgcgaaaaaacgctagtaacatacgtcaagtagcatcatggccagtcgaaatcaagttaggtatttatgttgttttactattatttagatatatacatatataaaaattatttagacatctgaatttattttttcatgtgaaaaaattattattattattannnnnnnnnnnnnnattattattattattatttatgtagtatagtttacattgtggcggaaccagcataaggggtcaagtaataatttgtgttaagggtgatacatatattatttagggtaaatttatagattgtttgggtatattctttatttattttgatatttagaataaaattttagtctaattttttttttataataatatatgttgtatttatttaagattattattaaattttttaaaaattcttaataatttatagtttcaaaaataaatttcgaataattgactatcagatataatatacaagaaaaatcaatcacacatataacagaatatgtgtactttatttttaatactgtaaacaatttagaattttctaaaaatttacaggtctttctatataaatataacatatacaattatgaaaaaaaaaatgagactaaactacttgtcgaaagaaaaagaagacactactacaaaatgggtttttagcttttattttttcaacccattttataaaaggggaagctaaagggtgtaaaaatacccgcttattgaaaattgacctttagaggcggttttttttttataaaaactgtaggtatagaattgcattataccatttagagtcggttggaaaataaaatacgttgggttttaagaagtaaccctatggcgtcagttcctatataagaaccgacggcatagggtacacgattatttgacacgtataccctatgccgtcagttcttacataagaaccgacgccatagggttatataaaataccctattgcgtctcatatattcatcatcttcttcctcactcgaacacacaacccagccaagcccaaaaaccataaccccaaaccctcgccgaccaccacctccgccacccttttctcctccatttcagcccattttttttaaatcttccattttcgatacttaatcacatacacctaattttttttcattttttaccctctttaagtgtgtcatccgaacccaactagaaa

SEQ ID NO: 116261 - DNA, 3471 bp, Cannabis sativa
  modified_base (567)..(568): a, c, t, g, unknown or other
caagtttagaaagaatgttcttgcagcagcttctgcccatttagtctattccatttggcattcccgaaatgaccaaataatggaataatcatatagaaggccatgatgtaattgtacaaaaagttaaacaaaatgttaaacatagaatagaattgttttggccaaagaaaatgggtccaaaagatagagattggttttattcattgtaaaaagatagagattgatcatgaggtctttaacataaagatgctcttttctttgtaaatgattgtacaaaagtttgtggaggatcaaataataataatcaaaaaaaaaaaaaatctataaaataaatcaataaaagaaaataaaaataataaagaagtatatataaaataattccggagctccatcattgagcactcgacatggtccgacgaagagagagaagaagacaagggccgcgaatttagctccgtcctcaaccacgactttagctccggcaaagagagaagatgagaagagccacatcgtcaacaactttgactttaaatcttgatctttggtgctctctctctctctctctcnntctctctctctctctctttcggttctttgtagcacaaccatcatcattctcgtcctctatcatcatcattgtctctttcaacttcgacttcagatctcggcttcagatctcaacttcagctcctacaaagtgagagaaaggaggacgttcgatctgtggggaaacgccgcagggcctaagaaatagagccaccatggctgtgatatggttgtgcagaagtgattcaaagatggtatagagagaagagaatgagggatatgactatgggttatgcggctggtaggtagaggaaaagagagagagatatgtttttaggattttcaacttttattaaatgataaataataattatttaataaagaataaaataaattacaatcttgaaaattgaaaatgtatatgttaattcattcttgaaattcggaccgtgtgaaaaaagttgggttttgttttgttaaaaatattgatgagtatatatatatatatatatttaaaaaaatataacacctttctttaagcctataaatagattttatatttgataggcatactaattttttttttagataatgtcaagtctaacataattagattagaaaatttttctaaatatttttctagtccagcatatttggactagaaaacttttaaaaatattttcttagtccaacatagttggacataaaaaatagacaatttgtttaaaaaataaaaaatatatttcgtgtccattacttattttctagtccaatattgttggacatgataatttttttttatgtccaataatgctggactagaaaactaccaaaatatttttcatgtccaacatcatttttattagacataaaaaagggacataaaaagggttttttgtagtataaggtcgccgcggccaaaagtgcaccaaacgtaaatttttcgtttttcttagctccacttgtcttttgctgcacttttgtggcccggagcttccttagctttgagaaacctgaaaatataggaaacaagcgtaattctgtcctaaaacatcgaaaagaaaacataattgtgatccgaaacataggctaaaactagcctaacaggtccctatgagacttactaaatggcgaatggaggattgtgaccctataataaacaagataaagcagaggtaacttgggctactagacatctatccttgttggtaagactcaattaattcattaagttttgcttgggctccaaaattactggatgaatatctttattttacctcaaagtgttgtgaaggacgttgagagattttgaaaaggatttctttgggggtagaatggtaacaagagtaagatacatatagagtcttgggagaaggtatgtctccctaaggcttatggtgggattggcttcagggatggatcgaattggaatagggcatctcttgccaaatatgtgggccataatggaaaaacatgacttgttgtgggtcaaatggatcaatgcgtttagaaggatcaaatttctaggattacaacctcaatccagactcaagttggtattggcaaaagctttgccacttgaggaagattttcaacaagcaaagtgtttttgcagctggctatagacgtaaatttagagcaggtaaactttacaatagccttttgcaacaaggtcaagtgaattataagcaggcagtttgggatcgtatgagcatccctaagcatagatttatttggcaagctttaaactcccatcttttgacagtagatttattttctagatttcatattcctaaagactcttgattgtccagtctgaggcatggtgaatgggagccactcatcttttctttgaccactctttctcaaataaagtagtgagttccattattaattggttgggttttcaagcttgggcattgtgctttgatggttggaaaaactagattaatagcacaagattaagacctttggcttctataatggatgcaatcactgcaacctcagtgtatggtatatggcgtaatcgaaattgttagaatattagttgtaaagaaatttggataactcgtatttagtagtttcttatttgtgtttagtaatttttcatttagtctcataactttgtatataaatatatattattctatgaagtacaacacacaattcgattcactattctctacatggtatcagagccatacttagaattgtgattcgaaattcaaaattagggttcataaaaaaaagagattaggttttgagtttagggttcttttttaaaaatcctatttggagtgtgaatttattctcactgcccactcaggagggttgcccaaccgctgatcttctgaatcccgaagttcggttgccaaattcctcgcgcgtggggctcacgcgccacctaaattttctatgtacattcccacgcaccagcacgtggaggcgtgtgtgaaaacatcttcaacgacgttcttttgtcggttctttacttagttcttctaagcccacttgcatcagtctaaggttgtaatttggtatttttttcttccttattcgtgtttgtgtgctcatttattggtgttatttttcttctttttctctgtcaattgtttttgcttttgagaatatggcagagataaaattagattcgaaatcagtcgttgattctgatgtggttcctgtaatgtctaaaatcacagaccataaattgattggtttgaattatttggaatggagtaagacaatttgactgtatttgaggagtattgacaaagatgattacttgactgacgatcccccaaaagaaacagacgattcaagaaaaatatggctccgtaaggatgcttgcttaaggtaattagtttgattaatcagtgtgaattagttaaagaactaatggattacttggagtttttgtattct

SEQ ID NO: 116262 - DNA, 834 bp, Cannabis sativa
aacaacaacaatataatcatatattcatattcaacatgaatatgaattgaattatatgtaaccaaatatccgttcatattttccagggctgacattgtggccttcctgcgcatagacccacacccagcccaggatctcccaaaaaaaattaaaaattctcttataatacacatattttttttatcaattttttaaaataccacacatatttgaaataagggcccaataatatatttttttcgaaaaggccccacaaatcttaaggctagcccttctctggcaaaaatctctccacaattttggtggcccttctaatgactgagttttgtaatagaaaaataagaaaaagaaaaaaaaattaatcgatatgcaattccaatcatataaatgaatacatacaaattgaatatgcaaatatttttcaaaatgtggaaatcacttcatagtaaccagctgctagtttccttttttcaaagtaattaaaaatgtagaagaggtggtgctaattaattaactagtaatgtattagtaaccacttactaatgtttcaaaacatggctaacagaagaggtggttgaataatactaataggaatctcttgctaggatttataaacgcttcaacaaacatatataatctcaaatttaatcatgtgaaaattctaaatcatattttaataattttttttgtttaaccaaaaaagaagagtatgacaagagcaaggtctaactaatacattttacccatttcatccctgaagccacaatacaaaaaactgctacttttagtgataaatttttagtcacaacataaattttttgtaactaaatgtga

SEQ ID NO: 116263 - DNA, 2657 bp, Cannabis sativa
caaagcaaaacggaaccagggtttagatagtttagccgccaaaaattcgatttttgtggttaagtattacaaaccgtaaagtttacgtggtttagtcgccaatatccctaatttaaaattactttatccagaagtcaggtcaaaataaatgcagaattgtttaatttgtcaattgttatgtgacaagaagttagcaagcaaattcctcattataatatgacaaagtaaaccgtccgtacgtagtagtttcaatcaaatgaatagctatagctctagccaggctcgtgtaattaagttccccgtgagaaactcagaaaaaaacaggtcacatgtagcagtcaactccagtgtatataggccaaataaaaagtaatattatgcagaaatgctaaaaggtgtgtcactttcttagttaatattcttattataattaaatattaaatttaatataataatttttaaaaaatatcattaccttttaatatgaaacaccactgttcaatgctcttaatatatgcctacatatttatggtcgcaatttgatgcatatctctattgattaaaaatggaaaatttcatttcagcaatatataaattaaaaacttgaattacagagtggagatagaggaaataagcaggggaatcatgacattgagataataatgtcttagctagattagctaatttataactgatcacctcaatcactcactcagtacaacttcaattacttaataataactacttaaagtgaacatcagaaagaagagcttgacccaacaattgtttagaggattccatcaaagcaggacttaatctaaacatgagagtacagaactccatctcattgagagcttggtcaccatccatatcaccttctctgaccatacaccttatctcctcatcagtcatgccttgcaagccaagcaacgccgagttcttcttcaagctctcaaaggtgatcacacccttctcttggtccatcaacaagtggaatccattacacagctccttcatgaaaccctcctcccctaatttatccaccatcgccggaaaatagtcttcaaacacaacattaccaccatttcgtgagcaagccatatattaattctaaaatgaaaattactagctaccaccaactgagagaggaataaatggtaatgttatactactatatagtagttctacaaaataagacacaattatatatagtggatgggggagaggttattactttgttacgtagcctttagtatatatgattgaataagagctttaattatttgattgaggctatttcttaggcctaagagatatatagtgttctccttcctggaagttgcatacgaaggtcccagcaatatttgccaacagaaattgctgaacttgcgcggcaatttaattattaccaaatctcatcatatatatccgtctcagtcatatttatatccattccagtctttttgtcttttgaggattttattgtactatatagtaggacaatatgtgagatatatgtgtattcaacggaaattaattaattagaattttttttatagtgatctgaatcactaaagacaatcctcaacacatacagatattagcctaacaaattaatcgtctaaccaaaaagtatctaaagtcaaaatatgaatagctataaacaaaagggagttatataagatcaagttacacaaaacaacttgaagtcatcccaaaaagtacccaaactaaatgaacaatttaaccaaatctccaaaataaatacataaagtagaaaattgattagccaaaagcaaataaaatgttaaaaaaaattatataagataaaatgctcaacaatttccctcttcatcaaaaaaaaaaattaagaaaaatatttatcttagaaaacttttgaaataaaatatttagtctaacttttgaaattatcttctaagacagaaaaataagcaatgaaacctagatttagtcctaagagtatagctaaaatttgctgccgaaaatgttactgttagttaagtttaatataaagtacgtatagggaccctaaaggacaagcctagttcactttagtgagccaaattgaagacaaaatcaagatatatatactacttgttccgaaaatagtaagtaatataaactacgatttcaaaaaaaataaatagtttattataaaaaatatgtggagatagagaacattagaacttttgttaggataataagaagaatatataaaatattaatagatttggaacaaataattaaactattttgtcatatatcaaaagagaccataaggtacaaatcatataggatgctcttttttctatatgtatttaattttaaatatatttattatttaagctgtacatatatagaaggaaaggaagaggaggtttccctacttaaaaacaaactcaatttgtgttataaagaacaaaagttgtagtacctatagtagtcatgacgtgggctttattatataagtacaaatttaaagtcattatttttgctatgattgcaccttatgttaccaacaccatactatatagcttagtataattagttagcaattttttataatatttattaaaataaaatgtgtgaaatttaatattgatatgcaccaataatagcatgtcacatcttataat

SEQ ID NO: 116264 - DNA, 1716 bp, Cannabis sativa
  modified_base (27)..(37): a, c, t, g, unknown or other
  modified_base (64)..(74): a, c, t, g, unknown or other
  modified_base (101)..(111): a, c, t, g, unknown or other
atctgagcggaatgagtcatttaattnnnnnnnnnnnagtcatttaatttcgctgcaaccaatnnnnnnnnnnnatttaatttcgctgcaaccaatgtaannnnnnnnnnnctttatatgtgtttaattttcatcattttatagatacatattttggatgtcaaaaacatacttgttagtaaatttaggtcctggtaaaatataatccaacaaaggtaacattagataatttcttgtatcagattacagataatatgaagtcattcaaggcctacaacaagttcagactagagcgtacaaatgcacgccatcttggtgctaggttaagagggttgcagatagaaatagagttttagatttattctaacgaaatttttgtgtaatgaccacttaactttaatatgagaattagcaaataattagagtttaacttagaattagacttttaattattatttatgcaattgtggagatatatttgaattctatgtggtaattatattatatataaaatattgtgtttttcataattgtatacccgataatagtggaacgcgacgtttggccggtagaattactttattttgatttagcaccttagaaatagtggagtagtatagttaaacatttaaaatattgagagtttttgggattaaggttttggaccatttaattcctaattatgtgagttactttttgggttaagcaatgggaaaatagtcttttttcttaagttggattttgtcttttagtgagttaattgattaatctttagttaatttaaatctaaattctttttattattactagataattattttaagtttatccttcaatatttcaaaaattagagaaattgggaaacatactctttcctctctctctcttagtttggccctaggaagccctcaccaaattagagatatttccttcaattatgagcaaattgggaagttgttggctcaattctaggttgagatagtctttgattgtggtaagctttctttttccttggaatttttcttgaattaacttaggttttcatgtaactttaattttcagctgctgtatgtttgggaagtgagaaattagtttctggtgttgatttagagttagttgagttattttttttttgtgtgaattgttgcttgtggttaagtttggacaaactttgatatttaatggtgaattctatttcaaagacgattacctattttttactgcttgaagtatgttctttatgacttgaataggtggtttggagagttgggatcaatttggagtaaaattggttcgttggaaaggtttttagggtttcctccagggaatcgattaatcggttcaggctagccctgtagagccggttaaccgtttcccctagcaaaaccctaagattcggtttccgttttggaaattcggtttaccggttctagcagctttggaaccctaatttttgatgtttcagtgacattgagggtaatgccatgttatccattgataggaaaatttttagttatatttttaagtccccgaaaagtgatttagcgtatcaattattagttttgcgtctattatgacttaggggcctataaaccatcgagcaacagttccactcaagttgatcggtacacttgaattcggaatcgaggtaagattagtataataatgtgcatatgcgattacatgtttagcgtgcatatttatgaatgtctgtta

SEQ ID NO: 116265 - DNA, 1569 bp, Cannabis sativa
  modified_base (1513)..(1542): a, c, t, g, unknown or other
tgttgttcttttgcgatgatatttatttttgggcctttgatctaattattgaatagaatgaaatgattatttcacaaatacagaaaaacaatcaaagaattataaaaatacaatttcacggaattttaaatatttttacgattcagttgattttatttacagaaaatgctatctttttatgttatactcttgttaatttgttgtgatctgtatgttattttttgttgttgttttaatgttatttagatgttattttcatgttactttatgcaattttttcgttctttttctttagaaaaactgtaaaaatataaaaaattctttaaacataaaaaaaaaaatttcttacaaacaattatgtcttatgtaattattcttagaataaattaaatgttaattatgaaattttatatatttcaaaattaattattaattaataaaatatcgtacgtactcttacatatagtattaaatatttccacacatcattataaattatattttaatatgtatatagcaacacacaaacattaataatttccaagaatcttgtatatatgttaggtatatataaggatggaataaaatttagaggaaaatgactagttgatctctacggtggtgttaatgatattacatgtaggttagtatagcacgtatatatacgtgtgtggatatgagtgtgttttagctagctttttcttttttaggtttataattcttctgccacactatttgagtagtgtttcgatcaaaaacacacacatacacatacattataagtctattcttcatatgattgcaagcttgggaagaaatgagtggaccactttgaattttgttccaacaactttattaattaacctttgcaacttataatcaatgtcatatttatacatacaataaaacctagctacttaatattgtccttttgtgagtaattaataataacatatatatataatatccttacaattaagtcagagatatttataagcttcattagtacatattactccaacttaacaactttttttaccataaatatattaagagaattgctaaacacaacggttaatgatcagtttcttaaaaagatttttatttcattttatttttatttatttattttttacaaaagagcttaatgttggttgatataaaaatcgttaactcataatcgtgcaaataacttaacaaataatatttgagcaacattattaaaaaaccactgcacacatacactgaagctatatatatatatccagaatattgaaaaataataaatttcaaataacaattaaattgaaaactagcattatcatcaacatattggtgccctaataatgagtattattattaattaatttatatatcacagttcagagtgtgtgcctgcttatatctctctctactccaagagaaactgtcattattttttgccatctattaagattatatatatatatatatgctctaagtgtgtgagtacattatataaatatatatatannnnnnnnnnnnnnnnnnnnnnnnnnnnnncacgtaaatattagttttatataagtt

SEQ ID NO: 116266 - DNA, 2464 bp, Cannabis sativa
aataattaccctaagcaagatcataatcttacttcgttaccaaaataattacatatttaataaaatatgtctatttatatattatttattttctgggatattacacttcattcggcataagcatgtctgcatcttggtcatacatctttttgatcaccccactcagatatccgagtgttatagatgttaagtagccattaatgggctgctaggaatactttcctctgcccaggtataagaaatgtggaacacgtgtcatccatttttattgccatgtcaaggtgcaaaaaacaggataacatttgcccccaagtctattcgagaccttcctaattgcacgtggacttcacttagactggagtcttatccaaatgggtgacacatgtcttcgataataaatgttgatccgatgtgactctgactaggggtctcttcgatatctgaccatttaatgcttattgatggctatacctcaaatcattgtttcatatctgagcacgcttgacggttatactccctgcaatgagtgcataacctctacttttgggaggaaacacaaacatttgaattttgaaatgattaatttattttttagattggttataaatagttctaggaacctttggtgatccttttagccattttatttcttaaaaactagagcgaaatattgtcaactgagttttctcccaagttcttcgaggaattgataggaaacttcttgacgacaccatctgagcagaggaagaaagcttcaaatcagtgagtaagttcctcattcctttcttttatacatttgcaatgaaatgcatacatgatttatgaattttgctgtgaatttcacctgttgttgaactgttctaggttaaccgtagaataactaggtttagggtttggaaatttcattcatgtctaaccataacacttgattatctgaatgcacttgaaatttagccttaaaatgttcatttccactcgtctataagattttatcaaaaatcagattccatttaatgtttcaaacttctaggattgaaaattcaatttctgggtggaaccttcgcttttcattctcaatcaggcttcgtcagcatatacaatctatttctcattcattactctggccaactcttattttcttgtctcccaccatttgtagatgaaccctggtgagttttggggaggcaagcatcatatcgaccaagacttgcttcaactcctatacgaagatcacccccatctcgatactagcccatcctcgtctagtgatgatcattcaaattgtagcttcaaagattgggaagtaagtagcaagcatttcctcaaagcccaaggtgcaagatcacttctatcccaaccaaattcattgtgagggatacagccgtttcatctaggaacttaagaaaggttggagacattctcttcctatcagctagacgtatagggtccatccgagtgtggttgacaccttgcctgagggctacccaatcccaactgctgagggcaaacctattgccaattttgttgtgatcattggaaggcctacttttgatataacaccgtccaaacgaaggatgattgaacgaaccaaacaaactgttaggaaaccttcctctaccgaccctcatatttcctgtctagctactctggccagggcggaacaggctcgtcctactgttgaggaggaagaaactgttggggacattaaagtccaggaggtgaaggaccagggcaagctttatcctgctactccttctaaggccaaaggggatgaggaagaggggttagctcaggtgctgccttttggcaattacaatgagtatggagaacctatgtctaaagaaaatgatgtcctggaagttggccgggactatgtcgaggaggagtacattgaggcttgtcccatgagaaggaggggtccgaagggagatcgatggatttctttgccatccatcctaaccatgaaaatattgactaatttttttgagaatggtctcttaggaaatgtcaaatgcttccttccctcccccaatcaacttgctaacgaccctagaaagggttattgcgcatggttgggagcccataccaaaaagggtgcaatgctacctttgttcccgtacttcaagaagatggccaaatattatcacattagtctgacccaattcacacccaagtgcctctgtatctatctccacatttgtgttatacgcctcgcaaggatggagtgagccatcccctcatgataccaactagctattcaacctgaagtcaagcaccaagaaaaataggttggggtatttttaattctcttatatcaaggagtcgtggctgatgggtaccacagataccgtggtgacaaaaataggtggcttcgtggaggactactattttgtcaaggggatggacaatatgttggaaatattttaccaggatctagatttactaccaagatcggaagagcggt

SEQ ID NO: 116267 - DNA, 2983 bp, Cannabis sativa
  modified_base (108)..(109): a, c, t, g, unknown or other
ggtttaaagattcatacccgagtcggaaatgggacgggagcgggggaatagaaacccgccccgatatgatatatgtatatatttaagttttaaaatcataacttctannattaaaataacttcatgctttagactttttattgattatactctttttttttctactgtacacactattccacttaagtttattgttttactaagtttttatgattattttttttaattctctttgaaacattattttttttcaaaaatatatatgtaatgggtatccgatgggaatccttcccccgttgggtaattcgcgccccgcccccgctttaatttaaacaggtattgggacgggtatgggagtgaatttaaaaagagggtatgggggtggggagcaatccccgcaccccaccccgccccgtttacatccctatttaagaacatgttggtgtgttaggggtatttttgtaattttgacacgacaaaggtaaaattgtatttttatgatatacggtgcttgtagactatagtattatatagtatgtttattctgtctatctacaggtatttttttgacaagttgacatggtatagtcgcaatcgggttttttgggccaaaccaagttcgggacctaaaatatatattcgggatttatttatggcatttatatgatatatgagaaaatgtgatttatgtgatatatgtttgtgagttgaatgacaaaactacccttgtttatatgagtatggtaatatatggccttgggggtattttggtcttttggccaattaagacaatattcaacaaataagatttttgaagattagaaaccatattttatggtttttgaatccctttgaccgcctctctctcattctctctttaattggtattttcaaactcaacttgtgaaagacaaggcttgattttggtgtgaattcttgtgctagaagcttgaggtaatttcttgatctattttcttgttgaaatttttggagtatgggatgattctattggtgatttttatgttctttaggtttatggttgcatgttgttgtgaattgtatgaattgtggtatttttgggtgtgttattgctattaagttcatgctagttgcatcttaattgtcttgggaggtttggttgagtttgggatgtgtaattctaggtttacactttgatttctgagtagaacacttgaagttctgggatttttgctttgaaggtttaagtttcgaagcttacaagattttgtgcatgtatgttgttgtgtgacatgttttagttatgtgttggctttgagttgagctttaatttaagctcaaagtaatactaagagatagtgaggatcttctgataggttacaagaggtattgtctctctattcattcgtctagatttaatctttatacattatgttgagattcttaggcttatggttcatattagattaaactaattttaatcaaatctgcttccacttttctaactttaatatggaccataaaaactaacaattgtttgaaaagaaattatttattggacagtcgcaaatagaattccttaggatgaaattatccaaaagacaatatgaaacccaaccacatatagtccatgaactactcaaattctctgataaaaatcttactaaagtttaggtccaacaattattgggtatcattaatgatttgcgagactttgtttcctaactttctgtactgacaagaccacttagtaatatgcttaaaaagaataatccataatggtcatatgaccatactgtagtagtcagaaagctaaaagaaatcatgcaaaatctaccactttcacagatttcctctgatagaaaacatgttcttcaaacagacgctaattaccaacattggggtgttatccttctcgagcaagatgaactatgagaaagagaagaatatctggatataagagtggacacttcaaagattcccagctccattatcattcaacactcaaggagttaattgcaatcaaaatgggaatcacaaaatttgagttccacctcataggtcatcattttttggtggaaacagattttgctacatcaaaaggaatgataaacctgacaaagaatatgccaaccaatgctcaaattttgagattagcaacatggttcgatgatgtactcttttgaaataaaacaccttctcagaaaagaaaatattttggttgaccttctatctatacctacgtctataaatatggcctcttcacatctgctccaaatcatccccttaatctcctacaacttttcttatactattctatacatatatatatatatatatataatggcatcatcacaaaagaattactcattttcttgagatgcaaagctcatcctttccaaatctaaaactcagcaaaagaaagggcttctccaggactgtttatactcacatccaacttctccctaaacttggccctattttcaacatgattttttaattcaccctaagtatcttttcgccaatctagtacccctctagactgcacttttcgctccaaaatccatagccatctttttcgggtacctaacatggatctgtatgattaatgttgaagtccaaactatggctcttcacacttctatacagtcctttctcaaacaagaaaaaattaagtcagcttaccaaatccaaaaggatattttgttttggtacgctcctctagagaagtggaaaaaaatcttttgggatgaatgggaaaaaattcgcaacattagacacgtctttgtttctctatcagggccacataccgccaatatgatggatcactacactgatttccttatcagtcttaatgcaaaattggatgagaataagaaaatagtttacaatctaacttttgaactatactgtaatactcggtaaaaatatacatatattttaaattttatttgttatacaatttgtgtgagaataaatattcatttatttctactaatagtga

SEQ ID NO: 116268 - DNA, 2484 bp, Cannabis sativa
ttgctgttttttttttaaacattttctgaatcatttttgtaagaatttgaatccttttccttccccttggacaatgtatgcagcctttttttactgtgagatagatggtagctctctctgcctacaatgtgatatgattgttcatgttggaggtaaaagaacacatagaagatatttgcttttgaggcagagaatcaaggtttgtttccctgaactggagagtgttaattctggttttgttttcgttttggggcattttgtatttcaatctctctgctatgttgttatgtgcattcttttgtagtttccaggtgataagtccggtaatttagaggagttacggctaccacctccccttgatcccgatgaagcaggaagggaacaaagccaaccaccgaggcttaatcagcagaatcacagagctactcctgttgctgatctgaataatgataataataataatgatggtggcgcaaaaatggataacaaactgattgatctcaacagccaaccccataggatacatggtcaaccttcaactaaccgggtattttttatattgtctatgaagtctctctggtatttgaaatcatttttatatttcacttatactctaacattaagaactgtagattttgatgttctagttatatgagattataggcatttcaccattttaacatatttggaacagggtatcgatgcccttcgtggcactaatcatgaatccacaagtgtagtcccagtggtgtcctttgaacgagagcctgaaaaatgactaaggtacattcaaaactttttatcattgtttgtattactatcttctctgatttttcttttggaaaaggtaaaattcaatgttgactgatgaaatcctttagctatcattggatttagtctgtacacaaatgtcctgtgcagttgagaaatatgagtacaattgtagtttaatcttgctataaatttgtgcatctagaacattaaatgaggaatgcaaagatgtccactatagttttgttgaagttctttttctttttttgggtaataacacatttcttttacccatctctgataattgagcaatgcaagttttaccatggctcaactaagattactttagccagtaaaaggaagcaaagaaaaatactaaccgggaaatgacttaaacgttacaatctcgcttataggttgtgaaaaaaacactaaagctgccttaagtttcaaaaaaatagaacccgaacaaaagttgcttaaactgagttacaattctatatgtattgctttgtcttatgtaatatgtaagtgttcttcaacttatgttttgattaaacaagtcattaccatgttaaatatcaccttcataggctcattgtctattaaatttatgaaatacccttgtgactgcagattttctgggcaattcactcctgtgtctagccggataacaaaacaaagggctccgttcttactcctgtttacacatgtctttccattttcgctgtctgttatatttcttgtgcagagttggtttagataaaatcatccaccaaaataagaaaaatagttaactagatggatagtcactacttctgtattgaaaacattgtttgtttcgtataaatttgatgcaagttgttatcttctgtaagtctggaaccgaaattgaacaaaaactatgctcgattaccgttctgggtttttaattcgtctaaccggaagaaagaggatgtgaaaacttagttgtgctcctctgtttttcatgctataactataggataagatactataagagatggtaaaatgtgaaagttcccattatcttggtattcaatcttagaagattatattatagttcttttctatttcttatattagtttattaataccaccttaggtgctgttatgttcctgcaattttatgaaagtcccagcattatttcattatggtgaaattgaaataaagaaaacaagagaggaaaatattgtattttaatgaagaaagtatcaagataacttaagaactgaaagtagtatttttatgttgcttgtgagaaaagtggtcaaaaggatttaagaaacaaaagaagttatgaaatgattgataatgtttgtttcgtattaccatcagaaaaaattgtattacacctaaaaaagacctgtttttgtgcacacttatctgtttcgatatttaggaaagtgttttagtcttattttttcttacagtgacggtcatatttgaatagtttactttgacaaaataaaaatttaaatacttgcttactaccgtgtataaaaaataataggggaattactctatatactatttttttagttttttttttcaaatttacggtttggatttctataggtgttgcaccactagttacaataggagtatttatacgattttttttattataatttaggttgcagcgctagttgcaataagggtttctatgcagaattttgtaaaaatacaaaaaa

SEQ ID NO: 116269 - DNA, 4568 bp, Cannabis sativa
ggagcacataactttttcaataattttgcttatgcaaaaaataattgaaataaaaattgtatatataaaggagtgagtcaaaaagagaggagaaatttgatttgaatatgtcttttgtttttcgattaaacaaatacgtataagcttttatctagggatctagtttcatggggtaggaggaggtgacattactataagcatatatatattttaaaagggtaagtttacaggtgtttcagtagaacttatatttattttggtaaagttttttaatctattttttttttaatgatctgttatagttatttaggatcatttgtaaaaattttagaaaattatgagtaatttataatgtcaaaaataaaatttacatattttattgcacgagtttttcttacatacgtggtaagtaactgtttataaccttatttttagcaatgtaacatattcagaattttctaaaaatttacaagtggtctaaaatagctacaacgtatgctatcaaaaaaataaactaaaaaattcttataaataccaaaataaatagaaaatatctaccagaacaaacattataaagatttctacagaaaattttctatatatttcaacatacttagcatatatagttgtataaatctctctataaatatatacattaaaggtgagagtcatgcattgcttgcttgaacaaagattattattattttttttttcttttttattagttagttttctttctcaacaaaagacaaatggatttggtgtggttcatacattatagagtcaactacttgatcttgatcatatatattaatcaataatcatgtaatttgtattttaactcaatttgttcaagatatatattatgtatgcatatattaatgtagaatatactaataattttatttacaagttcatttttattaatttggctctacctactcattcatgagaagctttattgtcaaaaaacattattatcagcaatttagcattaccctttgaattttatggtatggatacatttttgtttttattagtagagaaatatttattttaagcattttgaaaaattataatttaattttttacatgaccatatacaattgtactagttatataatatatattttagtaattttttaattttttcaaataattcataatatcaaaaaatataattcgaactttcagttgtatattgtgtctttttttttacacgcgttcaactgatattttaatcttattttgtgatatcgtaaattataaattttttcaaataattcgttacaattttttttttcacatactgaaaaagagtactattaatggaatttatattttttacggctaatttagatgtttgtcccctaaacttaacatgtatcaaattatgtcttctgaacttttctggtcattaaaatttcattaaattattgagattgttcgatttaaggacttttgtccaatttcattcaattttactaattcggtgattatttttttactaaatcataatcttcagaatttgatatttaccaaatcataccactcgaactttggcatgtaccaaattatgtttcctcaactttatccatgttagactttccttactaaaattgagcaaaaatccttaaatacaatattcgcaatagttcagggtagatttttatcgaccttaatagtttaggaaacatgatttagtacatgttaaagtttgggcaacaaaaaccttaattaagtattttttattgataaatatatggctttttttttttttacatagtgagggcgctatattttcaatattacaacactctgagaacaataaaaaattgtcccatgcatacatttaatttcacattcttaattaattgattgccatattcaaaagaaacattaccacaatattattacacacataaataatcaacctaaattaatgaaaataacaacaacatgatctctctagcttcttctatggttataattctttttttttttcaaccaaaaaaagaaggcatttatttgcaacacactccatagtaaaaaaatgaaaattaatattgaaatactatcacactattaatctaggattttgatggtggaaatggcttcttaggatgtgggaacttaaagaatggtttcttaaaaaaaggatgtggcttgtaaattggcttcggttccacctttggctttggtttcggttttgattctttttttggctttggctctgacttcggttctggttttgattttggttttggctctggctttggttctggcttatgaacgggaatcgacggaggatgagacttcttaaattttggaatagggtgatgaaaaaactcatgaaattttttcaagcatggtttctttgatggtgggatgaacgtatcttcatttttgatacccggagcttctgcatatataacatgaaaaaatatgttattgaatgttattatatttgaagaatatataatcttttaacattatgtatattaacaactatgatatcattgatatggaatgcaatgaaaaattgggtcattagaaatgaaaaattaaaatgtaacaacttttattttgttggtatgattaatgcaagttactttttaattatgtagaaaaattatgatagattattgttaattataatctcttagtgattctccacgcttaaaattacatgtcgaaatatttttttaattttttttatagtggtattcattatatataattacgatgcctgtaaatttttttgaatggtttaccgtactgaaaacaaagttttcgacatcccaatctactttgtgtatgttaaaaaaacttcaaacctatttcgataatgtaaattatatttagaatttttaaaaaatttacatatatcatgttgtaattatatataattaaagaacttgctataaaaaaaaaatattccagtatatagttttagatgaaggttgactaagaggttaatagttgcactccccgtatatatgcctatatgtatatatattacacattgagtttatgaatattctttttatcttctcaattttctatgaaaaagaataaattattattgattatttacatacctgaagaagcttggcaaaaactcacagcagagaaccaaagccagagacctagaagtgcccattggaaaagagcaatcttcatttggaatttaactattattatttttattataagtttcaagtactcaaaggtgatatatattttagtgatatgataactcttatgggatatataaatacatagctatggatcgtggagaagtaaattgaagtttatttcacttaattataagccagccaaggacttaaacaatggacccaaattgagcttttctttaataatttatttattattgtgttaataattttcatttatgacactcccaactgccaactgatacacaattcatataatttcatatatatatatatatagataacttcttttttatttaacttattaatttgttaggagagaagccacatgttataataatgagcattgttatgcattttcaatggtattttttatttttatttcagttaaaatagcttaaaatagagagtcattgttgttgctccaaactttctactatagttaatagttaattattttaatttgtaatataaattaattttataaaataatataaaaaaatagtagtgtcaaagattaaaatactatttaaaaagtttagcaaaaaaataaggagatttctacattaagagaactttctatctattattgattatagaaagccatttttgtatggttagaactcattttttccaaatctcactctctattttagctaaaaattgtgtttagaaagtatgattagagatgcttagacaccttaattaaggtgccttttaacaccacaccgatctaaaattctttggttaacgattttctatataatttattaaattaaaatgtgtgaacccgatattaaaatacaccaataacagtatgctacctcttatggcgtttagtacccgatagtgttctctacctaatttttaaaggttgtgggaacttcaactcttatttttctttctataatggcttgtttatttatttattattaatttaaaataatttatcttttaaataactagttagtttttaattattaaaatacagttattttttctttttatcttgttttcatatttttgaaagaaaatgtacatttattttgtatttttaatctaataaaatatatttttttattttgttttttgtcttaatgttttgttttttttaatttatgtaatgtaagaaaaaaagaaaaaagaaaaggtgagtataaaaaatggagtgtatttcctttccaaaaaaaaaatggagtgtacttgaaaaaattagcgtacaaataaaatatcccaagaatggggagaatgtaactaattaataattttggaattctattaattaaggaggacatgctataaagcaggctcttattcgcttgaggttgtggaggctctgggaatcaaggaagctcttagttggattaagag

SEQ ID NO: 116270 - DNA, 913 bp, Cannabis sativa
aatattaatcattattatgtctaatagtttgtttcatatacactttattttttttttttaaattaaattacagtggagaatcaggagaacgacatttacaattcaccgataactaattatgtggcaacatacagagttttggcactggagttgataacgctatccttgagcgtgttatttagtatccctagaggatatcacttcaaaacagcattagcaccaacaccggcaacagctgaagcaacttttcttggctaagagtcgttcaaactgtactttatcagcatcttacgtgtgtttgggagcatcaataattttctgagtttcgttgttgctcctaaagttcaacaaaaaggaaagttgtaagaaaatcctactcattgtgtcattttttttatccacattgttgtggtgttgatgatcgtgctcgcgacatccattggataattaatccaaggatgttatttgttttttattgggaatcggtcttgcttcagcaataggttctggtatatttcttttttatacttgggattggatattgtggttggctgttgggttgaaggccaaaattgtttggacctggaatgagctgaaggtgatcggagcattgctgaaacaaaagttaatttataagctaattttaaatggattcttgtgtgttgaagtgtagtgaaatggattcagatcattttcaaatacattgtatttttattttattattttctttgtcaataaacgaatgtattctgacattatttttgatttcgtaacttgaaggaaatgcaatgttataatatatcatgtaaaaaataagatattttacatcatgtaaaaaatgagatatttttttaataagtaatcataaagtttaactttaagaagaagaagtgaattttattttattttattt

SEQ ID NO: 116271 - DNA, 2475 bp, Cannabis sativa
aaccttcttctaaagccacttacagtatatttgttctttacttgaacacataaacgtttgaacatggtctcgtatagttcgaacaaagcattttactctttatgctatgtctagagaaattcactactggctttaacttgaaaaaactagaggaacatcaaatcattcccaacgaaacaagtccaaaaatgaagacaattggagatctttcttcccacatttaccaaaaaccagcttcatttgtttcataggtaccattcgtctgaggtttttttccttttttttttttgttttgaagaaataatgctgatactgatagtgaacaagatacacaacacttggaaaaaactgtacttgcacaacaatctagccttttcatcagggattatattttccacaactttgcagattatatcaaaagttcaaacattttcttttgtattctaattcctcatatctgactaattgagcaatgcactcaaataaagcatctagcaaacagttaaagaaccctctaagcaatttaatagtcgtatgcttgtatgtaccagaactctttttcatcagttactgtgactagccatgatacccttgctcatagcaaatagatttcaatacggcagcaaattcacaagttggtgtcattgaacgcttgttggttcatcagaaacaatcacagagtccaaaattggctgggtttcagcacctgacatttccatacttgaggatctgcagctataatagaaaacagcactcatcatggaatcgataagcactacgaaggaatacataagcaccaaaaggggtccttcccataaccttgacgatccatctccatagctcaaagtcttcactctgtgctcgaataatcccttcacaaaagccatcccaacggtcgatccaagaaatataagtagacccacatgagtttgacccttgatcaatacacatgacctcaacaaagcctctggtcccgagacatcctccagtacagatatcacaattgcaatatcacaaataacaaaggcattggcaaaaatgactgagaaaacaagcccaactactactgcagcatacactatgatgctagaggaagatccaataatggaaaatatattgcagacaccagcaagtaaaagaaagaacaaggtaacacaacccacaatgaccatacaaacccacacataagtcgaaacaagtcgcttccaaatcttgcaaatgattgcatagagcttggacgaatcaaattgcttccttgaatagctacagtccactgaataaacaacagcagcctttgataacaaagacaatgttatgaacaagggaaagcacataaacgacgagacagccatctcagcaaaatgctgacccgactgtttgatgaaaggcctcaatgggagcccgctcgacttggcaatcaataaaagcctgatagtcagcctcttcacaagtgattgatcgattaagatgttcgacagaaccacagccgatattgggcaaatcagcaaggcggctatagccatgaacccccacgaattgtacctgagtatccgtacagtttccctcaagatctccaatgcgttcatggaacgaaacgcatgattggatccattttcgggatcgtatggttccaactggaatcctcgcaaatgcgtttcttgtgaaacatcttttctcaaatgatctaacctcaatcttggagaattttcagcagaaatctccattttcgttacgaatgaaacaacaaattctatacgtctaactaatatgacaggtaatttattacaaaaaggagatagagaaagctaaacctgactccataactggaagatagagaagagagtcagatctgataaagcatagcgagttgagcacagaagctagcgtcacgaaaacgatggggtgaaagcccacattgatggcgatggctaatgaagcgttttgcaatgattttcgaattggagggacaagtcacgtgattgaagggacatgtcacgtgccatgacattggtgaaggtagaggaatgtgttgtgatgggggggagcttccatgcccatggtggtctgtgtcgtagagccaagcaaagaaagaggagaaaatgaaattttggtgcgagtcgtggaaatggggactttaatttttgatgttttcttagtatccaacggtcaaaattagctgattcggacaattacaaacggtgaagattacatttcatttgttttattattttttttttctgtttatttgtttgtcggtgtatttattattattattatgaagatttttgttacaaaattagagtgagtaatgtatcgagtgtcagacccgcatcccccgagtagctcgtcttctcaaagtcaagattttcgatattgcatagttgattttgacttgtgtattttattcattatatatttctatctatttttaatttttattctaatccttaagatatattttgtaaatttttgata

SEQ ID NO: 116272 - DNA, 1398 bp, Cannabis sativa
aacaaatcagacagattacattgaaatgaatgtgtgtgtttaacttagggcataaaatcccaacaattaaggaccaaaaaccttgtgttaattgctaagtagagatataatagtaatagtaatagtaattagatcaaagaagaaatcttaagtgtttaaagattagaaataatcttgtattggaattattgatttctttcttacaaagttttcagcccccgaccctctcaaatgaatggaagggggtatttataggaggttctaatggcccattgttacaaattattttaccctaagtggtccctaagggggaccacatgttgtgtgaggaaggctagtggtcaaagttaaaagtagtagggttcaggtagtggtggtcgggtgtcaagctgtattgacacttgggatcacgctctcacttccatgcccccggcacaaatcctactttatcagcttttgcaggtgtcgtggtcgtacccttctatatgttcttggaatgccttgtcctttccttgaagattccctcctaggtgaggggctcaagccttggttgagtctttaagttattggtagggccgttgtcacttgtagtttctttaaggtgagaaatgggggagaacttcatttcccgtcgcttggagagagatagtaagggggggctctagtgagcctttggtctcgctaggtcgaaataacttgaacatgggaaaagtgaggtttccctagctttggtggcacgttgtgatgaggtgacaacgagcgagagcctcctctcgctgatgggggcaacacaacatgaaggcagcgagaccttcctcgctgatgagggtgtcgcaacatgaagatagagagagctctctcgttgatggcgtagcacggcatggagctctagtgagctccttggcttcacatctcatcccttctttcttttatctcatgttgatgtgatctcgatatttcttcttagtgaattttcaaggttaacagtagctactattgagatttgaaggactagaaagctttttttcaaataaatccaagattttcccgacgacttgaaattctcgcaaacttgaatgaaattgaagaataagttaaaaaattgatttttaattctttgaatttatcaagagagatagatagctgatttagaatgtcagtaaccgacaataattatcaaaaacttgtcggagcaaaaggagatggtgccacgtgtgaagcgacctcttcttttcttctttattaagagtctcagtttgttttttaaagatagccaactttgcaaataaaataccttataaacgtagaaattcaataaataatttagggttcgtttggtacgccgtattacaccatgttgtattgtataatattatattgaattgtattttatgcaat

SEQ ID NO: 116273 - DNA, 1898 bp, Cannabis sativa
actagtttataatgtctcgagttactttcttcgatgtaacctcaggagtcatatttacatcgtaatgacagaaatccctatcagcaaccttcaccagaagtgattttccttgactgcacacttcctaccagcagtaccataatcaagtttgatcaaaaacttagcagacgtcaatgatgttggaagaaaattgccagtcactgccaccgcgagatcctacaatgtcagtttctgatcaacttcacggctcgacgaaaaggtaatggaagtagtcgttgacaaaggatctagcaccagcatcagcaccgtcagcgggattgaaggttgagggatcggagttgggagctagacaaggccattatattcggtaaccctttctaagttacttgtcaccggcgggactggtcctaacttcaccattaggcctcatcacttttcatatcacgtttttttgaatggacgtgtcttggtgaacaatatgggattcaggtctgaggggactggtggttagctgtattttcaagacattgaccggttggatatgagcttttccaaacatgcttgggtgccatgagaactccaagactatttgcatccaccttcttcatttttcttgcctggacacgggcgtaagcctttacttttgacaatagccttggccagcaagcctctaacttccgaccggatctcggtgggttgtcaggcggcatctttcttccttttcttggacaggatcttcttttcgtaacttgtgattcacgatgacaaacgtcgtgcatatttccatctttcctcaactctcaatgaaagcaccaaaatgtttaccgagattttcagaaaccaaatgtttagagcttaggaaagaaataacatattaaataacagatacgagatttttacttggttcagatattaactatccttattccacgagttcattttattaggaactttgattggtgaataataatacaaatacgtatacaatggaatgaaactctttattcctcttgtttctcttggagaagaagaagccttgtaggaattttttcttataaagtctttacacagtagtatatagtatttgtcttcaaaaagttgcccctatcttatggaatgtaggagtatttatcggccaacctcccctcgcacgctggatgggccgatcacatttagaggaaatctgaccgttgattaggtaggtgtcgttttatcacatggcatttaattaggccagcaagtacagtttggacatcatacacgtgtcgccctagggtcttccatttttgaatttcccatgtcgatggctgttggaacactcaagcaactacgactgggtgcgcatgctctgtcctacgacataacgtgggggataaatcctagcaccgtacctgaaaaagccaggttgccgcacctgcagtctgacacatatgagcagagcttccctgtgatacaaaatggagttacacagtaccttaagtcctttaacggtctacctaggtatttctggggaagcccctgacttctgcagagcatcatgcttaggctcccggggagatatcaccaaactcggagactccctacgtccttatcttgtgtagaaataggcctcctagaagtcctttgtgagagccctggcaacctcttacgggaatttgagccaaaggtactagtcggtcgagaattatctctccttcccggatcaaagtccacgtgtcatgcttacaaaaatttggacaacatatgtgtttttacattatttattgaaatttttacatgaaaaatacaaattgatactttatttacaaacatatctctataaggtgtgggcaacaattttgtctttaatgagcttttacttatcaaaataccacttacacatatccattcatgttagc

SEQ ID NO: 116274 - DNA, 1654 bp, Cannabis sativa
ccttccccaggcggcgtgagattgcacagcttacccggtgtttccccttacggatcacgagactactaactgtcgcaataacagattcaaaataatcctcgaataatacactaaaaatattaaaaaatctacacaaaataactacaaatttataattttttttttacagatatgagatcgctcgcctatgttgagagcccactgaagctaaatctgcaaaataataataataaataaataatgaaaccagagatagatagagagagggaaagataccttcgagttcgaatctatcgtgggcctcaacgagacgagatgaagcgctgggtggtcttcgacaaggaaaagagaaacgagatgaaagggaggaggtggggtggtcgtcgatgagacgagatgaagcggtgggtggtcttcaacaagaggaagatagagacgagacgagacgagagggaggtggtggggtggtcgtcaacgaagcgagagagttgagagagggagacgagagagcggagatggtggtggtggttcgagtcgttggggacaatggagcttcaatggtggttcgagtcattggggatggtgaggcttcggtggtggttcgcctaagagagagaaagagagaggagtgagagagagaccgagattggaaataaataccacatttaaaatttttgggttttatataacatgagaataaggaacaggcgacgatttttaaatgtcgggtatactatactcgagggttctaaatcatcgattatagtatattaatcatttcaaaactgtcgggaattcttatttgaaagatcctcatttcaattttgtaagtgttttaaaccatcggatattcttaacgactttttaaaatcggcaggtattcttgactataatttttagttttaaatactcacttcattttattaccgatggttctcgaaaaaaaaaaaattgattttaggactgatgataatagtattttttagtattgaagaaacatgtttattctagttcaaattataacttcaatgtgaactaagtcctactctaacttggaacacaatttcaaatttctttattaactagcaatcagagttgagtatatatgggttctcataactgttttactcttatactctcgtgtatctcattacaaaatccttctcctttagaatcccaaaatctttcatagtgcttcctttcttagaattatgaagatgacttggccttatatagacaggttatagtaagtggttgaatcaagaatgacgagttagatcaatcttggataataacagatgtaattgaatctattattactattagtaatttggcaggaataaaactccatagtgtgttttaaagtagtaattttaaactttttaggttaaaccaaaattaagaaattataaaaaagcataaacttgatatgaaatgcgtcaaattcgatacttggttccatttatggcttcgggtattgggcaaattgtgtaggtgacgaaagtgggctaggcccgcacctagaacctattctacccaagagcttaaataaatattttctatttaaaattatagggtgattctacaatgcagctccttaaaaaggatgtactggtgcactcttaacttgttttggcatctagaaaaatttttt

SEQ ID NO: 116275 - DNA, 1561 bp, Cannabis sativa
tatcactttattacttgtttgactacgtatacttgcgtacacaattttcacaacacttgttggatagatttgataagtacctctctcccaccagctgaaaagaaactttgtttccactcgcgaacacgtttcctaaccttctcacagatcccctcaaatgcccgctttttgtttctaccaatcactgtaggcaatcccaagtacttatcatgagtagtcattgatgtcaaccctaatactctcagaaccccatcttgatacacctgttgtacattcgaactaaaagtgatagtagacttctcaaagtttatcttctgactagatgtaacctcataagttagaaggatacactttataattccagtatcaactctattagccctaccaaacacaaggctattatccacaaaaaacaagtgagtaactcgaggtcctatcctagaacacctaaattccatcagattagatctggcctctatagaacaacgaggacaatgattctgcacaaaaaagtaataaataaggagataaaggacacccctttcgtaaccctcttgttggaatcactcaacctttaggacgaccattgattaaaaaagtttactctagtgtcgtcacacagtccataataaccctaatccaaccctcaataaaaccaaattgtcgcatcatactggctaagaacctccattccacccaaccacatgctttactcatgtcaagcttgagcgccataaatcctcttctggagttatttcttttaaacaatgaataaagtagctcaaaactaaccataatgttgccatttatcgagcatcctgggacaaatgcactttagaaagaagagatgggggccaagaacatttttcatcctcagtgataaagcttttgtaacaatttatacattacattacattacaaaaagcaataggtcgatactctttaaccaatcttggtttttttacttttggtatcaacaccacatttgacttactaaattgttacaacaaagcaccctcatttattattacaaggcatactcagctgaccctcacacccttaatatctcaaaatctcttaaaaactaaagcatgatatccgtctggtcccagagctttagtggagccaatggccgtaatagcatggtaaatatcttcccgagtgaatggtgccataagacgttcattattagccaccaaaatatgtgaaataaccacatctgtaccacactggattcgctcatatgtcggattggctatttgaaaaatcttcgtaaaatacctctcaccaacaatctcttactcaacacacaacttttgctattttctgtcataatcttagtaataacatttttccttcttcctcactgatcctttgttatgaaagtatttagagtttctatcacctatcatcatccactctgagctcgatctctatttccaataaagttcctctctatccataatgttaaagatcaacacctactctacaagtatctagaactttctatcattttggtaatattatagaattttctagaatcatagagagtaatagtcat

SEQ ID NO: 116276 - DNA, 930 bp, Cannabis sativa
  modified_base (672)..(680): a, c, t, g, unknown or other
  modified_base (887)..(903): a, c, t, g, unknown or other
aaaaaaaaaaaaaaaaaccaatacaaattcattttcccagcaaccaaacagtaagctaacacatcaaaatataaacaagcaaagatatatatatatatatagtaatatacatacatacattcaacagtggcactaagcaatcgattgcccacataagcccaaccaagatacatcctaacaacagcaagagtaaccacaataagcccacttgacacaacgcagagcaaccgcttcactggttcggaattaggtccaacggcgccggaccaggcgacggggagtccgataaggagagcaaaagaggctcctgtgacagccaatcgagagcaatactcgacgaaatctccggaggcccatgagaaggggaaagaggtggatagggtttggtactcgtttatgggttgctgatctaatggaacaggacaattggtttcgcttccatttctggaataggagaagggtgttttggggagttgtaatcttgagttgccatggaaattggggttgagatatctagggttagggtttgtggagggaaatgtgaatttgggttttggaggtaagtgtaggagaagtgttgaggagatggctatggccatggctttgcttgacttggctttgcttgactcacttcaatttcaattttttaagattttattattattattattnnnnnnnnnattattattattattatatcaatttttaagattttattcttcttattattaaagtaaatatttttgggtgattcgacaatgcactcccttaaaagtgatgtattgattcacccttgacttgtttcggtattcaaaagaactttttagtctaattcttttttctacgttatagctatataagataacttacaaaattttgagaaattnnnnnnnnnnnnnnnnntagaaaataatattcaaacagtctatt

SEQ ID NO: 116277 - DNA, 1037 bp, Cannabis sativa
  modified_base (821)..(829): a, c, t, g, unknown or other
tatttaaattatttttttttttatcttttcaaattatgcatgaaaatagtatttttgtaaaataaggcaaaatactggggcgttataggactatcttttagtagtgcaagcacttcgacaccaaccgtctacatgagagtagggtcgaatgtccttttattgtggtggttagttgaagattgtaagatgttgttacaatatctatttaatatgtatttatttttcgttaaatagtatgccaatagggttgcacataatttataacaaacgtatctcattttatttttgactgtatatttttatagggaataatatttcttttgatattcaaaatattttgtcatctaatttgagtttatgctaaacaatatactaatggaggaaaatatatattttaattaatattttattttattccttatcacatttaaaaaaaggtacatatataaaatgaaatatattttaaatattaaaataaagaaaaataaggtccgcgaagcttatatcccgaaaatattttatatttacattcatgctttttggaaagagctcttaaatcaaattatctatgcagtgtaaaaataaaataagagatactttttttttaaaaaaataaaataaaaattatattaatatgtaacataaaagaatgtgaaagaaagtttttattattaaaatattatgattaaatttataaaattattttcgtaatcttttgtggtgtaaatataataacctaaaactattaaaaattatttctacatactttaataatgattttttttacacaacaacaagctatattattattattattattnnnnnnnnnattattattattattatttgcaaacaactagctatattattgattaaaatatatcatgcaaatgatttatcttatcaaacttatcgaaataattaggggtgtgcagaaagtcatttgatccaattccagtcgattcaatagaatcgaatatccaatcataattggatcagatcggatgtaaattttaaaaattcaattggatcggatc

SEQ ID NO: 116278 - DNA, 1917 bp, Cannabis sativa
tgtgtaggtatgggactacacagttgaagagggcataaatggatcaattggtactacctatatcaacaaagtgcatcttgtgtttcagtagcccattactaaagaactccatggttaagtgtcctttacttggggtaatttcaggatgggtgacctcttggaaagtttttccaagaagtgtgcgagtgaggacaaagcacgttggaaacactcatgttggtctgtagaaccagtcgtcagtccatgaagcagcaagagtgacgtactcgtgtataagagctattattccgtgagtgtaagggtacaatagaagtttgaaatagaaacgttacattggaacaaataaaaatgtactagaatgaccattttacggggtttacgtacttttataaccctaaagctgttatatcatagtagttgcatgcgtatataaattaaaataagtagtacacatataattagttgtataaataaaatttattgttcttagtattgtaaattattagggagcagtctgctctcatatattcaagtaaagaaatgttaaaagacaccagtagtgccaagtaccttcttacgtgttaatatcgttattggtctaattaagtatcagattctatatagtttaatataatagcttttagtgaatatcactagccaatcgcaaggtgacacgtgttaagggtgctaggcaccactgatgctcaatagcaatggtcattcaagtaaatttatctaaaaaatttgctattgccctcgagccacattctttcttagagtcggtacaaattttttaaaaaatagtttcatataaaaagaataaattattattttttcacatgtcgaaaactgaaatactcacaccaatgaaaacaaaaatagtgttccattatatgtcccctatatatactacaccaatcatataaaattcaactttggaaaatgaaattaaaaaaagaaaaagaaaaagaaaaagaaaaagttgggatccaagtcatcattcaataaggaataatttacttttattggctggttttcttccattcccttaagcactttgccctaattatgatatatattaattatcaatacatatatatatatactcatattatatataaatatacataatatatcattatatataattaaccacacacaaggttcgccacaaaactccatctttccactttgtgatgatgaaattctcaacagcctatagttcttaatataatctttttattaattattatttttatttatatatattatatatgtatttttttctttttgctatattactttatatatatattaatattagaggacaccactaatttggaatatataccaaaaacatgtctcttcactttgtgaaacgatcgatcatcgatcattgactgagtattattggctatatatataataatttaaaaatgataataaagtggtgccatacatatcctaatagaaacaaatataaatatatattatatataaatttataatatattatatagatttgattgcatgcatgccacacgttacaatttgatttaattaggtttagtattattctagagagttgttgtgtttgtacatatgaattcatgttcataagaccatgaaatagtactaatatattcttataactttcattagatatataatgatcgaaaagacaccatatatataatcaaggccctcttatgatgttgagagacttagagcgaaatttgaaataaggtattttcttttaataaaaattaaaaataaattttaattaaattttgaaacaatattaattttaattcttttatctatataataaataactttttggaatataaactaactccatcaaggaatatttaattactaagaacatttttattgaagtgctatatattttagtac

SEQ ID NO: 116279 - DNA, 1743 bp, Cannabis sativa
accatagttgagtgaaccagtatatggaatatgattatcgaattgaagtgctaatatcatgtgaaaattgttatgagaactgattttttttagaacaagaagcattgagtttttgatgttaagaatattaagttttaaaataaaataaaaataaatgtaatgcatctgaaccctccacgtatctatatttatgagttaacggaaatagtagtaacggtgtaagagaattgtaaccttaggtatttttgcctccaaaaataaacactaagtatttaagtgtataaaatctgaaatattaggtattattgccgcaatttagcctatgataaaattagattagaagtttaatttccttgaatatgagactgataaaggagcctttttacttcagatgagaagttttaattaaagtccacccactaactaaaaaatctcaccttcatacattgtacaatttaatatttatttttgtgacattattcctaaatctctaactcattttctctctctaactccctcattctctctataactcttgaagaaactcacaccggcattctaacctcaaactgaatttatactaacgtttgcgcccaacgacccagactggcatctaccccaaacccaacccatacctgagtctacctcgaaccttagcatcctcaccatctaaacccacaaaatcaattttcgctcggtcgcagcagcctgacgagtaaaaatttgttggagcccgaataggaagcccctgcttgcgttgtccatcgaaaatgcgatccagagaagacctaaccattgagaacctattgaaaaatcatcaggaaccttattaagtttagtggcccactaggcccatctttcggcccattcctctagggctgcctcttccttcccctataaatatatcatttgttgtaacaataaaacactttggcatttctgccgttaatgagaatagcatttcaaatagagagttttcatttataatatggtatcagatttcaaaccctagtcttctccttcttcttcctccatggctccaagaacaagaaactccattgctgccgcctctctttccgagccatctcctcctcccatcgccacctccggtaaggttttctcctctgtcgaagccgccgccgacgtcatcgatccacctccgactgctcctttcatgacggacccgaacggagctcttcctcccacgtctgatcctcccacctctagtgtgatcggctccggcaacgttgccgatctccccacttgtggaacgatcggacaaccttcctcaactctgaccggttccttctccgccccgacgccatcttttttggcttcatctcttgaaaatccactttcgcattttccagccaccttcccgacggctcaacagtcggccttcacctccgcggcaccaccacaacacccgccaccttcccgatggttcctcagacgaccttcacctctgcccgcactaccacatcacccgccaccaccttcgacttcccacccgtccacaactcctctttcaacggtggtaataatccttatcttggacttcaaggccatgtgccttttaatgaaaactctgtgtttaatgctaatcccggcctttctcgtgccgttcttgatcgaccttcccatgatgaacgtactccgcttcatctcggaactggagatcacccaaacaatctcatcgcttcatttctcttgactggtcaagaaaatttccagtcatggaag

SEQ ID NO: 116280 - DNA, 7693 bp, Cannabis sativa
  modified_base (2958)..(2964): a, c, t, g, unknown or other
tgcttttcttactgagtctgtcgactcacagtttttgcttgcatgtgtaggtaagggcaagacttgggttgagcagccgtgagatcgagtaaatgaagattgtacatcggggcagttagacctgaagagtacgatctttgggatagctgagcttattttgtatagtcgctgagtgacaaacccttgtaatttgaacagtaaaacatttgtaaatatttttgtaaacaggatcccgatttaatccaaatatgttatttttgtgtttataattacttaattaaagttttacttattgacgattttcaataaactcattgattagcaacgggctgcacaattaagttaaaaatcacgttaacacgcctagactagtatggtgttacatggaactcccactcttcctactcctgcatatggtagggatattggtgattttataaaagaaaagaaaggctaccccaacatctggtggattgggacagagcaagcatttttgagggaaccaaggcagaggtggatgccagggttattcttaccctgagtgcccacgttgtaagaaacattatccgggagagtgcaaccggaagacatgcttttagtgtggcatggtcgggcatttcaagaaagagatccttgatgaagcccacactacactttattcgttgcatttgggaaccaccaaaatgtataaggatctaaaatcttatttttggtggtgtgggatgaaaaaagatgtggtagaatacgtatctaagtgtttaacctgttagcaaattaaagctgaacactagaggccggtaggattattgtaaccattagcccaacctgaatggaattgggatgatattacaatggacttcgtgggctatttgcctagaaccacaggaatgtatgatttaatatgggtcatagtggactgtttcacgaagtcagctcatttttctgccagtaaagattacctatacagtggatcagtacgctgaactgtatgtgaaggaaatagtttgcctccatggagctcctaaatctattgtttccgacagagatccaaatttcacatcaaaatttaaagttcagtacaactttttaccctcagattgatggaaaatcagaaagaacaatttagatattagaagacttattacgagcctgtgtcatggactttgaggattcatagagtaagtactcgcctttgattgaattctcttacaacaacagctaccagagtacgataggaatgactccttatgagatgctatatggtaggaagtgtcattccccaatccattgggacgaaattggagaaaggaagtacttgggtccgaaattagttcagaagaccaatgaagctatagacaagatcaaggctcggatgcttgcttcacaaagcaggcagaaaagttacgctgatccaaagcgcagagacattacatttcaagtaggggaacatgttttcctgcgagtttctccggtaaaaggcattaggtgctttgggaagaggggcaagttaagccctaggttcattggcctatttcgatttctagaaaaggtcgggcaggtagcgtatcggctagccttaccaccaacgttatcagttgttcataatgtattccatattttaatgttgaggaaatatgttttagacccaactcatgtcttgagttacgaagcccttgaactacagtcagacttgtcctacgaggaacatccagttcaaatcctcgataggaaggagaaatttattcgaaacaagactatagccttggtcaaagtgctctaaagaaacggcaaggtggaggaagccacctgggaattagagtctaatatgaggaatcaatatccagaactatttaggttagatttcgagggcgaaatccttttaacgtggggataattgtaatgaccacactttagaatatggattagtaaaggcaattagcgttaattattgatatttctttattattcatgaatttatttaattatgggtcccatttttaaaaatggacattagagttataatttctcaattttagagattttattaaactctagaggtattatatgtgttatatatgaactatgtaatttttataattttttctcggcgacgacaaaaaatgcgatggatggctgtttgagtcacatgggtaaatctagaacttttttcttagtgggataaatatttgagataaatagaataccaggtttgagtggggttatggcttttgaccattttaaccctagactttgaattacttaagttataagctaaaatgatattttggtaatttaaaaagagaattaggtggctgcttgtgagagtggcagctggccactttgttttatctgagctgaagtaatggtcttagacattattctctagagagaaattaagaaaaaatcaagacaaccttagaaatttcaccctttttctctatttttcttgttcggcctccacacaaccataaaacaacccatccaagctccttatttttctggaatttagcaaggtctcaacaagtttggaagttgttcaagtcaaggtaaaccttagatcgttatctttgtgttatttaagcttttagttaagtttagcttatgattttgagatatagtggctgtttaggttaggttttattctagggcatttccagaggttgttttaagtttgaattgattatttattgttggttttgctggtttgtttgtgaaatgaacaagtttgagcttgtgagctcatacttggctcattaatggcagaattggattctagggttgtatgttgtgttttagtgcttgaaatttattgttggatgttattctaggtgttctggaaagtttggctaagtttggacacatttcgggcaaggtttggattgcttggggaaacctggtgcaaaccgattaatcagtttgctattaacagaaattgtacatattaaaccataaacatgnnnnnnncatgtaaacataaatgacttttaatcttctattgataacaaatcagactatattaaaatgggttttatttaaggcataaaatcccaatagtgtgtggtacagcacttagtggtactcagagtacgaaacaaaccctaccaacactcgtacagtgtcggtacgtagtgtatgtggtacagttgttgtaccctagtaaagaacgttcttactaatttgttaagccttgtaaataggtgtatgggcacctagatacaagtcgatattatattatttgttatatgcttttcttactgagtttatcaactcattgttgtttttttccttgcgttggtaaaggaaaggcgaaggctgaataagagggagcttccagctaggatggtgtttgtacatgtcatggtggcgcgacacatctgcagattttattttgtagttgctgtgcgaccaaactagatgtattttgataatgttgtaaaggtttaaatacgggatcctgaatttcgtaaataaatgtttaaaagtttataaagtttagcaattaaatttaaagttttaatttgacacgattttcaagaaaaatcttttgattagcaaaggtggcactgtatttgaaaaatcattgtagctcgcctaagtatcagggtgttacaatatatatccctaaaatttttaaaataacaaaaactatacaaatctgaaatagaaaataaaaaaaaaaaatacttacatgaaatgagttttggtggctggtatttggtggtgggtggtggtacttcggtgttgtgtggtggtggtggtgcgtggtggtgagaagagctgaaaatggctgagagaagaagagaagaagcaaaaatggggaaaataagggaagtgggtcgggagagctatttatagaactattagcggcgggacccgttgctaatatacattaaatatatatatatttttttattattattactggcaggatccgccgctaatgctctcccgctaataatattcaaactgaaaggatgggaattttctcgcccacttattagcgacggactattagcggcgagttctgccgcaaatactattagcagcggacaatagtgacggactctggggttccaccattaaaatataaaaagaactattaacggcgaaatctagggttcgccattaatactgccattattagcggcaaatttagctcgccaccaataaatccgccgcaaatatgataaaattgttgtagtgactcataatatgccacaacagtatggtgttgggcaccctaacgtgcctaataacaatgatatatttataaaaattatattatatatttagcaccttaaggtacccaacactatacggatgtgacgccttataattggttagcagattttcatattatttattgaattaaaatatgtgtgacccaatattaaattgtacaaatatcaatatattacgtcgtgtttgacaacttagggtgtccttagcatttcttattgataaaagctttctgtgaatgttattttacttttatttcaatcccacctaataataataattaattaaaaacaatattttatccatacctaaatttgttaacttgtttgataatcaataataactatttttctaagcaagtacacaagtaaaataggtgttttcaagtgttacctttgtgttggagtggaagacaacaaattatcatattcccaaaacctccttaaaaaggattacttggattaatttttgatatttctcaaggagtctacaatatacatcattattatgaccatacacctttaatttttattcaactttcatgttaggcagatatcaactaattaatatatttttttttacccttttatcatcacatgaaactaaatgatcacatttatcccatgtaattatgcccatgtacagtgaaataacttgagtgacacaatgtaaagatatatacttttgaggaataaagagcataaaaattaaagcaagatccaatattttttttaaagtgtataatattaaaccataagaaactcatggaccctattttaataatatgaagcatactaatccaactaaaaaagttcattaataattaatcattcttgccaatatatataaagtcccaaccattactaaaccacaccacaactcaatgtatatatatgttagctctattaactaagttgatacagaacacaacaattattaataatgcctttaatccaacactccacatcctctaaatcaaactccataaacttcgacgagcatagatgggttacacaaattcgtcgaacactcgaagaagagcttgaggatgatactgaggttcctgtctctattttcagtgtctccaaaattctaaaggcaagtgatcctgaatcctacactccacaagaagtagccattggcccttatcattattggcgaccagagctttatgaaatggagaggtacaagctgtcctcagctaaaagagtccaaacacacctccaaggtggccataagtttcaacatcttgttcaacaattaatggatcatgaacccaggattcgagcttgttaccacaagtatttagactttaatggcgaaactttggcttggaggatggccatagatgcctcatttttgcttgagtttcttcaagtttatgccatcaaagaagggaagattccacctggtttatcttcaaggatgtcacacttggttgactacacagggagaaagtcagcccacaatgctataataagagacatagttatgcttgaaaaccaaatcccattatttcttttgagaaagatattggaatttcagttttcgtcgctagaagctgctgatgacatgttgtttaccatgttggtgggattttgcaaggagctttctccattcaagatgatggaaaatcaagacttgcctgaaattgatgtctcggaatgtgctcacttgttggacttcttatacgacatgatcacacccaaaatggaagtccaacaacgacaagatcaagtaattgaggttgtggaggatcaaagcagcgatgataatgatcatgatgaagaagaagggaaagacaactattttactaatagtaactctgtaaaaaaggttctctctatagtttggaagatgatttctaagctaaatagaggtccaatacgtttcctaaaaatggtacttttctctaaaccagttaaagtgtttttgaaactaccatggaaaatcttgtccaaccttcccggattcagactcctgaaaacgcctattgagtacttgtttttcaatgaaaataaagaagaagttaaaccagaagaagagaattcaaacaacaagccaccattgattgaagagatctttatcccttcagtgactgagcttttcaactctggtgttcagttcttgccaacaaacggtaataacatctcaaacgttagttttgacgttaaaacagttactctctacctcccgaccgttagtttagatgttaatgcagaagccataatgagaaacttagtggcttacgaagcatcaaacgcatctgggccgttagtttttacacgttacactgagctaatgaatgggattattgataccgacgaagatgttaagcttcttagagaaaggggtatcattaagaaccgtttgaaaagtgatgaagaagtggctaacttgtggaatgggatgagtaagtccgttagattgacgagagtgcccttcttggataaggtgattgaggatgtgaacaagtatcacaacgggagatggaaggtcaaattaggaaagttcatgaaactttacgtgattggttcatggcagtttctgactttcttggctgccattttgatgttgcttttgatggctttgcaagcgttttgctcggtttatacttgtgctcgcatttttaatatcgacactaccataggtgattagtactacgtacactacttctgatcattccttattatcaataacttggatttgttttaatattaaacaagaaagctacatatatgtttcttttattattttttggttgtgtaatgatgaactaaacaagtatgtgtgttattcttttgagattatatgtgtggtgttatatatatttatatatcaactttgatacttgctcagtgcttttctcttgtattgatgacaacaaattaagaatattattgtttgtattaattaaatatttcttttgcattaagtcgtttggcctaataattataaatccaactataacataaaatattagtaagttaagaagtactattgaaagagatatgacctagacatacaacaatatatataatacgattacaaaaaataaagagaatctagagaatttgttgtaaacaattaaataattctctaattaaattaaatctaatcatcattgtatgggaacatcaattgtaaagtgggtcataatataaaggaaaagatttcatgtccttgattatatatgtatgtatgtatataatggtcgtatctatgaatgcttaaagctagactgtataatagtaaactatatacaattaataattggtactattctatattttctttggttatattctatagcttcatctatgatcgcatatattgtcttgattaagcttttacatttttgtttgggaaatttacacagtttactgtgttttcccattttctttcttttatactgttacactccaaaaataacttttgtactgttttttttttt

SEQ ID NO: 116281 - DNA, 1399 bp, Cannabis sativa
  modified_base (322)..(328): a, c, t, g, unknown or other
gctgaaatgaaatagagatttatttatttattattattaaggattttttttatatattttaattttttcttttttgtatatttacataaatttatttaacaactaatgaaaattgtaactcaatttcacatagtaattattagagctaaacttaaactaaattaaaaggaaaaaattaaaaaatagcataaagtaattctataatgcacccccttaaaaggagtgtattgatgcattcgaaataatttacaatataaaaaataatattcaaacagtctattttacacgagtataaaataaaatagtcacgcgtccaatacannnnnnnaacgtagttttcggcgtgttaaatttttccgaatttcttaaaattttgcaggatgtctcaccctgagaaaaaatttgactaaaaaattatttcgaatgctaaaacagattggggttcatcaatatatcaattttaaggggtacattataaaattttccaatagtatattagatgattttctttattattattatttaattttaaaaaatttatatgtgaatttataaaacgggtaaataaatattgaagttgagaaatactaggcataattttgtacattaattattaaaaaatgttgtgtttaggtagatttttaagaaattttgtgtacgttttaattatttagggtcaattgtaattttttagaaactttcaagtagtatacacagtcgaaaataagatttaaatattttattacatgagcgacgtttttttttataatcttaggacaagcaattcatgttatcatatcgtgttcgtgatgatatatttataacacgattgatacaattaaagtaaacacgaacataacatatttattaaacatgttgaaacattaaacacgaacacaacatgattaattagcaggtcacacgatatgaacaagatacgataacacgattagcaagataaacacaaattttttgaaaaaaaaatggaatctatgcaaattgacttgtgttatcgtgtcaacgcgattataacatgacacgactttgacataacacgattaaggtaaatacaaacacaaaacaataactaaacatgtcaaaaacttaaatacggatacgatacaattgttaaatgtgtcatctaaacttatttattttgtatcgttttcaaattatgttttcgtgtcgtgactcatattgctaacaatatatatatgtctacatatatgtaatatatttacgttactatatattatttttgttggcaatttttatagaatatacttttatatatatagattgtagaatttatatatatatacaatatatttacgttagtatataattttcttttttagggattttttcatttttacccttcaaaatagttttttttttt

SEQ ID NO: 116282 - DNA, 1630 bp, Cannabis sativa
attttaaattttccaatccaatctgtaaaatgctaatatttgcactttccgaataggattgtgcatatcgatttggattaagtattttatgaacatctctaatcaacttaacattgtgtttcaatgcaataattacatcacttattatttgcatcacttaagacatatctatgcatcatagcactgtgtttcaatgcaataattacaaacttcatcaaaatttaatgtttaattaatattttagttaaaaatttaaacacaatgctatgatgcaattgaacaaaatcagccatcgcacacaaagttaatgttatagtccatcgaacaaaatttacatctgcactactggtactgttgaactttaattactgtattacaattgaacaaaatcagccatcgaacattttcaaactgggtattcacataacactaaaccattgaccaactatctctgtattatctattaacacaacttcttccaatctaaacattataattcattacagctgagaataaatgacctcaagctcaaggcatactcttatcactcacttaaactaagctctactctttgaagaacttggacggttaatattgccaaatgcctacaaaattcatcaacttgacatgtttcaaagagcctatgtcttaaacttatgaaccaagataatcaatgttcttagagccatgaacacagacaatacatgatcaaatgattgatgtttcaccactaacattcatcatctaagatgatgttaaccccaaaaacacttgtaacaaagttaaaacaagacgaatattacgcaataataagctcggaagataaatagatgtgtcaaaacaagagcataaatttcacattaagacaaatatatgtcaaatcctaaaacttcaattatcaaataagctgtaaaacaaacatcagcatgaccaaaattgtgctaagggactccactggagttaaccctttaactagataaacatttccatatctttcttctccaaaagaactaagcacgaaaatagacttaaaattgaaaggccatccaccttagaatccgagcttggtgcggcgccagtgtctgcgcttggcattgtatctgtaccagaaaataatcagattatgggaaatttgaacagcttcgatctaagaaaatgaattattttaaaaaaacatatatatttgtatatacaaaaatttcgtatggaccaaaaagaaaaactttgattttcgaacctaatggtattgtcggtcctcaaccggatccagtgaggaatcggcctgttctggcgcatcttcttggccagcttcttcttgatcatgaaactcttgtgcgacggctgagaatacaagagcgtaaatagagaagattagaaccgaaaaaaacgttggatttgaagaataggaacgagaataaccagagcctaatccaaaagggtggaaagagagagacttaccatcttcgctgaggtcggtggctgagaagcgaggcaagaagaagaaacccaaaccctgggtttttgagtgagtctccacgggaataaacctttcttaaactcttatagaaacaattttgggtgattctacaatgcacccccttaaaatggatgtactgatgcacccttaact

SEQ ID NO: 116283 - DNA, 1548 bp, Cannabis sativa
  modified_base (509)..(512): a, c, t, g, unknown or other
cagcaagatgaagagatccaaaggttaaggcagtagtcgcattcttatagctcgcacgaagcaggaccgaagatcgggtttaagactcacacataccgagatatatgcaaggactataaaggtcttgctgcaaagtagtaaagatcgattctatactcagcgagttggtcgagatgacttaacgtgctcgataacccgataaggactcgcatgtcctaagttatcgaccaattacagggtgtccgtatatgcgactcaaacatgacgcagacatcctagacttgattagtcttgtacgtatcttgagcctgcgagcttacgcaagaatatgaacagacaactcgtaccatgaaggtcgcatacgttgttgtatttagtgaattgggccgaaactgttcttcatttattgtatttacgtttttattgatttaaatgtttaaattcaatgtacaaacggattgataattaaatcaatctctctgtaatcaaaggacacttgctttgtatannnnggagtgatccaacatgaaatgaacaagacagaaaacccttgcagctatagactaagcagatcgtgatctgactgaaccactatattctttttgtgatatttatatttctagtaatcgcataatcttgttcattttaaatatattattttatttggtgctgtcttaattcctccaacaacactttcgtatttcccatcgaataattgcgcctacctttgaaggatccacaattatactatcttagagattacacatcttaagaatttgatctcagtcgtccaaaagtcacacttttctttcttagcatgtaaatgatgatccctcaaaattctttaatgctattgttaagtacacaacatgatcctaacatgtcttggagtataccaatttattgctaatgaattttaccacagacttatcctactaatgttcaatgattttgtttataagatttataaatacagcaagtgcatttgttaattcaaatggcatcacaaaaaactcagtgtctagaacgtgtcttgaaagcaatattagggatatcttcttttctaatccttaactgatgagtcttacatcaagtcaatatttcaaaagaaatttaaaccttcaagatgatcaaacaactcatctatcatcaattaggatactttttcttaactgtaaattaatgattcaattcttataattgatacacagtcataaagatctatcaacactttttgaaaaaaaatagagtttcacaaggagaagtactatattcctaatgtgatatttatccattaagttcccaatatttatccagcccactctactggtgccatgcaataaggcacaatacaaacaggtgaagctctaggaataaaataaatgtaaaacttaggggtgttcgcggtgcgagtggtgcagttttaaccatttttttaaaccaatccgcatatgcggtttttctaattttccaaatcgcacccgcaccgcgatactaaaaaaaccgcaaaaaccgcaccgcaacaaatgatgcggtacggtgcggttt

SEQ ID NO: 116284 - DNA, 2334 bp, Cannabis sativa
agagagagagagagagagacctgctgggcgcaatggaaagcgccgacagaggagacggcgagggatttctcgaaggaatcgattcgaatgtcggtgaaattggaagggtgccaattattagagagtggttggtatgcattgtaaacaagtatctcaacaaatcccaacgataaaaccccttcgaatgcctctttcacactccgtgaatcagagcaatcgattcttatggcgaacacttgagctttctcctccctagctatttcgtctgcaaatctcgacaactttcctgtaattccatcattatatatacatctctcttagtatacatatatatatatatagagagagagagagagcgattagtacttacctaagtcgcgagcgaggatggcgacggtatagccttcatgggcgaatttccgggcgatggatcgaccgagcttgggtccaactccgacaaccgccgcaatgcctcgattcgggtttgtgctccccatgttccgcatcatcattacatatatatatatgattaactattaattgcactcactcaataaatatatatacaacttattaattaatcattcttagatttctcttctctctacaacacactcatatatattatatacaactacatgtatgtgtgtgtgtatatatataattaggttgagaagaagtagtgagtagtgagttggtatatattttggggcaaattaattaatattggtctctcgtacttaatttataataattatatattatgtattctattgtcaattaaataaagaaagtctcaatttgtatataaaaatatatattcgagatatatggggaagagaagagaagggaagggaaggagttgattaataaatgagctctttttcttttctttcaaataaattattttatttcatatattatttttacatcattttctaacttattgcagtggacgtaaatggaaagtttttctcatcacacctttgtcaaagttttgtttctatttatagttaaaaataaaatataagagaagtgaaaaatataataattttttaggaaatttatttagtttacttctctaaaggatgctttggtagactgttatttcgttgtttagaaaaaaaattaatttatttattatagtcgggtacgttgtatttatttaaaattacatgtaatttttttgaatattttatcgtatcaaaaataaagttaaaacaattgtttattatacttaataagaaaaaatagtcacacgtgaaaaaaaatatttgaattttatttttgacactgtatagtatttaattttttttttttgaaaatttacaagcaatcttatatagccgcaacaaacctgatcatgaaaaaaaaaaaaaaaacgcttgcccatgccatttccgactggcaatcgtcaaaacctacaccaccaccatgataacccatggttcatggttcgcgatcagtcctcacgtgcaccgttgctagctctgacagaggtgttttcgccatttatggaagaggcggactacgaatcgagcttccctgcaactcgaaacctctagcccaaaattctccttctcaccctctctttcgatcaattaatgaatgactaagttgttgcagaaagattgcatatggaaaccaaacgcccgtatcaaaattaatgaaaatcttgacgcctcacttataataaaaccctaaaaacccttgaaaaatgccccctctctctttctcttctctttctctctttctttgtcccgcctactgtcatcacctcagaaagtatgtttttttttttttcttttttctttccttttttctctttctcagtgtcttttagcccaaccatcgtcggccctagcaccgacgatgcttcattaccatttttttttatttgcaagtgattcttttattttgtttataaaataaattaattatgttaatatcattatggactgctaatatcattcaaaaaatccattctagattgtttgtatcaaactctctttctctacatgtatcaaccattctctactgaaaataaataaataaaattacctatggctttagttatttaggtaataacgaaaggcataggtgtcatggttctgcatatatggccccttatggcttcgattatcagctaaataatcgaatccatataaggccttttacttttggttttttttaaccctttttgctttgtttgaaacggttttggttgcaaattttgtaaaaggaaagacgatgaaattacattgtatactcactttacttgttttaatttttacctctatttatattctttaagatatactcatttttatagat

SEQ ID NO: 116285 - DNA, 1110 bp, Cannabis sativa
  modified_base (49)..(55): a, c, t, g, unknown or other
cactcatttaatgtaccatgagacccatctaatgtaccacggaatacannnnnnnaaagtacatcacgggacaaaatcatatccctacatatatatatgtgtaataaattctttttaaacgaattagaaataagaatatcataatgtctaacaaataataataataaaataattataattgatttggaaattataatgatgtattatatataaaagttaagcttaaataattagttttttctttttaacattaaaaatgtctaaaaagtatttctcattgcataaaataatagaacaacaacaactttagagtaaaataacatgtgttgccatttataatatataatttacattgatttaatataacaccgtccactaattaaaatataatgaaattatattaattactttgtaaaaagtttatacactatattatacatcccaatgtaagttaataaaacctaactttacgaaaaaaaaaaatcttaaaataaaaaaataataataaataagtggcttgacgaaattaatcatgacgtgcaaacttgcagttttacacttaaatgtctttcctaaaagtcaaagccactgtatatatgttgtatttcttcttaaagaaagtccaaattattatgttgtaaactaaaattagtgtagtattgaaattatcaaagctctaaaattaaactatggtgatataatattatggacacgattttatctcgtgatgtacttttacagaatgtatcctgtggtacattaaatgggtctcaaagtacattagatgggtctcaggatacattaccattttttaaccttaattacctttagattaattccaaccctcagatcaaataactcctccatctaacggctgtcgtacatcacgaaatatattccgtgaaagtacatcacgggacaaaatcgtgtccttataatattatctattacaaataaataaataataataaaacaatgatatgaaatatatcctctctatatgccttttaagggaaaatatcgtctaatcttctaccctattactaataaaataatgggaaatttgaatatctatgcattaattgggggattctctctctctctctctct

SEQ ID NO: 116286 - DNA, 3576 bp, Cannabis sativa
  modified_base (3070)..(3070): a, c, t, g, unknown or other
aaataccataaaaatacctaaaaacaaaaaaatactatataaattggtcaaatttaaatgtgccatatttatcataaaaacttttaaaatcccatattaagtataatatcctttttgttatatcgggcttgtaatcaaacttcaaacatttgggcttctaattagatcatgaataaaaagcccatctagagcccatttctaccctatgagctataatacaagcactttcagtttcagatccgagttggttattgttttcatattgggctatttaaaaaaaatatggaaaaaaaaagtaaaattttgatatggcatacaatcttaattgcactaaatatggcgtttttaaaaaaacttaaaaatataaaataaatcatcctaaataaaaagaagtactataaaaaaatttaaattttgtacgtaaattttacttctatataatcaaaaccaatttttagtttcttgaaaaataaactagttttttgaataaataaactaatttcttgatgaaagatctttggtgagttgctctgaccgatcgtcaccggatgggtaaaaaaaattaaaaactcgtgtattaattttacttctatataattaaaactagttttctggtgaagaaactaattttttaatgaaaattattttctggatgaagaaatcaatttattgataaaaaaaccaatttcttgataaaagatctttggtgagcaatttatctaaaaattaaatttacatatacatggcataacaaataccataaaatagtttaaaataaaaaaaaaatgtcataaacaatgactaaactttaaaactgtcatatttaagtaagaaaaaaattaaaagtcatattaagtgcaaattcttcttgtagatttctttctcttcttttttcttctgccactatatcacacttttatagtttttttctttttaacattgacattagtatatggaaagtgattttttctttcttttttctttcttttttttagcaaaggaagaaacattttattcaaacaaccactgacaatacacatgcttaagcagtaaccaaataacttagaaattgtcgattacatctagaacatatttttctcttttcgtaagctttttacctttacaaaacaaagctctagctttcaaactctgctcttggtcactaatcatcttgattgagctacaaacttcatcaatgacacgcatatttcgattacatcaaatgtggtacacaagtgcagctacaacagcatcaaacacaaaggtaatcaaacctctttgctgcaagttggacttgttatgccagtcaaaaagattagaaggccaagcatattggttgaaccacttagacacctcctagatctaattcttagaataacagaagacgaagaacatatgtaagtgagatttaatctcaagatcacaaatcaaacagattatagaactcacattgagaattttatcaagaagatctcaagttagaaaatgattgttcaaagcttgccacaaaataaatttgtgttttgaatatctctattaataagagaaaggttgaaatgtttcagtttcaccttaaatctccaatgaactacatgttgccaacaaagcatgtttatcaattttctctcttatttggatcaattttgagaagtaccaactccctacgcatcagtgttaggaacaaaattccaaaaaatctctgttcttcatataaatttcattaacccaataatcccaaaggttgtcttgtttagtagaaatagtctaaatatgctttctataagagctaaatttcacttcttcccctctctaaaactaacctcaccgtaatgtttgggtaagcaaacttgctcctaagaggtaaagtgaagcttatggcgattacccgagctactccacaaaaaatctttgcaaagtttatcaatagcagtagtaactttttgcgattgtataaaaatactcatctagtagttacgaatttccaataagatagagtgagttaattgagccctatttgcaaaggaaagaggacggttggcccaaccatgcatctttttttggatcttatctagaatacccccacactctaaagccttccacttggtaggatgaagattgaccccaaaatatttcaaaggtaaagaactctcatccatctttgagatttataaaaggcgttttttataatccaaatcaacacctccaaaacaaatgagatattttgaggtgttaatagctaaccccgtcacctcacaaaagttggagaaatcctcatgtataatgttgtaggcataaatattacctttgcaaaaaataactaaatcatctacaaagcaaagatttattagcggcaaaaacttacagaaaggatggtaaccaaagcctttagaaagagatgcatgagtgagcaccctcgtataatagaggagatattggatctttttgtcacaaccccttctcatctttgaaagcaccataaagtctaccatttaatataagagtgtaagaggtactgcacaaatacttcaagatccagttgatcaattttgaagggaagcataaccctttgagaaaattcgcaataaatcactacaacaaaagagactttttattccactttttacacttgaaaaaataaaaaattagataaacactgttacatttggagccttaaataaaaatttagaacaagtgtcttgtttagaaaacggacaaaaaacaatgtttgaaatgctatttttatgcacttgccacttagcattttaagtgggactttttatcccgatttttacaaaataatcgggataaaaggtccctatatatttgggccttttaattgttgggcccatcggacccgaccataaaaatccaaaaaaaaattggtctttgtgcgcggcatcggaccttcttcttctccagtagtctttgtgtgtcgatgttgtttacggtgttgtggacggtggtgaggagccggcgttttgggcggtggtgagaggccggcgctttgggtggtggtgagggggattggaagttgtgatgcggtcggttgtgagagagagagagagagagngagagagagagagagatagacgaagagagagatgagaaagagagagagatggggttgagttatgagaggggtagtattgggttttaggtaaaattgtcacatattttcagttttcatatgtattcaatttgagaaaaaattatccctcaattaatgcatagatattcaaattttcctcttaaaattaaatcacatagagtatatgtgacaatacgtccaataaaaaacctccattatgctcttaggatggattctattatattgggagaattgactcacggaaagtacttgtttagttatataatatatatcaattaattaataagatagggaataaaataaggtgttgttttcaagcactagtggagacaactcagcctaaccccattagtcaaattcaagtcttttttttataggggtggcaaaacgtgtcatcgtgtcgtgttcgtgtcatattttatgtgacccactttatatttcgtgtcaagcgtgtcgacccatttttt

SEQ ID NO: 116287 - DNA, 9257 bp, Cannabis sativa
  modified_base (3565)..(3567): a, c, t, g, unknown or other
  modified_base (9119)..(9121): a, c, t, g, unknown or other
aaattagacaaaagtccttaaatcaaacaatcttaataattcagggggaatttttaaaggccaaaaaagttcagaaagcatgatttagtacatgtcaaagtttggggggaaaattgataattaggcttatatatatatgtctaaacttactaaagtttgccgagagagaagaggcgacaactaccaatttgatcagagacaacactaaaagaagagattttgatgaaaatggaagaagagattttgaataagattatggaagaagaggaagatgaaaatggagaagatgatgattatgatatatacaaaatctgaaaaataaaatagaaaaaaataaattcgtacctcaaaaataagggatggctctgatcgccggcacaaccaccaccatcggcagtggtggacggtgcaaccaatggtggaggctagtgatggtaaatatggtttattttttttaagaaggaaattgtatttttggggaagaagaaggggttatgcgttaaaatggggtcgtgagttttatatttcaatttctgatgagcttatccctggagacatacactgacgacaaaatcgtcagtgttggactgctcactgacgatgtggtagtccaacactgacgcctttgtcaccagtgaatgtttaagagggaaaaatccgacccaatttaatggctgtttttttttgaaaaaaataaatattgataaaaatttcgtcattagtatatatctcaatgacgaaatttttgttagtgatatattttgtcgccattgatgtatactttagaaaaaaaaatcattcttttaatgaatcagaatttgtattagctcaaaaactttgtttacacacaaatagcacccataaagggcctataataatcaactaactatacattgtaaatgtatttacaaactttgaaaccattgtgtgtctatatccgagacttttttttggccaaaacatcttaattcttagcttcaagttagccttcaaatcaatgatcaaagcagtgagcaactattcttctttattcaatagcaccttgtttctcagcccccatatgctatacaccaggtcggctgttgcagcagtaaataccaggcgcctaaacttagtttctttggatcttcctagccatttgatgatgttaggaaggcttgtatgcattgtcctccaccctaaccacctcttgattttctgcaagcaaatgatagatttcggccattcaaagaacaaatgttctgtggtttcagtcctgtcacaacagagtatacattttgtatttgtgacaatttgcattttggacactcggtccctagaaaaaaaaattatttttattactgaggacatttaaatgtcgttcgtaataatgttacttttagtgaggactttttggcgtcagtgatagttccgttagtgatacctattattcttgtagtgttattcataataattttataatacgttatcagcatgagtttctgctcaaggtaaatattgcttgttaaagtttttgaattatttcgaagtcatgatacagtaaataaatatttatatatatactcatctgattgaaataatttcaagaattattttatatttttccttctttgttatttatattatatatgtggatatatattcttatttttatatatttatttttaaatttatgtatatttatgtaatatatttatgggtatatatattcttatttatatatttatatttatcatttataatatattttatatagtttgtatctattatataagataatatatatattattaatgtttttaaacaggtgacagatgacataaaagggaagagatatcataatcttcctaattaaaatctccattaaagcctagtcatggagaagcttcccagaactgggaaaaagtcaagactaagagataagcagaagtctacctcaccttatcttagctttcggacacagatgacatattatcactctaggatccagagtggtccatactcaaagtctacccaactgatatccacatgggtactcaaagggcttatcacggacgctgaccgcccaagagtgtcgcagacgtctacctttgatataatccagatcgcccagcgatgattatgctttttttaacactgaatcagatcttgttccctgtgctagaacatggtagtgtgtgcacctcatacacctttttgttatacggttattccaggcttcactacaagaaaatcaacttttacggccgcagttcacgagctgtgatggcaaaagttgactttgatcgcttcaagtttaatgttttgccgacaaaagtttgtaatttttgcccccaaatttagcttgacaaatagctttaccggcaaggtaattcgtcagcaaaagttagttatgccggcacaactacccaactttgccggaaaaagtggtgaaaaccaaacaccaaaaggcgcaaaactttgccagtttattttacttttaccgacaaataaatgtgcagcaaaagttctgaaaattttgacaattcaattcccgcgcattaaaaatgtgttgaaaaaattaggtgagaatagttttaccggcgcactttagctcacaggttaaacgtttcactataaatgaaatgacgtgtttcatttttttaagaaaaaacctttgcggacgagcttaacttcgccagcaaaagtcttgttgaatataaccacgaaaactcccccttttcctccattttctttcgttttttttttcttctcttcttcttctccacccatctctaccttctgtgccttctccatccatctccgccttctccacccatttccgctcatatttcttattccaaaaacatccattcaccaccgccactctcatctcttcattttttttattttaaaaaaatttaatccctcttcagagtgtcattagagtcaccttctacaattaggtcatttctattttatatatttatatctttaatttattttatttatatgagtatggatgtatgtgtatttgtatatgtatgtatgtatgagtatgtatgtgttataaataggtatgtaagtatatatatatatgtatgtggatatgtttgtatatgtgtgtggatatatatggttatgtgtgtggatatatatgggtatctgtgtgtatttatatgggtatgtgtatatatgtatgtgtgttcatataatatatatatatatatatgtattttttatggttgtgtgtatatatatgtgtatgtattatatgtattgtatatatacatattatatgtaatatatatgtatgtgttatatgtgtgtattgtatgtatgtatatatgtatatatgtattatgtatataatttaatttttatggtaactttatgtaggggtgttcgcggtgtgggtggtgcggtttttaatcatttttttaaaccaacccacatatgcgatttttccaatttcacaaactgcacccgcaccgcgaaactaaaaagctacaaaaatcacaccgcagaaaatggtgcggtgcggtccggtttttgtaattattgcagtttggactatcaccaaatnnntaaactatcacaaatacaacaaaatttgagcaacacttgtcaaaaataccataaggcttgaaaatactatgaaaaaaattttaactttcaacaatacaattattagtgggctgtaggttggacattcacatattacacctaaataaatataaaaatttgtattttataatttgcgatgatgtttgaattgcatattaacaatttaaaaccgcaaatcgcaccacgccgtgcggtttaagaaaaattcaaacccgaccgcactgcaaagaatttcaaaccgtattttcttacggtgcagtgtggtgcaggcagtttaagcagtttgacgaacacccctaactttttgtatatgtatatgtatatgtatatgtatgtatattagtatatatatatgtatttttgtgtacgtatatgtgtatatttatatatatatttgtgtgtatgtgtatgtatatatgcatatataagtgcatagaattatagttattatttttctattctaataattgtttttggtaaatagattttcggtgtcgatttacttgttgtgccgattgatcatcattcttcattatatttgaaggttagtatgattttataatatgttactttagttctgaaaaataaaaatacttattagtagagtttgaatatcttatatattcatctataatgaagtaagttctgtgaaaaaatatactgcagtcggatgagtagaaaatattaatattttgactattttggtattgtgtttgtagttttatttatagatagtgaaaatttgagaatggacaattttagggtgttatgttgctgaattttcgagagcataatattttcaatttgattattatttattttaaattgattaaatttttatgaaagatacttagaataccactaatattatatatatatatagataaataagtttaattgaaaaatataaaatattttaagcaatttattttagtattaattagtttaaaaaatttatttacaaaagtaataaattaaaaaattcattaaattaaatatagacaattaacatagtttaccttaattaaaaaaattaaattaaaattaaaataattgttaaattttaataaattggaaactttaaaatgaaaaaataattgttaatttaaactagttaaaaactttaaaatgatactttttattttattttaacaaattagtaaatttaaaatttaaaattaattaaaatagttgataaataagtaaataatatttttaattattaataaccagttttcaaattttaattactatagtaatttaattcaaaaaataattaataggttaatttaacattattcatattttaaaaattgacaatacaaattcacaggtggtaacataaaatagcataagacattgtaagataacataaaattaaattcttatattgatctgatctctttggtataacccaaagataggatagaataattgtgtttgtattatcacttagtgataattttttttctcacacgcataatttggtaagcacatcagaggaagacacgtgtcgagctgggaagaatgaagaactcaaacatgcaaacaaaagtacacttagcatggaacaatctcgttggaaacataatttgcagagtatgtttataactcggctggctcaatagccttctgcgagacagaaatgtacgaactgctaacttatgtattgatgagatgcaagtgtgcgtgacgaggcctcaacctcgctgcgtggaagagaaacaataacgccaaaaatacttagcatatattacacgatatacaaactaagtgtagacagtttggcgagtcaagataacagacgacgaggtgtttatcttgctagaagatggcatgcatgcgaggaagatcatctcaacaccagaaaatatagttatcagagttaaaacaatattaaactcaagaagtcagatgacaagcaactgctcaccatcaaagttaacttgactccattctcagcgagacatccgtatgggataaggtttatcgtatgtctttaattacgcgttcacctcagcccaataaaagcgggatactcacaactgtgtgaattataaataaaagccttatttacattgcttgattggtaatcgaatcctatgatttgggggaataattgctgtaacgattattgtaaacttttgtaaattactgcccactatgtaactataaatagtggcagacaagatcaagaaaggggacgaaaaaaaaaaactcatatgaaagagcctttgaaaaatactctgaaatctgaagaagattgactcgtggactatgccgaattttaactgcaaagccacgtaaaaacctggtggtcatattctttattttgataggttttattttttctatgtgaaatcaatatggtgaggctcatatttggttaagaaaaatttgcattaacagtttggtgctttcattgagagcctctgtaaaaaaactcagaaaagggctcctgacataaaagtgatggatgactacaaagataataatcctcaagaaggaatcaatgattgcccaagaaaagaaccattaagtcctcagggatctattgagtcatcgcatgaacagactgcaagccccaggagaacccaatattggggtccctggcttgacggaccttgggtagacagcaatcagccacttcccaaccaggttgatgaggatggcacctatgacccaagcagatacataccaattgtggaattagaaaatcgccatcttaggtgacgattggaggaagcaaactggcgtaatgccaagttagagcgtgaaacagccgtagtaagggcagcgcaggacaatggtacccaaaatgtacctaaccttgggagaatagattcacgaggcaaacctcgtagctcccaaaccaaggggcaggggacaatccaatgatatactcagaactctcaggagatgcaacctgagcaaactgaggaaaatctggagacacagcctgagatatgtggagcatcggacgaaaattgccaactctctcttcaggctcataagaaagaaactcgcacgaacctttatagggagaaaaaggtgaatcaaaccttgagaggaagggctaggtccaaccgcagtcacgacaagagtgatctacaagagcatctgaacttgaagaaacctgaccttcgtcagcgactctgttgaaggccaaaggattcattccatttgcgaattaacgagttagaaaataagttcagagggcatcaagtcacgaaactcagaagataaccgaggcatggtaccgttagagaacttgattcggaagcctcaggatcaaagagaaaagacgattctgaaaggctgcctaaggataagaaacccaacaaatatatccctctttatgctgaatataccgagctcaacgaaactcaggaaaatatctacttcgcacatgtataggaggccctttttagcgagccaagacctatgaaacatgcgaggcgcaagagggatccaaataagcggtgtgaatatcatggggatattggtcataccacaaaagagtgtcgtcagctaaaagatgagatagaaggtctcatatcgcaaggacaccttcagcgatatataaaggggcaggacgatgcccatgatccccaacaactcgagtgacctgggattataaccctcctctgtaagaggaagggacatctcggttatcccaagagggagcgactcacaggaatacaaggggcagttgcttcggtaaagcaaattttcttaaaaaaaaaaatttgcgtcgtgagtagatatcaacccgctgtggttgccatgtcaagctgtcacgaggaaagctggtcgtcaaccagttgcagccaaagacaaaaccaggattacttcacctggagccctgggatatgtcagagattgaccctggatattgaaataattgagggagtatatgagggattgaccctgaacatcaaaacccattttatcaaaaccaggtgctcctagaagattgataaaataaacgattgaaatgggaaagttcttatgagattaatgatagtaaatcacattgctgatgaaatattttgaacttcagttgtgaataaaataatcatttttttcaaacaagtaattataaagcataaaccctttgaaattacttgcggggcatatatgtatgattaaccggaattaatctgaaaatacattaatacaaatgcaaacccatcgtttcaaaaaataatttttttttgaaaacattttaaggtttcgaccaaacctttttgacaaaaaaggggtcgaactgttataactccctgactaaaccttttgacggaaaaggggtcgaatcgttataacgccttgatcaaacctttctgacgagaaagggatcaaacaactgtaatttttttatttataacctatctgacgagaaaggaaagtacaaggttatgactagcgcataaagctgaatactaatgactcacgttaagggaaagtattaaacgagacatcaaagtttcttgaaaaaatacttaaatcaaaacacgtgggtagaaaatttaactactcatgtaagcaatgaaaatatatacaaaatgacaagttcattgaaaatatatttcaagttgcttataataagatcatttctgatgatcgcgaggtggaatcaatgatggctcgcagattgagggatgggcagataagttgctcgcgcgtaaagcaggaaattaactacttaacgtcagaggaaaatgcaggcgatggaaacccctaataaattttatgcatgtgattgtttatagtgtgaataaaacgcaagcaaacatctgcatattaaagtacgaggcattataaagcaaagtttgtcgtccaaccttgcaaatctgtctttacaaaaaaaaaaaaaaagagagagtgccaccaggggcaaaccattgttttggctaaagggccattttctaaaagaaaaaagagagatagagataaaccaagtctacatgctgggagacttggacaaatcttcttcttcttcttcctcgacctcaccatcttcttcctccatcctggtcttctcgtaaagagctaaagtctcctcttcgttctcctccaagaagctggtgtccatatttgggttccaaatccaggcccgatagacagtgcgaaaactaaccttgtcgcatcgttctacggtctcgatttctttctcagtaagctccttctcaaactcattggcttgggctttgatggtcttctcggcttcttcttttcgcttctcagcctcctccttcaccttctctgcttcctcttttgccttctcggcttccttctttgccttctcggcttcctcattcgctttcttagcttcttgcttgaggtgggtattttcctattgggagtcatcccggcgcttactcacaaccttgcattatgatagtaacttgtagacctcgccctccaagtcctcaagccgctcagagagtaatcaatttgaagcaaaagaagcaaaagaagcgtggagaattgcaaatagatgaatatgaaannngtataaaaagaataatataattataataacaaagcccatataccatgaagtgacagtccaagctccttgaaagcatctctattgggctcctaagattgagaaaatcccaatcagggggaagaagagtttgaagttt

SEQ ID NO: 116288 - DNA, 2420 bp, Cannabis sativa
  modified_base (2378)..(2395): a, c, t, g, unknown or other
cacacacacacacacacacacttgagatttgccaaatccattcgcatattgtaatctttaaagagctaccacagattctacaacacttgtgatatgtgtagtattatctctagtatcaatacaagtaaacggggagtatgtcattacccgctaactaaggggtcaaacctctatacatctcgtgtctatttgttcttattgtgtaacacgtagtaagcatcaatattaaatttgacttcactgttggttggccaaatctgatgtcaacagtgacaacaaatgaaccagattgcattttggtaacaacatgagatctacaaggtcaaaagtacattgactttgaactaatttttattaaaatgaagttcaaagtaataaggtgtctatataacataataaggaaaaactctatattttgtgtgatccgaatcattagggatacaccacttaagccttttaggagtttgttgctcatatttggatgtggtattctttaagattgtgttggtttagtgggagttagtatttgagatgttctatcaagttgaaaaatattgatggtttaattctgtagataaagtatggaattaagttttgagtactttgaatgtactccttctattaaggtttaagcataaggttacaaagactaaataattaatcccaactaaggaggaccagttagagatggtcatgctaagatcacatgtgcatgtaatttctatgcaacacatccatgattcatctgtgtggtttgattgtattgatatacgtgagcattgataggtttagccatgctaaatgtggtgaaaaccgctttgttcctctgttagtataatcaatggactggatttttttttaatacctataattatgatagcaaaatttaagcgcttataagattatacactatcagaaaatatatgtagcttaagtggaagattgttagattaaaatcctcattgtgggctcatatgtattagtgtattgctttttgaagtttgacccaaataaagtaatcattttagtaacagtgtgtcgttgagtattaaagtgtcatgggctaaatgtgtagataccttaagattttctaatttattgaggggctaaattagaaatactaaaacataaaaacctaaatatgaggttatatattggtagtggtccccaagaatcaagagtcaatctaatctcttcttctcccatcaagagtgaaatttagaaaaccttaagtcttattttcttgaaagatcattatccaaaatcaccacatagatcacctttatcaatgaattaacgcttccgttatttgaattattatctttaaatcaacaaatgttttatttagatttatgtttataataatatataatatgtttgtccatgaaattaattttgatattacatattttatgagcgatgaagaaatctaacaagcgagatgagagggggatgaggtggttgggtgctcgtcgacgagagggaggacgaggcaaaaatctcctagagagagggatcgaggttgaagatgatagaagaactaaagagatttgattgagatttggggttttaacataactccactatagtcgagtatactatactcaactgtttaaaattgacgggtacagtatactcgagggatcaaaactgatggctattcttctgaaacgcacaattttaatttttatctcatagccgttttaaactgatatgaatactaaacgaccatttaaaactgatagatattctcaactataggtgttagttttaaacacacttaatattattagcgacggttctcgaaaaaattaatttgaggaccgacgggggaatagtccactttttatagtagtgtttgtttgacggtgatcataactttgggtttgaaatggtggctcgagattttaatagttttctggttaaaggatatacctctttctcacacgacatggttgaaacagagttggctgaagctatgagaatttgtgaggctctaagttggatcaatgagcatcggtagaactgggtgtttagagacgggttgtttgagtgtggttcaggcaatttgtaacactattgttatgatttctttatttggatatgctatttttgattgtaaagttttgattgatgagttgaaaaatgtttctatttttttttttcaagtaataaactaatatggtagttcataattttactatagcttacattttatatcatggttgtctcttcactttggagtttgtttaaactgagttattatattatttgataacaaagattaataatgattaataaaattaattttccactaaaaaaataaaattgaaaatgaaaatttgatgtttgttatgaaataatataaaataatatannnnnnnnnnnnnnnnnnaagaagaagatgaagagagaaagag

SEQ ID NO: 116289 - DNA, 1892 bp, Cannabis sativa
  modified_base (289)..(304): a, c, t, g, unknown or other
  modified_base (410)..(410): a, c, t, g, unknown or other
tataatcctactctaatacccacttaatcacatatttaataaaatatgtctgattaaaatatcaatacatttttcgggatattacaaaaaaagataccataaacttactattatgtctttactatttcaatgtcacttagttgatgttagagcaaagatcttaatcctaacatggttaagtttttgtgtaactgtactgcatgtgttctttgacttgttcgttacaagcttaccagatgatcaacttaattcttacatcttgggaaaatggtagtacaattgagtgggnnnnnnnnnnnnnnnnatggaatctatagcttccataactatttagaagtgaaatgatgatttccttagaacttggcttaacagacacaaataggaaaactcttatttcagtaattatattngtttactaaaatatcatttataagaagctaagtattttaaggataaaatacattgaagggtaaaatcataaatttgttcctacttgatacaaatcatctataaaagatctatgattatttagattatttagattgaatctaagaaacagttctctctccatgaggaagaaaagggttattcgaaagccagtaacaagggcttggattgatgaaatccagcaggatgatgagcaggcaccgacgatgggtggagaggagttatgcaaggaactgggcgagttggactcactcattattgagaaggagctagagttgaatttagcttcaacaatcgtggaagatgatgaaccaggcagggaagagatagcgaaggaagaagagaatgtcgattttcaatcttcagctaagaatcaatgggcgaagcttcaagaagggcataaattgaatgttacagcaaagctacattatgctgaaccagacgttcaagccggtttcaaggttgcaaaattagatctaatcgaggttgctgaataagctttagagtggaactcagcgattgtttgtatggttatgggggccaatcctccatttattgtttttgaaggatttgtgaaatgaatttggggttacctgggcattgagcatgtggtcaggatgaaccagggtcttacaattatgaagttcaaagatgaggccactagagacttggtgcttgaattagggaatgtgcagtttgataagaagccgatgatagtcagaccttggacccaggatctcgatactctgagattagtttgatctgttcccctctggattagattgccgaatttaggattgcaatatcggggcttaaactgtttgagtgctcatgttagcacgattgggaaactgattattattgataaagtaacaagggagaaatctatgattaaatttgctagggttttggttgagatggacataatagatgacccaccatttgttatacattttgaaaatgaaaaagggcaaattcaaaagcagtttgttgagtatgaatggctccctattacgtgtaacaactgtaagggatatagccataacatggcggaatgtaggaagaatggtccgaaggtttggaccaagaaaatcagcaacaatagaagaaaatggaagacaatcagcctactgttgtggttaatttgagggggataatttaggttctgctgaagctaatgatcctaatggaactgtgaagaaggttgattataaggaagagatacatggcactgattctagtattactactccataccgagaatgtattgaagggtggaagaccccaaaaagaataggcaattcaaatgtgaaaagatctcttggagtggttgagcaagcttcgtgtaatgccctaaataattacgcacgctacccaagatacttatgaaaccctaatcccctaactgggattcctaataaaattagcgcggaaattaaacttta

SEQ ID NO: 116290 - DNA, 2169 bp, Cannabis sativa
ttccgatctttggttgcattttaaagtattggaatatcattccaataaaatgtcctttccaccattttagtagaatgactattccattttgaaatgaaaggaacgatcattctaatgtatcatgaaaaaaaaacttaataatttttttatgcattttaaattttattcaattccattcttattcctattctcatccttattcctatgttttcattcctcacaaccaaacaccaccttaaagaattggaatatcattccaataaaataacttttctaacattttggtggaatgaatattctatattttgaaacaaaaggaaaaaccattctaatgcaagatgaaaaaatatatatatcttttcaattttatttttatgcatttcaaatttcattagattctattcctactcttattcacattctcatttctattcttattcacattctcatttctattcttatgttttcattcctttcattctattttgaaatggaaaaaaaaaaaaaatttcaattcaagatgaaaaaaaagtatagatttttcttttaattatttttatacattttaaattttatttcattctatttttgttcttattaatgtatttttattccttccaactaaactcaacttattttttttaatatcaacgatatatccatggaaattcgatgcatgggtgcaagaaaattgtcatttgtctcaaataagttaaatgaaaaagagtaacataattgattcaagaattttggaattgatattttcttgagtatgaatctacaattgataatatttatgatgacataattaagacgattttataatatttatatttaaataaaaaatttatttattattaaattatatgtaattattcaaatttattactattgcataaattatatcactaatttttatatttctaaacaaatgtaaatgtacgtgatatacgtaaagtttcttaaattttcatcgatatcaaaaatattttcgaatttatagtacctatattttcagtcttcattggtgctccattaatgatataactctataaattaattaatagatagagaggtggccatgaagaaataaaaattttattaaaatagtaattaaaaaattaaataatataaaagtttgactaaacaaaaaatgagaaaacaaattcatatgagatggcaattcatataagtagccacatcacattctatgcaaggaaatagagccatagtttgagcgatcattcagaattttcctgtgaaaaaaataaaatttaaatgtatggaaatattgaaaaatataattttaattgcaatataaaattttaaaataattcaaaacaaaagatagatatataagaatcccacatttattaaaatatcttattatcatatttcttaaattccctttattaaaaaaaattgcttgtgtgaaacttaatgttcaaatttaagattaaattatttaattcactttttctttattcattttattttatttttttggtcaggattttatttactttttttaatccaaatattaggtaaaatttccataaaatttattgggaatttattatattatatagtgtctactcaataggtacattaaaactacattttttataacttgctatttataaaaaaatatacatatatttttagaattgaatcaattataattaatcatatatagtttgtttctatataaagaaacaaagtgtattaataaataaaataaaatcaccttagtatcacatgtaatttattaattattcttagttaagaactaattaatcgcaacggttcaatattgatcaaataagataaaataatggttacatatttgatttatccattgaaatatcttccatttatatagataattttccatattcctattttagagtattaaactaaatttagctctaaattaacaaaaatgataaaaatatattgcatcaacttaactaaatgaatttgaaattaaaattatcaaattaagggctcgtttagaacgttatattatgtcgtattgtattgtattatattaaattgaattatgtatcatatttattatattaaattttaatttatactaaaatattaacttaatatcacatatagttttacaaaaaaaatattgcataaaatacaattcaatataat

SEQ ID NO: 116291 - DNA, 3223 bp, Cannabis sativa
  modified_base (100)..(116): a, c, t, g, unknown or other
aggagacatataattctgctgcaatcaatgtaagatttcttgaacttcatatgtgtttaaattccattgttttagataatttatatttagggtgttaatnnnnnnnnnnnnnnnnnaatctagatcctaataaaataatcaccaacattaagcactcagcagggtctctaacaaacccaaaacaccgagcagagtcctatacaaataaaaaatcctacttttctaatttcaaaacattcttactattctttgcacccgaaagatcaaaatctcaaaataaagcgcaagattcaatctttttcatcaaagagttatacattatgcatcctaaagctattgaatagattatagtgcataagaactttcttaagacatgacaatcaagaagttcataaaagctcaaaaaattcattaatggcaaaaattcaaaggacaaaaaagagagagaaagcttcaaactttttgactgagaagatgcaaggaggctcgatctagtctgcacaatgagtgtgggcgtcagatgcttgcgaattcacgaataacttaagctcacaaggttttggctctgtggagtcttggagagattttgtgctcagagaatgtaaaagagaaagaatgaaaagaaaaaagaatgaggcacttatatagtttctagaaaacatttccccccaaaaaatttaatggggatttaatgccacaaaaatttgcatgcatgggaaagagaatgccaattgttttaacatgggaaaatgtgcaactgtcacacgatttcccacattgatcgatgtaaaattaataactgccataaaatcacatcagatgaagagtccaatatcgggccatgcatatctgcatgggaaagttgcattacaataccagatagagtataaagtccctacccgactagacgttcagataggaactttggggataaatgctaacccaatttttgttcacctgacctggcacttccacatgacaaaaagcggaaaatacattgatgataggtcagcactaaccagctaggttagtgccgtgtagccctccaacttgcaagatcttatggttgcacggtagacacaagcaaagatagaaatgtacaagaattggcagatcctagctcgacttatagctagctagccagggtggataggctccataaattgggcaaccttataataaggttggccggacaagcatacatgaataccccaacacttgtgttttccccacaagccttccaattcatccccagcactcctacgacttcagagcaactcaaactgcccacgatctagggaatcttcattacaaataacaaccctattctttagaaattattaattatttatattgcatttcaaatatacgatataaattccctattttaaagggatattttcctacttgttagacgtagcagcttgtaaccctagtactatatagagggcaaggtgcatacactcaagagctcaagctaaattgttcatgcaaatacgcttagaagcactaagcatagaattctctttttctcatacttctcatttgcaaaacacattctcattgtaatactgaagagagccaaagctagaaattacaaggcttcagcctgtaatctacttggtattatctcaagagtgaatacaactaaaaggggagtaggtcattacttgaacaaaggggtcgaacctctgcaaatctttgtctctctacattaattattgtttcgcacttgataataataagtgaaatctaatcctagtcagactctgcgtcggttggctaaatctatagttaacagcatgcatcagaagacacccaagaccctgtctggaggcatcacaatgtaccacaaacttttcttaatttgatggaaaggctaacactggagctgtaatcaatcattggtttaatttttgaaaatttgtctcacactttcctatccatacaaacttttgattctttctagtcaagtctatcaagggtgtagaaatcttgaaaaacccttctacaaaatgacagtaatatatattagacaggattgatattgatagaagaatggatcttatcattatatcacttagtttatcatagatcatttgatcttaatcctaaattgattaagctttaggttaattttattattcgagttatttgacttgttcgttaccgacttactctaaggtctagcccatgcttgcatcatggaactcaatagcataattgagtggaagtattaattatagatatagaaatctatagcttctatattacaagttaaatgataatttcctttgagctaagttgaagtatttaatgatagagcgctcatttcattgattgttcactgaaatatcattaagtcaactaagtgttttaaagaaaaaaatataattaaagggcaaaaccatgatttgagtccttattattataaattgactatagaggatcattgattgatatgatagaaactatatgaataatattataacatatccgtacttgatatatagagcgttccataaaaccaggagtgcaattcaaagtctatagtggagtcatgagaaattaataagctagaatatttatttgttaaattttatatctatcctatttgtagattagattgtatgagcctatggtccccgcagtatctagaataatatttaacagtagcttacaataattgattatttaatcaattaacattcacattatttgttttatcaattttgagaatattccaccaaattggtgaaaataaaaaggaacgagataataaagattttattattaattagacattattttgttaggaattaatagtaagcatttaaataatgttctatgaaaaataattatcttgatataattatttgatgaaaattagtatttaaatgcatggaataaattaattatggcatcaataaaaaagaatgcattattttagttcattgagcttggaaataatgaagagcacaaagagagcccaaactcttatgaagagcacaaagagagcccaaactcttgtgaccaagcattgactttcttgtttctctttttatttatgtaactaatttttaagaaaattgctttggagtttccttttcagtttccttttccttataagacatttggctataaatagagagcttaaggagagactttatacactcattttctgtaaaaaaaactctctccctctctctctccctctctctct

SEQ ID NO: 116292 - DNA, 2545 bp, Cannabis sativa
  modified_base (2494)..(2509): a, c, t, g, unknown or other
ctcttccgatcttatattgaaatgagttttatttagggcataaaacctaacagacccttctcagaacaaggaagtcttccagggttggattcgtgcgagtgaacaactttctaaaaatgacaattgtggagataaaaaactataccacaagaggtatttttgggatcagataaaaatgtggacatatttgagatgatatcaaaagttgttttattttaattttattgttaatttatgcattaaaagttagatttcctagtaaaattagaaactagacaagtgagtcattttcttaagagcactttttgtttcttattatgacactgtctggattgccattaaatataaaaaaaaaataataaacatatattttttttaaatggagatactacaacaaataatattataaattagttagcaagtgtatatatgataggtggcaagagcaaatcataagagtttcgaggggtaacataatccaattgtgtaagtcaataaaattgtagaaagtcaaaactttatcttccacatcattacatcaggtcatctttcaactaactatgatatctttatcattgttatggttgttctaatgatattgatgtataatataatttatatatatctcacttggaagtatcattaacatcaaaccaaatggagttgtacttataataacatggtcggatatacctataaatattttgtgcttactctggaaagctttgagcataaatttaaatttgaggctttaagggattgtattagctggtgccacatgtatccataatgtgaaaaggaacaaaattagtataattatatatattatgcaccagattctccttctttttatggctaaacaattgtatcattcttttgttctggcaataattatgtgcaaaatcctatctattaatattactatacaataaggatttatttaaggatggatcataataataatctatgaagaacttatgtcatccttggttggcacttggaatccagaataagcttttcattcttgacctgtctctgtgaagtgaaccaaccaattagtatgtctgttagtatattagagtcaagttttatattattgtgagatattggcttttatctctttctttaatatgaattagctttgcatttagttacaccataggaaaattacatgcttttgtgtttttaaagttgtaaaccactaggattaatattgtcctcatgccctttatgcagtgctatttatttatttttattgaaattataggtaatttggaaaggaatctgtgtcaagcattgactaccaacatttttagctacttcaatattaagaaacacagacctaataaagaagaagcaagccactatataccaccaccgcaaccacctgtggttttaaatcactttattgtaaataagtaaatataagatcatttactaatacaaacacgaaacgagcattatctcattttacccattgagggaaagttggtccataaaacaaaatttaatgcatgcatatttgcatacacaaaggtgaggatgtctttttcgagccaaagaagaccaaatatttggtaatttggggggacttttattgggcatgttggatggccaagaaaagaggtatgtactatgtgacccaatgaaaaagaataacatgggccagctttacttaatagtcaaacccttcatttcattggatggcattatttcatttttcttgccatacaattggatcaaacacttattaacacccccacaaatttgccattcattttgtcattttgaatgaactcaattataaaggctttgtccatttgccatgtcttgtcttgttagcccttatcacaatatcataactcaatagactttattgttgttgttgttgttcttattcattttagtgtcaaattataaatcaaaacaccttcatcacctaccattatcattcaaccaaagccaacggtcgctttccaaatgagaaaccaattatttgacatgatttttcaactttttattaatttcatagttttattgatcgactaattaaagcctcttgtgaattaagaacttgtctaaaataaataaaaacaaatccaagtagtattcaactcttaattgtttatacaaatttgtgatatttataaataaataaaaaattgaaaagactggtataccatttgaatttgttaatttaacagtaaatttaataatattgttactgggtattctaaagtgttcaacaccatatggatgtggtgtattgtaagtgattctttatattatttattaagtcataatatctagggtttaatattgaatataatagtagggctgagatgcaaaatgaccttaaatttagaaactaagttagtaaatgttctctttttaaaaaaaattaagaaaatgatcgaatgtaataaataagctaataaaaattataacaatataaaaaatatatgtaataataaaattaagttatataattttnnnnnnnnnnnnnnnnattatattgtaacaaaaatgaataaatatattagat

SEQ ID NO: 116293 - DNA, 4165 bp, Cannabis sativa
tccgatcacaattggatatccaatgtttggcggtcagttgtgattggatcggtcggttgttattggatttgatcgatttatgcacacccctaattggaggtgtagctaaagagtggtgaagcacctcaaaggaggtttttaatgcaataactaaagttataggagctttgctcatgtgcaaagaagtccttatagcttcagttattacacataagcctaaaatatatacaaattcaattattaaataataatcgaagccgcaaggtttttttagttaattttttttttatttttatttaaaatgatgataactgatttgagcaagattgaagacttattaagtcatctcaaaggttgtacaaaaatgcaagtccctagaaaagggaatgcaaaaaccaatgcacttgctcgactagccagcaacatcttgacaaccaaggcaaaattagtacttgtgtagttcttaaaaggaccaagcatcgctattttaaaataaatagacatgttagatgatagtccaacatggatgacacccatagcaacatgcctccaaaaaaactcttgctaggaaacaataatgaagcaagaaaaatgaggaagaaaggtgctaggtttctaatcctggagagggttatatacagaagtggtatctcaatgccacctctaagctgtgttaccaagaaataagttagacggctgccgatagaagtgcatgaaggcttctgtggtaatcaagttgtggagcaaagccaactgaggaagtcttcgcccaaaagaaccacacattgctaccagaattccttgatgaaatagaagaataaagagaccaagccaacctcaagttgcatgcctatcaacagaaggtttctaggtacttcaacaaacgagtcaaggaaaggaaaatcttcgtaagagacttggtgttctgaagaatattctttaataccaaagaccctacatcaggagtgtctgggccaaactaaaaaggtccgcaccaaattacttagataacgagtaaaggtgcatacaagcttggcatgtataattagaggatgagttagttctcttaccaagatgccagaatggagaacatcgctaagagtactaccaatagcaaacttttaaaaacactactctttagggctaagtttccatcactcttcagtgatggcctttgcatgatatgacttgcaaaggtagccaaaaattaaagagctatatgaccatcactcttcaatgattgcccttacgcggtatgccgcgtaggattcagctaaaacatggtttcaaaaccaaactttgatttgtaagcttttgttacacaaaaaaatgtatgttgcacaacaacaacacatatataagagtaattaatgaaaaaacagtgtttcggttcaatattgtgtcaaataacttgctaacaagataacttcttaaagttaatctttatttttttagttccatatgcgtacaaacaagaccctccaagaaaacacataggcaaaggtttagagtacttgatgattgcaagtgaccaagagaccataagtctgtttgatcacttggggcacccacaccgtacaacatcgaacaaccacaactaaacttaagcaaaatttaaagctttgttaagcaaaaaattgaaagctaagtaagtgtgaatggcatactttagattagacataatctacctggtcagctacatgtctaacaaaagaagttaaagccagaattaacgactgcttggtcagtctcctattcaaaaataaatggccctaaggccatacaagaataaaaatatcatttgttcaaaagtaaaggtcctaaaggccatacaagaacaaaagatgaagtaagcaaaataaaagcataaaaacaaacaacaaagttgtaatgaccgcatgttagattatagattagtaaaggcaattaatattaattattgatattttataattacatatgattttacatttgtcgtgggccttatttttagaaatgggcattagagttataatttttcaatttcagatattttattaaactgtaagtgtattatttatgttaaatatgaattatgtaattttgatgatttttgcttggcgacgatggaaaatgcgatggatggccgttagagtcacatgggtaagtttagaacctaattcttagtgagacaaatatttaagatatttaaaatgtcaggttcaagaggagttatggtttcggaccatttactcctaggctaatattgcttaaattggaagtaagaagggtgtttttggtattttgctttttgggattaggtggcttgatcctaggttggaaagtggccactagcaaaaataggattaattttattagttatcctttttcatcaataaattaaagaaattaaagaaaaacaaaaggaagttcatccttttttctctctctctttgcttggctcccacaaaccagaagaatccaaccccaagctttcaatttttctagaatttcagcaaggtttcaaggtgtatcaagtggaggtaaaccttagtaacctttaccctcgagttttcaagcttgttagttgaattataatatgtaaattgtcgaatttggtgttgctcgaattatggttagtatttgttagtttcctactggttattaatgttgttttaggtgtgaatcttgtggtttcgatgcctaattcttgtgttgagaaagtttgagttttaagaactcaaacttgactcattaatggtggatttggattctgtgtttgttggttgctattagtacttgaattttgttgttggatgttgttataggtgatctgaaaggtttggtgaagtttcggtacaaattgagcaagttttggaattttgggggttttctagtataaactagttaactgtttctatagattctattgaaccgatttactggatatgtaggatcctagaaaaatccattttgccaatttatgtcatttttagagctttagtttctgtgtttccttgatcattagggcattgtcatgtcaattatcgataacaaatcttgtagttgtgagtttaggtccttagatcaggttttagtgtgttatttatccatttacgtgaatgtgacataaggcatccatctagcgtgtgattttccgttaaggttggccagcacacttaaatttaaaaatgaggtaacactagcatagaacgtatttatatatgaatatgtatatgtgtgatatatgcatactatttgtgatttgtatactaccaacactagtatggtagcggtacttagtgtattaataaattgtataatgtcaacgagtacaatacggtgttaccaacactagtaaggttgagtacggagtgtatgtggtacaacacttagtggtactcgaggtaaggtgcaaaccctaccaacactcgtacagtagcggtacgtagtgtatgtggtacagtggtcttaccttagtaaagaacgttcttacttatttgataaatcttgtggataggtttttgggcgcctagatacaagtcggtattatattatatgttatatacttttcttactgagtatgttgacttatagatattacttttgtgtgtaggtaaaggaaaggcaaaagctgaataggagtgagttctgagctcgggggatgattgtacatgtcgagacggtgcgacttggagtgttcaatcttgggaggacttcagttttattttatagtcgctatgaaacatgtctgtcaaagtattttgattatgattgtaaaagtttaaacacgtgatcccaatttatgtgaatatatatatttataaagtttaatagtttaaataaaaaatttaattttgcttgattttaaaggaaaaagctttgattagcaaaggtggcacaataattagaaaatcacgtagcgtgcctaagtatcagggtgttacaattttggtatcatagccgccaagtttatctactgaagatgtcaagacatgtacaataatcatcagtgaaaagctccactcacagttcagtaagcctttacttttttagtaatttatgtgattattgtaatgaccgctttagtaattcggattagtaaaggcaattagcactaatttcttatatttttataattatttatgaatttaattatttatgggtcccattgttagaaatgggc

SEQ ID NO: 116294 - DNA, 2426 bp, Cannabis sativa
ctcatattggcttgtaagagactgaatataatcaaaagaccaaatggatggttcatagttgcccgatcgtcgatcgataattggattagaactatcgactacagtacattgaatggggtagcaagcacttgatcttgataatcttgatcttgtagtactactaacaaaattataattataattagtacatttttttggtgtaattagtctaactgggactggtgatgatgatggaacagccaagcattgcattttttttttcttcttctttgagattagaactccaataatatatattatataatatcaattaataattttatttctttttctttttgggtatttgatgagaacatgtgttactttgcattgtatttatagtacatggtaattggaacttagttgaaacataattatgaacacaaacaatattaattgtaactatatatatacatatttatcactagaccagtttcgtatacgctcccactaatgatcttttatacgtacaagttaataagaagaaatgaaaacataaaaatacaaataagaatggaattaaacttaaatagataaaaaaattattaattttttttcatcttgcattggaatggttattcttttcaatttcaaaataaaatagtcatttcaccaaaataatggaaaaattatttcattggaataatatttttattttgatgaatcagcaagattatcataactccaaatatcaaattacaacttagcatctcaaatgagacctgaaatataatctatacagcaacaagtatgtgtgcttcttttataaattttcagaccatatattcttttcttggcactaacttttttaggccaaatacttttaattcattggaataacattttaatactttaaaatgcaaccaaacaaatgaataaaatttaaaattattttctttccattctatttcattacctctaatgatcaaacgccgcctaagtaatattgcatattaaatttccattgaatgacattaactctatatattggtatgacggaaagaagagcattgttattagacattagtattagtgatgcttatcatcagagataaaaaaaaaaaaaaactattgttagtgtcaatctttttcacctataccaaacacagggttaatgtttttatttgcatatgagtttacccacaacattaagtatataatactttgtctaagagtttcttaggtataatgcaaattaaattttcatttaataaggcttgctttcgttgaattaattcaattttgatgagtacacacaaaaaaacgtttattatctatcctaaaagcatgctaaatcaatttatgagtcagaacattagcgttgtgaagaacatgcacggtaaaaaaactactttcagtgaaaacgttttagtcacaacataatttttttgtaactaaatgtgacttttaatcacaacaaagttacttgtgactaaaacatagtatttagatacaagttgtcaccaattttattttagtcacaataaatattgtgactaaaaatacatttaattacaacaaattgtgatttttgcgattaatacctttagtcacagactttttagtttcaaaataaaaattattatgtgtaattattagtcacaaattttattgtgactaaaaatcaacttttttgtagtgatgaaagctagacataattctttaatatcaccttttgagttgtgttttattcatcatctgcaaaaatattgaataattgattagtatcaagtaggtaataaatatgaaaattattatatttaagagaatagtatggagtccatcactacaacaaataggggtttcatgaacaacgacatcagggatgatgaattgtcgttcctaatagagagggtatcaggcacgatactgcgaagtcatttatgataaattttttttttttaaataattaattgactatttggaaggactcgtcactcatcagttttgttttgttttttcttttttcctttcaccgtttgggaaatgggatatttttccctcccttacatttggtgcgacatatattcattctagatggtttaaaatattatccctgatgtgacattttgaaaaacactaatttagaatatctagaacgacatatgtcgcgacatatcatatatattaatatattttaatttataactgttataaaaaattattaataactcataatgggcaacttcatcaaatacttgggataattacataaatcattattttttgtaaatttttttacattttttacgtttaaagatatatttttttatatttgtccggtgttttataaaaacaacaagaaaactacataaaagtaacaagaatataatatccaaacaacaccaaaaaataacatacatataacaaaaaattaacaagagtac

SEQ ID NO: 116295 - DNA, 2942 bp, Cannabis sativa
attggatttatttatttgttaacgttaaccgtctgtgaatcgttaaaacaagaattgccgttagatagccacttttaatatataaagatataaaacatttataaatatataaatatttaatatcaatttgatcatgatgaccttataattcattggtgattatttttgagtgttttgtactcatgattctctcccactaagccagaaatatctcagccacagcatgcacgccaactcattcataattaattagattcaacttaattaaaatcataatccaaaaattttcaacgtcgaaacttcaccactagttttttatttatttatttctaatattggcactggtggtccataccagccactacaaatataaaaatgtttttgtggtccaaaatgactttatatgttttttttaagttgggtcattttatctggtttatcttgttaaaaatttgccaatgattaaacgaaacggtattaattaaaaattaattaatgcatatgtctatgcttaatttgatgattatccctcatctcactatgattattaattccatgaatactttttgtcaatagtactgatgaatccctctagcgaattcgatgcacatatattccaattccatacacacatatgcaaatggaacattatatataattagaagagtacacgctatcaaacgcacatatttatatatacaaatataaataaatttatagaatatatcttatactaaataatgaaaaagaaatcgacctgtaaagtctgtcaacttatatagagtaaaacaaagattacagccttaaacgatcggatctctacatacttttttcatttgatttataagctacttgtttacttttttaaattggaaagattcaatgaaaaaatgacattttggaaacatatatcatttaaaattttcaaataattcgaaggtttagattattcctcgcaattgttgttaagccacttagtgccagagaagaaagtagtattattaggtatgaacccactcaaaatggtacgtatatatactctaattaaatttttaagtaattatattaataatgaagagtaatttacggaaaaattcttgaatttaattatccgttggagataaatatttaagattgatttttaatagaaataatatttaaattataattcttggacatttataggtacctgaccgttaagtacgtgaccaattatcgactgttacgtggtcattgacttaacacttaataatcatgtacctacaaaaggaatgaggatcctctgttaaaaattattatttcatattgtgttaaaataatttaaatttgacacctgaattaatttaatttatattaaatatgttaactatatttgttcactcaattaaaagtttaattttttaataaataaaaaattagttgaagtgtcaaatttagattgatttaacaaaaatatgggacaccaatttttaacagaagatcttccttcccacaaaaattaatataatttagatattattactatcaaaaataaaatttaaacatttatatgcaacatagagttaaagtaagatatttatgatgtaaattactctaataataaataatatggtacaataatttaagaagaaattacataaaatatggtaaaaaatttattacaaaaatatcacagaaatttttaattagctatagtctttgatatgccatttgttaaccattacatttatatggtatttattttcccacatttttacaatacgattttatttacccgatatttttagtattaaaacaattatttgcaggttaaagggttgggatttattctcttcccttgtcctttgcgttgccaacttcttgcaccagtctgcttgagcttctcgacggccactactacatgataagaatgatttagtcaggcttcttgtatttgaacaaatcataactatctttttaccaaaccgaacttaattatctgattatcgtacaactgccatttttatcgtcttcagaccggtggcagagaaaaaccaattgagttgaggctcaactattttttggtgtgattttgtcttgagaaatttattttgagatacatttgtgcttaagtttattaggtgaatttgagggtttattccttggaaaataatgctaaaatttgagaggttgttatagaggttagggttaatttttaatagtggattaatcgtggctaagattttgtaaagaccgcttaattttaatatggaaattaacaaataattagggtttaattcaaaaattagacttttaattacgatttatgaatttatggagatatatttgaattctaggggtgttacttatgttatatatgaaatttcatattttatatattttatgcctgacaacattggaacgcgatatttggccaatagaatcacattttcttatgagttgagttagtttagtattttagtaatagaatagcggagcggagcaatttagatagacattgagaatgtcagaaatatttgaggtatatagtttgaccaaaatacccctaagtggcaagtatgccttttggcttaagcaaggcaaaaatgatctttttggccatatgattcttttgtcctttggtgatgtagtcaagtagtgccatttgatatttttgacgataatattaagattaatattctagatttttatttattcttataaagtaagaaaataagtcaagtagtaccttctccctcttcaaccttctcatcgtctcgaccccttcaaaaaaccagcagagaaattggatttttagctctattttttatgttctagtagcatctagtgaatccaatactagggacctgtaaattgccgagcagctgttcgactcaggttgaccgtcacacatgaattcagaaacgaggtaagattaatataataatatgcatatgtcttta

SEQ ID NO: 116296 - DNA, 2088 bp, Cannabis sativa
ttttatctttccaaatattttatctttcatgtttacaaacaattaggtgattaacatgcaagtcaaatggttcaatgtgcaatatagcatattgtatcaatatctcaaagaagttgttaagtacaaaatattatttgtgtcaggaatagtagtagtttacagaagaaatctctaattattgctttcatcttgattgagtggcaaaagaaaataaaattaaagtaacaacaacttacaatattcattgacaaccgctggcattattaagcttctcaaaaacaaaatacatgcatatacatatacataatttttttaactagtgggtgaacacatacatttgtttaattagtgagtgaacacatacaatcactaaatatctataacttaaataaaagccgtcaaacaaaatagcgaactagctaactagggtttttgatgcaatcgtccttgtccatgtcgctgttgtcgtcgtcgttcatcggcgttaacgtccatccaagagatcttcaacctcgtgacagtttatagcagcttctccccttttcctcacaaacgtggtaccctgttaacagaaggagcctacccatcactttgttcgtcttcgccattacaggtaaccttcaaatgtatttacttcttcaattgtgtcccatctgcaattaatttcccactcagaactccaatattattgttttcctcttctactcttcttttctatttctagtgtgataactctattttggattttgtaataacttcaccccatctccctgcacccccttggataatcattcgatctatacaaataggtaacctctcgtccctcttagatatccctagttttgctgtaggagccagtgtcacctttgtaaagctcatcattcgcacacctgacatggaagagcttcgcatatctgttatgcgatccctagagataatggcatcttgtacagccttgtatataaatggttggtttcactctgttattctttgcaagatgtactgccttgttctctaatcaatcaactattaccaaaaaaaaagcctaatgccttcattctcatgtccttttcttccctattttcctcaaaaaaatggatgacttatcacacactctcactaccgcccttaacctcactgagcttgaaactaaaatacattcttttactgaacaatctaactagcctgaagatgatgaccaagctgaaccttcgactttccttgctgtcaagcttttaaccactcgtcacttcaatcctgatgctttcaagaaacgacttagccaaatgtggcctgagcgtttctctatcaatgtttctgagaaagaacccaacttcttcactgtggaatttggttgctttggagatcgtcgtcgagttttcattggccagccatggcattttaattataaactcatagtcacgactcctttagaagccagatctatggtcactgctgatatgctcactagtacccctttttggatccaagtttttggtattccattccttaaatggtctcgtgctcttgctcgaaaacttggtgaagtccttggccgattcattgaagtgggcacagcttcacttaaggagtcttggggtccttatcttcgtgtttgaatcgagatcgatgtcactcaacctttaccccagggtactgggttccatttccatgaaatggaagctctggtttggctcgattttcgcttcgaaaatcttccagacttctgtcactattgtggctgcctgagccttatagtgaatcactgtgcagatttccttgctaagtgtgactcttctttgactcctcccatgctctgatatgagcaatccttaggagccaaagtctgtatcacctcaaatcctttctatattacaagcacacgtacccggcttcgacctcatgtcgctcacccaatccttttagcctccacgcatcacctccatttgcaaccacctctaatcatttcgaaaggtccatataatgaaccaacttcagattatggcatacagtttcatagtcaatcaagcactatttgttgggttttgtgctctaaataaaactcatttcaatataattggatttact

SEQ ID NO: 116297 - DNA, 1648 bp, Cannabis sativa
catgcaaacatccattaaacataaggctaaattaaggcattcgaacacacaccgttactaagtccacaaattattttggaaactcgaaagcattcaacatctcatcaataaaatcacattcaattgtatcatatactttccttaattaggtctattttaatcatgcatttaggcctctttccattccttttataatgcctcactaaatcctaacatatcatggtattgtatgcaataaactttccttggacaaatccaatttgattttgagcaatgataacgggaagatcattctcaaacgtgagcatataagctttgttgcaactttataaattacattataccaagctatggaaagataatccaggacagagtttaggcatttacttttttagattagagtcaggctagttgtgtttatttctttaagtagttttacattatacaacagtgatagaattacttcacttacatctttcccaatcaccttccaactatcttggtagaagaaacttctaaacccatctggtccaggcaatttatttctcagaatatcaaaggccaccttctttacatcttcacatgagaattcagccaacaaaagtctagtatgttcaacattgataattggcccaagagccattattttctcgctgaccaatttccttccttcaagagagctcctcaacaaattcttataatagtttacaaatgctttggtcacttgcctaggttgatagattctattgccatgttgatcaagaatagaataaattttgttcaagatcctcctggagcgaatactagcatataacaatgaagagttgtcatctccatccttaagccaaaagagtttgcattatgttgacagaaagaaataaaattttgatgtgcttctttgtattgtgcccgtaaagcattttcttcctgtataaggctctacgactctttctgtaattcttcttgacactcaagaagcttttgtttaaatcgattctcattggcctggacatcccctaattcaattttttttttcatctaatcattatttacaacaaccacttgactcatcttcctcccttatcaaaaaaataataataaataaaaaaatgaaaatctctaatttcaaaaattagggtttcagtcttttccaacctgacatcatgtaaaatttacacttcgatgcaatcacctacatctttgtcacaaacccatttctctaatccaccagctacagttagatttctctttagtttttagtgagttgcttgctattttcctactgttatgcttatttgtgaaaaaaaaaacaataatctcaattaatattgataatcgactttggtaatttttttacaatctctagattgatgaatatgatttcaacgataagccaaaatagttagctaatatttaattttatacttgatcttacattttaaactattttttcatttaatttttaaataacttgaactaattttggactgacacgttgatttggcacttaatggtattaaaaataagattgggtgtaaaattaatactaattcgatgtcatgcttactatttattattaattaaagttacgtgtataataattttaaattatgaagagttttgtttacaaatacagtagaacctctat

SEQ ID NO: 116298 - DNA, 6381 bp, Cannabis sativa
caaaacgagtttctgcagtagcagaattactttcagcttctgcagacgcatatagtttttatattttcttatatataattgacatttacaaaaacacggcttttcaattataaccacactctcgtaactataaattaaaaatattgtatctatcattattattgctattttttataatatatgtttggacattatatataaaatatattttgaaagtaattaaacttttaatcaaactcaatttttatcaaaatattttttaatgtaatcctcgtatataaagatatcaatacgtataacaatgaaattcattcttttatatatataatcacatctaaggaacacactaatgtaactgtaatggctaaaaaaattctcaaagatcaaaatctgcaatcctatttcaaaaattaaaaaataaaaatacattacctaactaagaaaattgaacatacatatattgcacttaacatcacttaactaaaaagaaaactaattatacgtgcattgcacataacatcaacctaatatatatatacaccgtttcttgaacaaggtcttcggccatgatttgaactaaactttggaaaaaaataaattagatattttgaataaaattattaatttttttaaaatttattaaaattttatttttagttaaatgacacattaattaattaaatttttattgttaatttttttattttaatattaatttcacattattcttgacatgttttactaataatcattattatttttttttccttaatgaataaattttaattcacttgtaagaatctttcataaaaaataatatcacaataaaaataagcataattataaggaaatatattatgatattatttagaggtgatttatatatataatttctcattaaaaatataattaattattgtggtgaatcaatcaccctccaagaacataacaaacacacataaataaaagattaacaaagaaaactaaaatcagaaagatgtacaacaagaaatgaaaaacagagtatgaacatgtaggatcacaaggttcgatcacaagctttgaaacttggatctactccttgggtggaactgccttgaggctttgcctttattgcttgaagatgaagctcaacgatggtacaaaaacattgacagaaaataagaactaaatggagtcttgctcctacaataatggctcacttgaggcacatgagttatacaaatctcataccctttaccactctacacactctcaacttaactcagcacatgaatagcgaaatagtctttatacatagactgatacaagtgtactagaaccagcaacctttaacagaattaactaacaaatcctaactaccaaaactgtccaacttgcactaatgtataaatcccacaaatttcacctggtttatatacttgtgcatgtttaaaaaactcttagcaaaaacaaattagaaaaaactgttccatcaataaggtttccttcaggaatgaagggtcagcaatcttctatattcagcagctttaggcatagcctaaacttctcactagtgacacacttagtaaacatatcagttggattttcatgtgtgctaatcttcttcacgctaactttcttgctggcaataatgtctctgataaactatagcttgatgtcaatatgattagacctttcatggtacataggattcttcataagatggattgcactttggttatcacagtgtatggctaaattttttgagtgaatccctatttcagttatcaaacccttgagctagctggcttctttaacagcttttgttgcattcatgtactttgcttatgtggatgacaaggctacaaccttttgtaggttagctttccaactaacacaacctccaaaaatagttaacacaaaatcaaaaattgattttctagtgtccgaatttccaacatagtcaaagtcaacaaagccagctacattttcagtattattgctgtctttgccaaatactagaccactgtaaagtgagcctttgatgtatctaagaatccatttcagtcccttccaatgttcttcacctggatcactaataaatctactgacaacactcatgttatgtgccagatcaaatttggtgcacaccatatatagcatgcatgaggcttcctactccattggcatagggtatgttctccataatcttcctcttagcatctgtctttggtgactggttcagagacagtttgaaatgttgagcaaggggagtagttacaggtttggcatctttcatgccatgtttgtcaagtaccatcttgaggtaattttcttgagataggctgatgccatgaggtctatttctcttgatgtcaatgcctaagattttcctagcaggccctaagtccttcatttcaaattcaacactgacttgagacttgagattgtcaatatgattcctttctttcacaactataagaattccataaacatacaatagtagatagataccatcatgaaagtagacacgtgtatcataattgcttttggttaaaccaattttcatcataaattcatcaaatcttaggttccattgtctaggagcctattttaatccatagagagatttgtttaggaggcatacctgatctggttttccattctcatagccttcaggcatctccatataaattgtctcttccaggtttccatgaaggaatgcagttctaacatccatttgatccacctcaagatcgaatttcgcaaccatggacatgatgactctgatagttgtttatttaacaactagggagaatatatcattgtaatcaatgccttattattgggtaaatccctttgcaacaagtctttctttgtaccttggaccctcaccccttggtattccttcattctgtttgaataactatttgcatttgattacttttgggttgtctgatttgttaaccattttccaggtcttgttctttttcagtgatagtttctcctcctcaatagtttgcagccaagctacactattcttctcagtaatagcatctatgtaactagatggttcagcgctgtctatgtcttctgcaacactaagagcatagacggtgaatttttcttagccatatttgtcaggtgcttttgtggctcttctttccctgtctctagctagttggtaatttcttagcttgagtgtcatctctagtggtatcttcaacaaaggcttcatcaacatctgtcggtcgagatgaggttgtatccacctcaatttggtccttgttgctactagtttttgatgtagcaatcctaacctcccttttcgtaacaatttcttcctcattgaagaccacatcgctgctaatgatgcatttcttgtgccctggttctaagcaccacaactggtaacccttcacaccatctggatagcctaggaacatacattttagggctctaggttgaagtttatcttgcctgtaatgagcataggcaatgcagccaaatacccttaggtaatctagcttaggtacaaggcttgtccaaacttcttgtggtgttttaaacttcaaaggaacagatggacacctattcatcaggtaacaagcagtcttaacaccctttaccatacaccttactctctcaataagagttctattcatcctttcagcaagtctattttgatgagatgtatccctacctattatgtgtctagctatctcatgttccttgtagaacttatcaaattgctttgagaaatattcccaaccattgtcagtccttagctttctaattttccatctggtttgactttcactcaacctttttcacgtgcaaaagtattgaaagcctcatccttgctcttcaagaggaacacccacactttccttgagaagtcatttataatgctaatgaaatagcttgcaccacctagggtcttgattctggatggccccctagagatcagagtgtatgtaggccaattttgctttggtagtgtgttatccagtagagaatttaaccctacaacttttaccataaacacactcttcacaaaaaccaagtttgtaactcaatccaccttgaaatagcccttgattgtcaagctcggtgaggcctctctcactaacatgaccaagcctcaaatgccatagattagtgttgtcattcttgacattgttaacaacaggtgatgtgttcctataactgctgttccaatcatataatacagaccatttttgagttacctctaacaaccactagagaaccttttgaaatgctgagtatgccattgtctattttaacagtatagccatggttatcaaacataccaattgacaataagtttcttttgagatcaggcacataccttacatattgtactaatcgagttatgccatcatgcgtcttcacctcaactgtgccaattccaagaatcttgcaagccttattattttctagaagaacagtactaactgagttttcttcataacttgtgagcagatccttgtttggagtcatgtgaaatgaatagccagagtcaagaatccattctcctcctaaatcttctcttgagacaactaggacatatgttgaatcatagccacttgatgcaatatctgcttcacctctttctttactcttgtctctcttaagcttgtttttcagttgttaacattcatccctgaaatgtccatctttcttgcagtaaaaacatttctacctagctgtatttctgttcttggaatatgacttgtgtccaatcttggatttcttgaagtctctcttctctattcttcctcgagcaaacaacccttcaccaccaatttctattctgtcatcaaccttcttctaaatttcctttcaattgagtggagccttaacttcagacatagataaggtatccttgccatataagatcatatcccaaaattgttcatagtttttcgacaaggagcttaacagtaggatagcttggtcttcttccttaattttaaccccaatgttgtttaagtctacgagcagtttgttgaagtcattaagatgcttcttgagttctttcgtttcatccattttcatggtgtaaagcttcttcttcaaatagagtttgattgccagggatttcttcatgtatattgatccaagtttgttccacaatcctaatgcagtttgttatcctgaaccttctcgaagcatttcatctcctaagctcaatagaattgcacttgagccttcatctcaatttcttgagagactttcttggcttcttctccttctttagagataacttccattatggcacttgcaatgccctgatgcacgagtagtgccttcatcttgattttccaaagaccaaagtcattgactcctgtaaacttatccacttcaaatcttaaagttgccatctttgttttttaactttgattatctcggttcttggtttttcgacaacaacctgtgctctgataccatttgtggcgaatgaaacaccttccaagaacataacaaacacacgtaaagcaaagattaacaaagaaatctaaaactagaaagatgtacaacaagaaatgaaaaatagagtatgaacacataggattacaaggttcgatcacaagctttgaaacatggatctactccttcggtggaaatgccttgaggctttgcctttattgcttgaagatgaagctcagagatggtacaaaaacatgaatagaaaacaagaactaaatggagtcttgctcttacagtaatggctcactcgagggacatgagttatacaaatctcatactctttacaactgcacacactctcaacttattttagtacatgaatagcaaaatgttctttatatatagacaaacacaagtgtactagaaccaacaacctttaacataattaactaacaaatcctaactaccaaaactgtccaacttgcactagtgtataaaccccacaattattaattgatagttccaaaattttagattaattttttttttttcattcaaaattttagattgattgaaataaaatattgacatttagaagtaaatattaatgttccaatttattgaaagaagaagatttttttttttttgaaaatatatgaaatatatattttaatgtatatcacccatattattaaaatatattgtcgaaaatctgtagctttccaacaccacttgatacaaggattaaaacatgtatgatttatgaaatttttcaaaacttctcatctaattatgtgtccataaaagatgttaatattaaaaacacataaaactgacccaacaggaagactcaccactctcaaaggaaccaaagggttcggcccaattgaagtcaagcccaattgaagtcaagcccaattgaagaataagtggttgaaataaagt

SEQ ID NO: 116299 - DNA, 1049 bp, Cannabis sativa
ttttgactctgatacggagaaaagggccccaaccttcaaaaagcgaatcctcaaaaacgtcaatgtattctccaattaagtttccaagtgcaacagccagacctttagttttgctcatgaagggtaacctatacacttgcacccagaagggtgtacgggtaagctttgatgaggaaacattctcaccaaagtttggtgagtataaaatgatatggtgattctgaaagtggaaaggttccttctccaaaactctctgcttgtcaccttcacagccaaaagttagcataaacatgccatcatcttcggaaatcttgacagggaatctaccatcccaatgctcagccatctgcctttggagggtagataaccacactttttttgttgtcaggattcgggcatagagaacgtgatggcaatcaaggctggaagagaaaggttcaccaaaatcaaactcgaaaactgactgctcttcctctataaggttgagtggtgatttcattttgtccttgacggggtccattgagtaaacaaaggggacaaacacgacagaagcagtgaaagtagcagacaaactaaaaccagaattagatgaaagggaatgcgggggaaactgaagacaaaatactgcagaaaattgcagaaaaaatgcagttaattgaggaaagtttgaaggaaactgctataaggtagttgagattgacaaaaactagttagaaccattaaggacatagtaactgccaaagagcacaacatgggcagacgctctcttcaacattttttaaatagtttttatttaatcaatattttaaattccaaccccaaaatgaaagttatagaacacatttttatttctatttttaaaattaaaaaacaaaagtggttatagaacaaatttttattttttaaacacaaattttatttttatttttatgattaaaaaattaaaaacataaaagtgttatcaaagacgctcttaatttagaaaaaaaatttgatgtctttttttattattattatttctttagagcatcttcaatcatgctctctaa

SEQ ID NO: 116300 - DNA, 2198 bp, Cannabis sativa
gtaaattgaaatatcagaaactataaaataataatattgacctgaaaaaatattcggtcataaaaattatatagtaattgactcttatatttcactttctccatattgttttttttttcaaaattcattttgttaataaaaataaaaaacaaatagtaagaaaattgtttgtttgtcaatgtttcaatatgtctacattaaaaagttgcatcaacattagcaaaaaaaaaaaaaaaagttgcatcaaccacaatagggaaaaaaaaaaaacaaaagtttaaatcaatcaccatccaatcatgattcatgaatggttgagtaactttgagtggacaagccaaacactttgcactttgccttatcttgcaaacttcaccaattcaactattctacttctccctaaaaaaaaatattctagttctccataacacaatggcaaatttcaattcttcattttctttttacttttgccacccaattttcagtaaatttttttattattattttatttagaaacaacaaagtccctaaaaaatagtataaaaaattgactgaccaccagagcacaaccagccaaatacaaccctgcaaagactactaaaactacactaaacaccacctcgaaaaatagaaaatcttcacagtcgattcacccatccgtgtaaagataaattatttatttatttttttattaaattattatttttttcaaaaaaaaaaaaaaattaagaaaacataaacaaacaaaaccccctaaaggaccaccatccatatcttctttctcttcttcatatcttctctgttaatccatagagacagaaaagctcaaaccataatcacagagagagaaagtaagaaagtttggatttttggagagtttggaagttgaagatgaagttatccaccaaacctatatccagtccgggtcgaaccgagaagttcccacctccattgatgaggtttctaagaaccaatgtgggaagcaaaagcagaggaaggtcacgtgcgagtccaatgtttgttaggaagaagaacccttcttccgccattgaaactcaagagccttcttctcctaaagttacatgcatgggccaagttcgagtcagaaggtcttccaaacaaaagaaacccaccaagcctcgccggactgggtcagctccggcgaaggtggaggactcggtttgttgccggtgtagatggattccgagagctctgttttgccaccattattgtgcagagaaattcagacccaagttgtgtagttcagtttggagcaagtggtgttcgttttttcaagctagttttcgaagaaaggttgtgagtagagaagaaacctgtaagattggttcgagattcgatgtgaagagtcaagattcagacgaagaagaaagagaagctaagatatttgctagtgctactactactactgctacaactactactacttgttctaccactccacctaagaatgctttccttttgactcgttgtagatctgctccctatagatcttcttctttagcttctagattctggggttcgccattaaagtctgaaaaaacagagcaagaacccgaagaagtagacgatgacgatgaagaccaagacagagaagaagattgttcgaatgaagaaaaacccatctcaaaattggagtcttttgaatcaagacagacggagattgaagaaaagttcgagctttcccaagaagttgacgagtcaacaacctcaactgagaaaatagtgtccgagtcggcaaacacagagaatgaaaaagtagtattagaagaagaagaatcgaaaacagaggaagttgcagggttcgaacgacccctcatactaacaaggtgtaaatcagaaccggccagaactggtgagaagctcgatcccgagttgattttctggaaaaacacaaggttgggtatcataaattcatgctcaccaactgtttgtgattaaaattaaaattaatttttcactttttctttattattatttgtttctcctagttcttttttttagatatattaagtccacaaaaactcgatatagatttacaaatgagtagactttttttttttttttggtgaaaaagattcaagaatatattgatatttttcacatttgtaattgcaagagagaatctctatatagtgttaataataataatatttaatatatatgttcatataactcac

SEQ ID NO: 116301 - DNA, 3425 bp, Cannabis sativa
  modified_base (39)..(70): a, c, t, g, unknown or other
accatgcaacatagaatgatttctgatctttattaattnnnnnnnnnnnnnnnnnnnnnnnnnnnnnnnnttagggcacaaaacccaacaacagattcatcacttgataataccttgttacataaatgattcaaaggttagagtgattgaacagaacgagacaatatatttcgttgcattctcaatgtaaggatccaaacttttatgtgtttaaatcattgttttgaaaaatgcatattttaggatgttagattattgtttataatcaacatacatgaatagtaaataagtttatggtaaagtaagttccaacactcctgggcactgcattcgatgccatccatctagtcgtttggaataaaaaaatctggatactcttcttcatggaccccctccgtaggatgagaaacaagggaggttggaagaggcaagtcttgcaacaatgtactaaagggaatctcgaaggtagcctggccaaaaaaccctaggcgagctgaaacttttttatgtttgcattggtagttctagaatagcttgcctgcttgggataacaccttcttagatttagtaaccaccaatgtgtcttccccttccattcgagcaaaaaaagcaaggttaacattctctctcgccccagtggagcaatcctgacttaaacttgtcgtgtgaagaaccccctcataaaaagcttctgcaaccgcggtaggagtcaccacttctattacttcatcgtccttatggtcttggccctaacaaagctgacctgatgttgggtctgtggctcggatgtaggttggttcattatcgtgttgggttgatgtgcctgagatcatggaaatagcaaactctggaagcatgatactagtcaaccttgaacttttcaagatactaggcgtgagaagccttgaggttgacctcttctaatttgggagttcatagaaactttgcatggagactaaagagtcattgtcaagtatgggagcttcctaggcctctaaaaaagatcatatatgatatcacacctagaatgttaaagcacaacaaggagaaggccaagggcattgaattttgaaagaaggccctcaagcatcttatcgatcatgaaaaagtcaaattctcaaaagcaaattttggtcggcattccgatgacacccttaaccttgattgaaacttacttctttagatgataagtctcaggcaccgcattactctgtgtgaggttgtaaacagtgtgaaattttgtgatcgtagggaagcgagcatttacctccatgaaagcaatagcaaaataggtgaggatgacatagctatttgcatgaagctgaagtggggaaattttgaagtaacttagaatgtccacaaaaaatgggtgatggggtaaagaccgtgctagccctcataatatgcccactatatgcaaaaattcccttgcaaggtttggtagcccgcttatccattctagcgggaaatactcgtagctctccatcggtcgggatgatgtatgtgtttaacatagtacagatcttctcgatggtcatggtacactctctgtttgcatgagcaaatgatatcgatgcaaaaatggacaaacacatgaattattctttggggagccatacctcagacacataaaagcgataatatgaaacaacctcatatttcttatttcttctagaaatcttacacacccaagccttacatctaggatgttgaggaagatgtgaatgagaagcaggaaactccgagctcctcatctaaactcgggtcatgaactttagaagatgaaggaagagtaggctcagattgaaaagtaccctctaggtacaatatctgactctgagtttgatcaagagacatcctaagtctatacaagtatatatccaaatcaccaatcatgtcatcctgatcaccactcaagaccaaatggatctcattttggaccctttcccgacaattttttttaattaataatatgctttagatgacctcttgtcttggacaacaacctaacatacttctcgcgagggttcttttggctctcagaataagaggtcgatatgtcaataatgggggctcaaaaaagtgcctcgtcaggttctcccatagaaataaaatggggtggacaatgccaatgaaacacaaaaatacaactcaacaacctaagaggcaaaagaaaggtcttaagtttactgagttaaatgcaaagtggtatatgtcataaaaaattacactcaaggtaacacaccgatggcaaggtagacaaaggagacactcaaggaattgctttgtgaaatacttataggcacaatgcagaaacaatgataacaaagagatggatggtaagttccttaccttcaagttatgtctaaagttcctctagagcaaagaatttaagcatcaagcataacactttccgtgcaaaaaaaatagctgatgttagagcaagatagtaaatttaatttacgaacacccaacaaaccctcttgaagcactaagaggtatgggtttccacagccactcaacaccaaggtccactcaataccaagagctactcgacacgaagggccactcagcaccaagggcaactcagcaccaaaggccactcgacaccaacgaccactggacagcaagagccactcgataccaagggcctctcggcagccattcatgagtcagaaaaaagaaaaaaaaaagaaaagaaaggaattgaaaaaacaaaggaaataaaattgaaactaaaaaatatatttttcaaagatcgaacttgttacctcttggaagagtgaattcaagttcaccaccaggccagaggggttgttacgataaataagtgaaggccaaagggttatgtttatatactaggtactttattgaagtgtgtgccaaagatagggctcgccatccaataagatgaagaaagaagaaagaccaactctcttattcaacaagaatacttaagaaaattcttgtagactggggacaagtgttaatcccaaaaattagcaagcataatcctcaggattagccattgttaatttgaaagattagagaagttcactttcaaagttagtcacaagtgggccacccaacatgcccacaagtaacccactcaacatgcctcaagagagggccattgggcatgcctcaagagagagccacttgacattgaatccaatatctcaatgatatcccacgatcaagtcaattggttgaatcttgtgaaaccatttcatagaagatcaatgatatattatttttataaagcaatttgactttgattcttaaataatccacatcacttctacttctattgtaaaaaaggattccctttttatgtggaaaaggcccgtatcaataattatgattttacgtatggacaattcctcaatatcttgttcattcgcaacaaaatattttctttgcgc

SEQ ID NO: 116302 - DNA, 1693 bp, Cannabis sativa
  modified_base (143)..(148): a, c, t, g, unknown or other
aacccacatagaaaccaccggagaaactactttagaaacccaaaccgtaaatttgaagaaaaaaaagttaaaaaaatagtatatggggtaattccccaatataaaaccctttcaatgtttcacatctctctctctctctctcnnnnnntctctctctctctctctcttaaccacgtgcaaccaccgccactgccacctccttctctctccatactcgatctttctccaacctcgctctctctgttatggatctccattttttcctagatccgtcaaagaacggcaagacccgtcgtgggtctctcaatctctctctcggcatgcaacccacaaccactgtctccacaatcattcgttagtgagccacccacaaccaccgcctctataggtatatatatatatattaatttattaatttaaaatatttatttatttttattttttaaaatacatatttatttacatatttatatataaataaatatatttaagtatgtattatttttttaatgaaaatatgttatgtaattatttatttagtattgctttttttttaaaaaaaataaataaattgaattggtattgtttagtttgataatagatatgttaggtatattgttgtgtgcatagctaaaatgtttgtgaaaaaatttcataaattgtctttagtatattttgaattagaaagatttataaattttttcatagcattttagttttaatgttaatgtttaatttgttattaagaaacatatgtggaatgtgtaactagtttagttaaagatttttttagtgaaagtttagtatactttaagtaatgtatatgtgatatgcatgtttaagttaattttaattttgatctaagttaattttaattgtgaaatgttaattgttaattttcttaagtttttatttttggtgataccgtttaaaacatttatggacgctatactagacttggtaatctactaaaattattttccttaatcttttacaaattttagaaacgtttgaagtgtttagctattgttaattttaattttgtttaagtattactttattagttgtgattttgttcgaggatgttgattaagaactttattggagatagtaagttactaaaattttgttcttaatattttataaatattagtagagtttgaatatcctagatattcatttgtagtaaagtaggttatgaaattaattgtattgcggtaggatgggtggaatatgcatgtaagataaatttgaatatcttaaatattcattcgtagtgaagtaagttatacgaatatatgtattgtgatcagatgagtggataatttttgtatttttaatgttattttgtttatgttgtattattttgtgtgctttgtttcttatttgatgcatgtttaaaattttcgggaacatctgattatagttgttatactttcaaaatttcgataaaattaggataaattttactaaaaatacataaatattaaaaaaaaaaaaggaattatattctagtaaaagttcatatatgtgtggtaattaatttaactaattaactactacacatattcaaataaataattgaatatttttttaaagatttcagaatggatgaaacttggtttaataattttaatgttactaattaataatttcattcttgttataaaataatataaaataatataaaata

SEQ ID NO: 116303 - DNA, 3272 bp, Cannabis sativa
tttaaacctagattttctatctattttctacagcaaagtcaagaacacatgtatgaaacccagaaattaaacatgcaaagtaaaaagaggaagaaattggaaacttactcattgttcgacgtttaagttcagcctaaatgaagctgctcgggtgcttttggtagaaatctcacgacagatttgaagcaaaaaccttttttgctctaagtttggtttaatggagaatttggtaaaattaaatttgtgaatgatgctcaaccctatttataggcgaaaaagtgaaaaaaggcaatcatttcaaatgccttagacacatcggttccccccaaaaccaaatattgggaaatcaaatataatcaagtgtaaccgtcaaacatggtgaaaaaaaactgggttttgaggcattaattgagtcaaaacattaattagccaaaaactgaaaggtcgcctgttcagcctcacaacgaatcgcgaatagacgcacctaacacgtgtcatccattcaaatgcaagcgcgactcggatgaagtctacacgcaacttcaaaagtcccatacagacttggggggcaaatgctatctcaattttgcactctaacatggcatcacacgatggtgacacgtggaatcaactttatatacatgctcgcaagagatatgcagtccgaagagcacgccaacacttagcaatttcagctttccactactacaaaagtgacattttgcttcggttttaaagtgacacaaaaattatttgtgtcggttagagtaatcgacgtaataaccacagatgcaaatagtcatattttttgcttcagtttagaagcgacgccaaatgtttttttgcttcggttatgaaccgaagcaaaaaaaaaaagaatttttgcttcgatttataactgaagcaaatagtagtgcaccgacgctatttagttttttgcttcgattataaactgaagcaaaaaaataataaaaaaattgaacaaaattttcagatcttagatttacaaaataatatacattatcagatctccattgccacttccaaattccattcgagcagacccaatactatcaatttcattcataaaaataatagatagagcatgttccctgaaacaaaacaaaacctgtatttaaatggtaatagaagcatgatagtaaagcatgcaactaattagccagcaaaagtgcaacatgagaatttcaactatgttccagaaaaacctcatcatattggagtaaacattgatttgtttgcaagactcatttcataccattgcttagaatttcaacatgagatattacagtaaaatttgttagatgacactattagtattagttaatgacaaaatttaatattaagtttatagctagaaaaatactgatagcttaacaatgatcttacagtgaaacaaaaatacaaaatatatgctccatcacatgtctcctattcctaatttagaaaaattcataacaaattaattagccaattcctctttacatgaatgaataagctaatactaatcaaagatcagaccagattagatttcttaggctaaaaaaagcaaggaaattaatatatgaatgaaaacacataatgttctaatttcatttatgaagatctataagtcattcatgaaaaacccaaatatgcataaaaaaacctggtgaacaataattgaagaagaagacgatgtttcacatataaaaaaaatgtaaaatagaaaaagaagaagaagaagccactgtcgtcgttgggtagcggggctggtgctggtagggtgtggtctacaattttttgaacaaaagggcaaaggggagcgagattgagtggagagggtatctattaacaaaacatccatagttccatcacaaacctcagtcctataacgaaataatattcacattaggaagaaaaaactaatatggaggataaaactaaaataaacagaatccaattagcaaatcaacaaatggagcttattagaaaacaaaaattattcaacacacctatttgatgattttttgttgaagctcgtctgggaggacattcttcgaataggcggtgggtgttttatctagattagatatccaataagaaggaggctcagggtcaccaacataaacccaatcagaaaaatggaagcatgggtagaaatatcctgaaattgacatcagaaactgtgttatattacaatatatatatacatatatatatattcatgtatatatctaaacataccgaattcttgaagacgaccagcagcatcgcttaaacaatgcatatgagagacttactgagtggtttttgtcaaatctcgttggcctttgtcgagtggggttgggttaggtggagacggggttgggacagaagacgaggaggacggaggatagagaaggaggctgggatgagtagcagagtaaaacctaatgggaagagaaaatggggaaacctaattttaaattgggattttgtaaaataaaatgcctttagcgtcgattagaaatagaagctaatcaccttagcgtcactttagccaaagtaatttgtgtcttttttccaccgaagcaaaatgtgaaagacaatttttaaaattttcacttttttcctcggttcctcttttagcgtcattgttctagctgacgctaatttttttcttttagcttcggttatccactgaagcataaaatctctgcctattttttgcctcggtcaactattttggtgagacgcattgactgacgcaaattgtgtattttgtagtagtgttcgcatcgtgagtcatagaagaaatccctataatttttggatcagatcacagagatatggaaagttgtccgaatcccttgattagtgtattctgtatttaatatgcaatctttccaattatatcaattgtaattagaagggaaactcttccctcaaagttgatagccctataaatagtgattcatactcactgagcaaggggtcgaaaaacttatctaagaagtcatattcagagatatcattgtaagagctttaaggaaagggatcattatattccttgttcttaagtcaatacaatccaagaggattaggctattaccggattgctcggtgctgaacctctataaaattcttgtgtctttatttactttattatattgcatattcattacgctactcgtagcttacaatcaagactcactgtcattggccaaaagcaaggtcaacactaattaataaagatcagaaatcgcttttatattgcatggtttacatgattt

SEQ ID NO: 116304 - DNA, 1175 bp, Cannabis sativa
gagagagagagagagagagtaggggacatgagtatttggttgattccttccacggagagagactgtggttgaagttattctggggtttatactttctctgtgtttgcctggtttgttactctggttatgggtgaacgaagaagttagagtgtgttggaattgggcatgtggttgggctgatagatggtgtctttttttaagtgagagggaggcggaaaagagagatagagtgatagacttgttaaagattagatttttgtgtttttttgttaaagattagttttttgtgtttgctgattaagtttgccgccttggcctgttgttggaggagcaaatctttttctctatatgctctgttttctctatatgaaacggtttcttgtgttgacggagtcgtgagaagatggatcatttggagagcatggaaaaggagactttcaactttttctatgtaagccatccttcatccgtgtaccaggatgtcttctcgggtgccagaactgttacggccagaggttctccgaatcataaacgaaacttgttctcgactccggccgttgctgattcttcaaccggtggtgttaagggcccttcttctaaacttgttcgtcgtcagaggcgtgcgttgatggcgacgtcccatgatcctgctgccggtggtaaccagaagcaagcggggtggttccccatgcccatgcctgtctattgtgtactggattttgcttcatctggtaatggtgaggagaacgttattctggagtgggaaaagtcgcctggtcttgttcttgttatagcgataccatctttgactgggtcctctaatgtgccaaaaaatttgaatatgttaaaggatgtgggccaagggacgaaggcctattcttgtgggcctgggtctcctttttataaggttggtgggccagaaggagtaatggtggtgacagatactcataatagttatgagtcgagcctatttgggcctaatgaagccttaaatgaagttattaagccatgtggtgacatcaagcacttagaaaaggcacttatagggtcttcaactaagttgggccttgaaaattctggcactagcttagcggttcactctcaaacccctgtggaggagaatgtcttatctcctccacaggagccatgaaaggtgtagcgtggaactgtagagg

SEQ ID NO: 116305 - DNA, 1153 bp, Cannabis sativa
  modified_base (470)..(476): a, c, t, g, unknown or other
aacaaaaaaaagatccaattatatttttaaaatactatatttaaaatttttactattatatatacaacaaataaatataacttttaatataagaaaacttaattaaactttttgacccaatacccaattcatatagtcatagtacaatacttgtctaaaagataaagcaattaagggaggcaaataataaaagctatagtatagtcatagagagattcctaagaaaaacaaaagatgggaaatgatatttattagggaaggtgtgtaaacaacaactaatataaatataattatttattttttatgataattttttataaatatatataaaattagaattaatgatgatataattaattaaatgaagaaataaagagatggaaaataaaaatggtcggtgagcggcggtgctctgctgacccaaacttaattaacaaacaaaaatactaattattattattatttttatnnnnnnntttatttttatttttattttgaaggggacaaaatactttttaattaattaggcattttctgcctcttttcttgtcttttttggaggctaatatatatcatgcttcattcttttctttcttcctcctctttttcccacttacattattcacattcaatattttaaatattattattttttcattaaaaaaaaacttgtgttacattcatttagtagttaatttgttataatatatattttcaataaattcaagcaatccataactcccaaataaaaatttcctaccggtaaaattgtgacaacccattcaaaataaattgattataaattttgttaattaataaatgtaataatgtaatatttatatatatatataatttttttatattaaaatgagttgtaaaacaggtgagatgatcataagaatatggtttttaattctttaacttaataaactcccctacctagtttcccatcaagtgatttactattacacttttatttttatttatatctacatatattacattattatacttcacactactttaattaatgtgcttgtgtgtgtataagattttatttatttatttattttagaaaaattttattaattaacatatatcttcaattggttgacttttagccaaatttaaaacttgtatagtgaaaatatac

SEQ ID NO: 116306 - DNA, 1806 bp, Cannabis sativa
aaaaaaaaaaaaaacggaaaaaaaaaaaaaaaaaaaattgaccatttcaattaaatagttatttagtttattaaatagcaacggtttgcaaggaaaaagatgtgttcatggaaaactaataaagtaaggccaaacaattgatttggggaaaaaaaatgtgtttcttcttttcattaatgcagtggaatccagattcatcatatcttatttataactagtatgtaactaaattatatactctaaaagaaaaccaaaggaaaacaccagattaagacttgatcacacacagataagtaaatgatgatcaaaaaattaaacttcaaagtgttgaagttgaacatccttggtcttgagagggacatattctccgagtagataaacctcaaggtgattggaaagagctgacttgtctatgttctcatggtgataagatttgcaaacgaagtaaagaatggtctgtgtaacaagccccaaaagcatcaacacgacgaagaccaacaagcaaacgacaccgtatgctgctctaccaaacaacccaaacgaccatccgtgaacgacaagcttctgaaaggtgaattggaagaggaagctgaaaactgtgagaatcccaaataagaaaatggatgtccacatctttcccttgatcaacgctttgctcttcttcatggcttgaatcccacgaacttcttcaagaacagaaacgacagaggccagctgccaaatcagactcatgtatatgtttcctacaacatacaacaaccccaaaacgacaagcataaccaaccccggctggaatgaatattcaaccattataacagtaaagataaccaatataattaaggcgaggaagttgtagaggaagaaggccaggaaggtccacaagaaggttatcatgaggcgcttccaaaccttgggaacgacactgatgacctttttgaaggataattctcgggcggtgtagaccgaggcaacggtgtagacgactgcagaggtggagaggagggagaagatgaggaggaaagtgaagtaaagacctttgaagagccaaagataggtccattcggaggagatgtggcgagagagggtgttgtacttgggtgttccaacttgggtatccaccaggtcgacctggttgtggattatgttgcggaaaaggatgtcagagacttctatgtggattaaaatcaagagggatagagggaagattaaggtaagcgttatttggctgaagatttttctacatgtgaggatgattttgtaggcttctttaagtatatcaaacactccaaggaattgcatctcttcttgctctaaatccatctatgaatcaaatgaaacagacaactgagaaggatgagagaggataaacgatatgagaagaccggctttaatctttgtgttctttctatgtaaacctttatatttatgtatatggtgtgtatactaataataaatattggtcaaagtttagaagtctccttcacggtaggacaagtggggtaattaaaaaggaaaatagcattgtttatatctctatgtaataatttcttggaaataacgttattagaaaggatgccttagttgaattatttgaagtcaagttgtggtttatgacttaatatgggcttttgaaacaatatttgaaaaatataccatgtttttgttggttcattttttatggtattttatgtcttttgaacttttttatggtatagaatttgtcatatttttgttatacttatttagaagggaaaaaaatagaaaaatttcaaaaagggtaaaaaattacaaaattacaatgggccg

SEQ ID NO: 116307 - DNA, 4338 bp, Cannabis sativa
  modified_base (2752)..(2757): a, c, t, g, unknown or other
attttgtccagattcaatgaatatatataaaatattcatttatcaccaaaatcaattatttatattatttctttaaatagaaatatatttcccaatatagaaatattcttataagatgttcactacgaatttgtataagaaagatgatgatccattattgtgatagtaacttctactattattcaatattttaatatacaataatatatgtttgtgtgcattagtttatatttaatctaaaaagataaaattaacttctctactagagcaacaagattctacataaatcttcaaaaaaattatgttgcatcattaatcaccaaattaattattgagagataatgtgaagaaaacaagaagatatgttcctcaagaggatgtatgactgttcaaaaattgttagagaagtgattaagtgaaggtatttttttccatttgttattattattattattattatttaatttttaaatgattacaatttaaaagagtggttaaaagattttaacataaatatttaagttaatcctaatttcaaaatatttatttcagttaacaataattttaaaattaactataatttaaaaatatttacttaattaaaaaatataaaataataattataataaatatttttttttttaaaaaaaaagtctcatttatttatttatttatttatactttatgccgttaagaatatttaaaaaaataaaacaatttttttttcaatataatttagtctacacgatagttatttagatttttgaaaaaaatatctttaaagtctacactatatatgattacgtacacataaatatatcaattctaagtcgtacataaatttatagatacgagaatagtgatatgacactttaaaattattctaaatatctttgtttttgttttaattttttatgatttataaatagttattgattaattatctatttttcttatttttttctaatatctttttccttttttttagaaaaaaaacatttttctatcttaattataaatatctataatagtatcataatacattagaatattttaatatattttaaataataataatataaatcatgtacactaagtatttaaaaaatacaaactttatttaaatataatttattgagttattatttttatatttatctatttatttatcaaaattgagtagttaactcattgattaattaaacatgttgataaaaatagtgataatcacagatcaaatacggtgataacatcgacttggaatgtagtgaaaaatacaagtaagatatgatgataacaatgattgtaaaatcatatgatgagttttttttttttttacagatttataatttttggtttgttttaaatttctattttatgtaatggttcttcaatctctaatattttattgctattacgtctgaagatattaaattttaaacatgagtaaaaaaaataataaaatatagttactcacactaataaagaaaattatataaaaaatatcaaattttgaaacttcatatatatggttttataacttaattatcactaaattaataaaatacaaccgctcgcgaagcgcggtatatttcctagtttttagaataaaaaacaattcattgtttctctctatttttctttaaatgaatgttgtcatattggaatttttttataagaaaaaaaataataataacatatacttgataactttttgcttgacataatatacacttcataattatttgctgctttgggttacttaatttctatatttattggtatttaagatatattatttattttttaaatttataaaccaatgaaaagtagctatatataaacggatgaattaacataaatttatcaaataaaagagtaatttgcggcataaatacttaagtttaacttatggtaggaaataaataattaagtttaatttttggcagtaataatacttattaaatattaagtaaattgtgacgttgcaaactttgattggtccaggtcattaaatttttattaaaaaaaaaaaagaacaaattatggttgtgacaaagcaacaaagtgagtcacttattattataacttattattgagtacgtactatatatgataagctatatataggcaagctaacatacagtacgtagatatcatacatgattgtacatatatgactagtactcaaatatgaatacataatgtctattcatcaacagacattttgagcactccataagatgtttgtggatcatcattgaaaggacgttgattgtaacagtccaagttgtccccagtgcttactcctagaaaatggcagtacattttatagtagacaatcctatttctgaccctatcatcttcaccgtggccgcactccgaacctccgttgagtatgttagtgatcacaccataaccgggaaatcgattagcagcctcatcaatctctgttggtttccactcgcccacaattacgtcatggggggatggtttgttcaaatgtactgaagtagtcatccaaaaccatatagctgtctggaatgaaacaagtgcgtctgttgcaactagctctgggttgcctaataggtccaaattatcgagtgcgtaaccaacttgtccgtaattgtcgttgctgattttgtcgtcacaaaagtacgtagtacgtactaaaaagtattaataaaacatatataaagcacatagtactcaataaatgacatgtatgcatgcatggtatatatatatatannnnnntatatatataaatatacatatgtatgtattatgtaaaactcgatgacttactaacggacttggatgggtccacgaccatagtaaaattgtccaggaacacagggccattttgggctgtcgatgcaatggtcagattgatcatcttgttctctgatatagcatcctcctatgattcacaaacacaatcaacaaatctttataggaaaattatattatctgtatggaattatctgtgatcttttaagtggaaaaattataactcagcaataactaatctgatgttgcagttagactaaaattagtgtgttagataacttaaatcacatttcatatataaattcaccaatatatatacctccggtttcgtgagaaatttggccaaagaacgcagctagttctcttttacgagtttcaagagagccagtagtaccaaagccggaaaaatatctagcagcatttatgaaggcgtcgtaagtgtagaagccattactttcgcatccagaaatatttcgaaacctaagcatcttgtcaaaaagcgaggaagtaatgatgtcactaacatcatcgggagatggggttggacattggctttggcagtggccatcgccacaatagggctctgtcgtaccacagaatccatccttactacaacaatagtcggtatcacagacataatagttatgttgttttccacaaactccatctggaggattggacctaattcctactaccaacaatgctataatggtagtgaacaaccacaagtaataagagtatttcatttttcttttccttttctttatatcaatttgaatgaggttgcgactgtatttataacaatctgtggcttatgaaattctgcctactaagtttactagtactcctatctacactaaaatttaatcacttatcacgtttttcttaaaccaaataataaataaataaattttcaatcacattacctaaaattctatgaattattctctgtgatttattaaagttacttcacacgtctcaatcaaattaattatatatagaatataaataacatgtaccactcaattttaaaatataatgggccaaaatgtaaatatttatatgatggaaaaagaaattggccggctacctatttaataattactcaaatttgtataacttgatttttatcatagtttagtgagttcatatgtattgattattgattctagatattgatgtgatattttgtaattaattaataatttttttatattatttattaaattaaaatttatgaaataatattaaaatgcatcaataagatattacacctcttacagcaccttgaatggtaaaattttagaggatgtttggtgaggttactgaccgacccaatgaaggaccagtgtgggcttaagcccatgctgaaaaaaaaaatatttcttttactttttaactaaataaaaatcttttaattattttaattgcccacaataaatgcgtaacaaaatggaagatcaatagttgaatgatagtttgacagtatatctcaaaaagaatgtattcaatgctattgacaacgagcttattattcatcgtttt

SEQ ID NO: 116308 - DNA, 5185 bp, Cannabis sativa
atccattctttaccagattccttactagacacaactaacacatctgctgattcatacccatcttctgcaacattagtttcacctctttctttgcttttacccctggcattcttggcctttaatgctctacattcatctcgaaagtgtccttctttcttgcagtagtaacagaactttccacttttgaatttggacttagtcttggattggctatattacttctgaacttgttcttgaattctctcttatcagttcttcctcttccaatgtaaagaccatcatcattcgagtcacccctgtcatcagttttcttttggatttcttttgatttgagtgcagcctttacttctaacatggtcaatgtgtcctttccatagagaatcgtatctacaaagtgctcataggttttaggtagagaactcagcaagataattgcttgatcctcttccttgatcttgacacctatgttgtttaaatcaagaacaattctgttaaattcatcaagatgacatcttaattccttgctttcatccattctcattgcataaagcttcttcttcaaatacaatttattggcttaggatttcttctagtagatggaagccaacttgatccgtaaacttgaagcagttgtttcatcagatacttctctcaagacttcgtttccaaggcttagtagtatggcactatgagcctttgattcagtgtcccttttaatctttccatttgtaatttctgcaagttgagtaggatcgattgcttctgaaattccctgatgcacaagcaaagctttcatctaaattctccaaaaactgaaatcgtttgtccctgtaaacttgtcgacttcaaatcttgctgatgacattttcaggatgtattctttgaatcttgagccaattcttgaaaatcaattcctttctccaccaagctctgataccatttgtggtgaatcacaattcgcctcattcaagaacatacacaacaaagaacaattaatatataaaaccagaactaaaaatgtgagttcaaaaaccagcaatgaatctttcaaccaagcatgaactatgagcaatcaatggtaataaactggaatcagaaaattggcacattttcgttaacgaggttcgaacatagatcaatgcaatctatgcctacatccccgggaaacaatcaacatactttctttattgatgaatcaaagttgagtacaaagtgtttgatcttacaccaggaagatcgattacaaaggagtcaagctcctgaccctcccaaacactcaatctctcttttctctctaatctggtgtcttacttacaattatacacacttgagaaacaaacagggttgatatatatatgagttatggacagaaaatatttccccccaaaaccaactaacaaaactgtcatttaaaaatgaccaacctggtaatgccacatggcacttttattagatttatgttaaaaacaccacattttttttgaaactttactaaatcattttattttttgagcatcgtctcatgaattaggaatatttgaaagaatattattgacaccacataaaaattttcgtatgtaatttttactttcttatttatttctgcatttgcttaatccatcaagtctatttctgattgaccaagtgtcgaacttgatccatcaagttctcacggcaacattataaatgtttatttgaagaaataaattaaccattcttaaacaataaatttcacttatatattgctcatgtatatatatatgcattaaaattcaataaagcattgacctttttagggaggaataaataaacacttacatataataatacaataatttttaaactaatcatatctatctatattgaaatccactgttttttcaaaatcattcaatttattatgtaactttattattttctatttactaattaaaaatatcatcgcaacattgaggcgattttacttctcttctcttcaaattctaatttttcgatgtcgttggccataaggacaaaggcttcaacttttgtgtgacatttgagattaacagttgaaattgggaataactttgatgttgatggatttgcttgccacactatgagttcatttccaaaataattaccacacttgattgcagtagtgttacttctaattttaaatgtccatagatcaccttgtgtgatgaagagcatcatgtcaagaggttctccttctcgaaaaatatagctaccttgtgcgaatgtcattggtttcataacgctaagaattttgtcatagtcgtgtttaaaaatattttgaaacaatggcacctacaaaatataaaaatatatataagaatcccgactacaatagagtactaaaaaagaaaatacttcgggatagggtatgattcaatataatacttgtaatatttttttaagaaattgtacctaacttataacgcccaaatcaattaaggtgcatatggtataaacaattatttttcatgaatttgaaatatatttacataaatacacatacaacaaattgtttgaactttaccgaaatttcttgaaaatctacagatgccctatactctaacttgtgtttattatatatattataatgcatttcttaaacatgtatatatatatattcattagaataaaaagttaattaccctttctagtataggcaaacataggtgttccttgagttttgcttgaagtatagttggaagaataaacataatactttcacatccaacgttgccttcttccaatctcaattgagcataactcataatcttttctttcaattctttagggatgccaatccaattatcttctatccacttttctgcatcttgttttattgtattttttacatgtttcaccattatacaatcttgaattgtctataattacacaatgaacaagttgaattatcaatacttaaaattaacaaaacttgtgaccaaatgtaaaaaaaattgtgtctaattataaattattattcttaggttgtgattaaaaagtctaaagttaaaaatagtagtcataaaaatcacaattagtgtactaaatgcgtttttagtcacaaaactttgttgtgactaaaattaaatttggtgataacttgtgtctaaatattgtgttttagtcacaagtaattttttgttgtgactaaacgttacacttaatcgcaaaaaaaaaattattatgattaaaaagttatcactaaaagtagttgtttgtagtgtcggaatatatttaaataaatacaatatataaaaaataagattatatataataaataaaaaataccactacattaacaaaaaaaaatataaacaaatacctcatatataatctgattttttttttcatctaggagttggagaagataagagagatgtttctgattcaatcccttttcatcatctttaattatgctttgtacatatcgtttgacacttgcttttttttcctttgagatttgatgatcatttagacatgattctattaattgtagtttgatatgtattttcttctttttctcctcattttttgtggtttccatttgaatatatgtctgcaaattatatacatatacaataaaatataatagattagtaaaaattaacaatgcaaaattcatttaattggaataaataataggaaaattttcaaaaatattattttttatatatttatttatttaaaatttttatttgcaacaatattcttgtaaagttttaaattaaaaaaaaaatatacttttctcaataaaaaaaaaaaacaactaaaaaaaatcataaatcaacctcaagacatatataaataaactataaaataataaaaaataactagaaaaataatcttatgacaactattatacaagtataaaaaattataaaataacaaaaaaaaaaaaaccgtttattatttttactgaaaatatatttttgtaaataaaaaacttcaatgttaaaattaatttttttccatgcactatttttttttcaaaattttggtctaatatatctataaattgcactcaaatatattagcaaattgttggcacaatttaataaaaacagataataaaaaaacaaaaattgagtttgagaatttatacatatatttatttatacctgtatatttccaataaggtataaaaatattagtatgcccaaaatagagataagaactgcaaacagattctctgatacattgctacttgtgtcaaggttttgcccaaaagaactacaaaaataatacaaattattaattaatgaacaaatttatcatgacatatgaagatcatatatataattatatttcattatatatccaaaatttatattttctctactaaccttaaatttttcaagccccaccaaaaagtacgagagaattttttgagaaaatctgtattgctaactatacgagactcaatggcttgtgagaatattccaaaatcgaaaatggctcgatttggtggattaatagggcaatattgatttaatattgttaaattcttaatgggatgatttccacgacaatcaaaaggaccagttatacattctggtcctccaacggctttacaagcatggtgccagcaagccgtctcacgaaaaattgaataaaagtaccaaaacgctccaaacacctatgattgatcatcaagagaatattttacattaattgattaaaaaaacacataaatttaatgttttttattgtttatacacattataccctaacatgttatattattaaaaatactaaatgaagacatttaaattaaaaaaaaattgatacttacatgaccaaaaattatgtagagaaaaaagaagaaagtgcatctgacccatacacgtcgagttagtgaatcagttcttcctaactctttggctgataagtacacacgaagaagacgaggcacatattgaagaagaagtagtaaatttagaaactttctcgaagttaaagattttgatccagtgatcctcgaaaagtatactaaaattatcacctacacaaaattaattaattacatagtattattagtgagaactttaggattatgacttctccctttttaaattattttctattttaacttaattttaataatatattataaaatagctatagtctcgatcacactcatctagtcaaataaaaaaaaaaaaaaaaa

SEQ ID NO: 116309 - DNA, 1923 bp, Cannabis sativa
aaaaaaaaaaaaaaatcatctttaatgacaaacttttgtgactaaatataatttttagtcacaataaaaaattgcttataaataaaacataatatttaaatataaattgttaccaatttagtttaataagtactgtgattaacttttagtcacaataaattattatttttataactattatatttagctacagatcttttagtcacataataaaaataataatttataattaattataatttttttttatttttagctataaattttattataactaaaaagaaaaaaatttatagcgttattatcacgttgccggcgacacttgcgtaacacacacattacatacactttttcaatatctttggtcttattacacaccgttctttatattaaaaaatataagagaattaaacacacattacggcatgtgagattgagattcattttatgtaattaattacatatcatgcacattctagccaagccaagtagtgaaaaggggcgaaaattgctattcttatcatgtaatgctctgaaggaactcacttcgtggaagcccagagaattgattcaattgctctgtattgtttttctgttctgcttctctacagtatccattgttttcacacgtataatggatccatcttcaatcagcactctgtttgaagactccattcaaatctcccctgatgaaatcactttcagccttaatcctggcgaagtggacgaacctcaagaagccaacaaagtattgttgggaaaaattattagtaagcacaagttgggcaaagcagccattcaaggatcgcttaatctgtcatggaaagccatcaaaggatggaaatggaaagagattgagacagggttgctgcagttcacgtttaataagagggatgatgctatgaatgtcctagctagacgtccgtggttcgtttgtggtgcattgttggtcataatgccatggccgacatggctaacacccgcagaagtccggttcgataaaactccaatctgggtgaaagttgagagtattccaccattctactggaatctctcaaacctaaaagaaatagcatccaatgtccatgaattgccccctgggatagaagatgctgtggggctaagtacgctcaggttccgcgctactatagacttaaacaaacccattttctctggtttctttctccgtcgacagaaactgaaggacttatggattcaatataagtatgagaaactatccaagctctgcttcaaatgtgggcttctcacacatgatcaaagtatgtgctttaagtcccccacagtagtcaaggatgataagggaaactactacccgatgttcagaatatggctgaaaagcgatgctcaagagaaatccacattcacgactccccgggccaaatggttccaggactggattctccaaaagcaactcggtagagaccctgtacttcgcaactagtttaaggtaaataaagctataagaaacggagaagaggcggagatcagggagacaaggctgcaactctcgtccaagcgaagaattgttaacgactccgacgaagttcacggggactcgtcaatggccaaggttattatccagcttccattagtttacttgtcgggtataggagagtttgctccttatgctaacaatgccaaactggtggaattcgaagacgctactgctgccaaatcagactccccagacacgatagacacggcggcacacccatctggtaatgacgttgattcaaacggcatcagtacgaagagcactggcaacatacagtcaacaaaaactacaaatattacctgttctggcgaagacacaaaaggagctgggaaccttaatggagcagacaccccgattgagaatcagcatgcacagcagaacgtctctacggctggcccccccccccc

SEQ ID NO: 116310 - DNA, 1248 bp, Cannabis sativa
tcaaataatggcaataactattggtaaaaaaaatcacattagtaaagtttaagaccaattatgtactggtataattgattctttgcacacataattctcaggagctcacacaattggaatggcaaggtgtgagaatttccgggaccggatttatggcgattttcgagcaacttcagggttgaatcctatctcagcatcatatcttagtagcttgagatccatttgcccaccaattcatggaggtgagaacaacataacagctatggacaatgtcacacctaatatttttgacaactcattctatcacactctactcaaaggagaaggactactaagctctgatcaagaaatgtattcaagtatgtttagtatccaaactagagagcttgtgaagttgtatgcaactgatccactagctttcttcaatcaattttctgaatcaatggtcaagatgggaaacattaccaattcagagagctttgctaatggagaagtgaggaaaaattgcagatttatcaacacttaattagattagttgccatttggtatttaaatttcaaaatctatgtaaaacaacaggtggggtttgattgttttttttttttttttccttttttggtctcattattcattctaaaagcaccacaaaaaatgtgcatctctttctgtattatttcgaaaaatttattgttgtattactttgtaaaagaattatactggaatgaaacccacattagaattatgctcaattatttcttgattatctctcctaatttgaagaaaaaggtgagaaagtaggttggtttattattgctgctatctttttactccttgtagttgagacttttcagtttagaatcaaatacacgttataaatgcatttaagtatagagaagaaaaatcattgcagcaaaagataaaatgtattgagaagaaaaaagtgaaaattgcactaaatatgctttctcaaaactttgttacaaaaatatggtaatattaagtttgacccatttttatagcattttttaaattttaagttttttatggtattaactatgcatattatgcatattatgtaaagaaaaaattacagtctataccatttttatcttgtccttttttatttttaccgtcttttttaaagtctactatttttatctcttttttaaaataatgtaccaattttgtccctgtcacttcgagatcctctccatgtgactcgcttatgtcagggtattttgggtacaa

SEQ ID NO: 116311 - DNA, 3685 bp, Cannabis sativa
acataaatgacttctaatcttctaatgataacaaatcagattatatggaaatgagttttatttagggcttaaaatcccaacatatacattataccaatgtactctgtaccatatccgtacaagtgttggtagtgtaacaaacatacaagcatgcatatacacttaacatgtacatacatttgcatattcatattacatattatacacagttcttacctccttttcgaactcaagtgagttggccgacctaaacggaaagtctcgtgctggatggatgccctaatcacatattaaaaaccgggtaaatcacatgtcaaaaccctaatctgggagacccgaacctacaagtcaaggttctattattactaaaagggactacagtatcctaggaaatagggaaataccaaactaaggcactaaaatgggcaataattgagaaaatgagttgttcggggaatctgtcaaaatcggttaaccggttttacaggacctggcaaatcggttaaccggtttgcaccaagttttcccaacaactccaaaactcactcaaaacttatccaaatgccaccaaaccatccagagtacctaaacagggcatacacaacacattccaaccaataaaactcaaaaaagtacccataatcaaaatgtgccatggatgaaccaagcttgagttttcaaactcaagcttgtgcatccatcacccaaaacaaccaaaataacaacaaaagctatttccaactcaaattgaccttaaaattcgaacaatacataatccaaaccctaacagcccctaaaactcaaaatcacatactcaaaccaaatttaaagttttaaaaacacaagtctatggattatagggttaccttggcttgaatcccacttgaattccttgctgaaaacacaaaaattagcagctaatccccttggttcttgctagttcgaagagagagaagggaaggagagggtgttttcttgattttttggctttttcttattttccttaatttcctaatgtgaataaagattaatcacattaatctttgctgaaatggtgattgctaggtgtcacttcccaaggctgccacttatttcccccaattgccaaattactaaaatgcccttttacttacaactcaagccaaataaagtctaggggaaaaatgatcaaaaactataaacccgctcaaactagatattctattctctccaatatacatcccactatgaaataaggttctagacttacccatgtgattaaactagccatccatcgcattttttgttgtcaccgaacgaaaattataaaaataacataattcatatataattcaaataatacacttagagtttagtaaaatcttcagaattgagaaattataactctaatgcccatttctaataataagaaccataattaaataaattcataaataattataaaaataccaataattagtgttaattgcctttactaatccatattataaatgcggtctttacataacaaatgggtgatcaacataaggaagccaaggatccagcaccatgctgactgaagtatcaaggccaatattgcatctagcccctgcctttattcagctttgaggttcaaagatacttttccaaataaaactttggttatcaccaagggaagctgtgagaaaagtaccctgaggatagtattgagccttgtaaacctgactcacaagagcagagtcgttcaccatcaaatgccaagattgtttccccaacatagagagattaaaatctcataaatgatgaaaactaaggccaccatgttgcttatgatgacataatcgctaccaactcatccaactcaccccatgcgtcttagaagagtctgaactccaccagaattttctcatcaagccttcaagcttgttacacatatcagcagggagaagaaaaactgacatagcataagtagggaggacttgtgctactattttcaataaaacttccttgctagccttaaataatagtcgctcttcccaactctgaattcacttttgcatcttatcattaagaaaggccaaaatagtattcttattctgcctcatattgcaagggagacctagatacaagttgttcacatgagcttccatcatgccaagcataccacatgttctatctttaataggctaagtagtatttgagctaaagaaaatggtagacttagaaaaatttacctaaaagcttgctcaaacaattgtaatagtgaaataacattcaaagctttccttttattagttttatagtaaagataattatcatatgcaaataaaatgtgggaaataatttgagtaccattgcaaacacgacaaccatccagatccccatgagcttcaaaatacttaatgagagaagaaaaaccttcaacacagatcaagaacaaataaggggataaaggatcgccttgccttgacgaatacctctacctggaagaatagaacccaaatcatgcccaccatgagtcacagtgtagctgatagtggagatacactaaaagatatggtccaccactattacacaagaaagatcactcgatacggtcatacgccttacccgtattaagattaattttgttagagtatctttaatagtagtattctttaaggtactaaaatcttctatatcatctaaaaatataaaattttattttatatttattcacattattttggacacttttatttctaaaaatacttcaatgatataacactattcaagaatactattataaatatattatttgttttaattataaattatataattttatttaccttaattttttattaaaaaaaatagcatctatatatctatataaaggaaaagtatgaggcggtgatgtggtactctaaaattgctttaaaaacttctatctattttctcattaattctcttattttattaattttcattcaatctatgtaaattcttctcttttttttctaataaaattaaaatatctatttaaaatacacatacctcaccatacatgtatatatataagtatatatgatgcttaaaaaataaattaaccattatatatgacttatactatactaaaattaattatcatttattaactccctcatttaaaggtttgatttcatctattttgtagatttctcaaataaattagtatcatctaggtattgtttatgcaatggagagataaaagtttcacattgcgtccaactagctgcgggagccgatatttgcaacaaatctcaggaagcttagcatgtactatacttcgagatcgatggaattttctcaaagaatatcagttcaatttcattacaatgtgatcactttcaagcatgatcacctctatggttaggtttcacatgtatgacattatcttttttctctttatcttcactctgccgattccaaacaccactgattgggttttactttgctgattccatgttgaacaccgagtttgcaattcctaacatacaaaaatatatctcaatatgaattttttatgtgattgtttaaattatgctataaatatcgtactttgttgtataagaatattttattttgagaaatatatttctatttaaggaaataaataaataattaattttctgataaatgaatattttatattcattgaatttggacaaaatcaattatgtaatat

SEQ ID NO: 116312 - DNA, 1510 bp, Cannabis sativa
aacactaacagtacgaaccccagacaaaacactacgagtcccagacgcaactggaatgctactggacataatttgtcactacagaaaataatagttctaacaattaaatggctcatactactttattgtgatcttttttgaaaataattgtcctcgttcaaactttttgattaaacctaatgaaaaaaatttcaatagaaaaaagtgcaaagacaatatcacttagaggaatttctacttattttgtttgtttaaatatagtatttttagatttgaccaatttatgtaacattttcttttttttaagtattttttacggtagtagatatgtcatgtatatatatataaattaggtattcaaaacctatatttaatgtttttatttatttttaagaaattgtatatagtaatttttacctttcactagacctcaaaagagtgtcatgaattgaagtccaaaatttgagacttttggttattgaatatttataatatataattttcttaatttacattacacgttcatatatatactagttattgcacgtacttattacataaagtgttataaaatgaaaaggcagcagtaataaaatatacatactaaacactatactataaaaatatgattaacttttttttttgataataaaatatgattaacttaataatacttaataatagtaaccaccatataatcaaaatattgacaatcaagaaattgtaaaacaactgtagaaaataagtaaggggaaaatatatagaaactactttagtgctgtcaatcatctaaaatgacagccaaaaaaaaaaacactttgaacaaaatatacagaaaccacaaaaactgtttgaggactgttagttatcgatattgacaatcaaaagaatttacagatactactttaaggttgtcatttatccaaattggcagtcacatgcaaaaagaaatattagacgcagtaattaattctttgttacttcactggatgaaaccgatgaaacgttattcgaaattggggaagagttgtctagtgaagaaggtgacgcatctaggaagttgtcgtcttcatcagaatttactgtgattgaggggttttccaatgaagatagtgaaacaccaacagattgaacattttgtttaagctttttgtttgcatataaggtaggagaaacttggtgatcggttgcattctgaagatttagttgttctattttttcacttggcagcatagtagtgatggtttattttatatctattagaaaaccaagtgttagtttcatagttctcaagtaaaaaaagaatttttttttaccttctgcatggtttattttatgtagttgagtaattgcttcctgcaaaaatgtaaaaaaaaaaaaatcattcatttatattatatgtaatggaaatgaagatatgctgttgtgtttattgttgggttttaagccctaaataaaaccacttcaatataatcagatttactagttaataaagattagaaataacatt

SEQ ID NO: 116313 - DNA, 1982 bp, Cannabis sativa
attgcacaacacactattttaatccatggttaaagagaggagtttgcgagtaggagacttggtgttgcgaaaagtcatgcctaacacttgcaactctacgcatggggtttttggcgacaattgggaaggttcttacctaattgctgaaaacattgggaatgcaacgtaccggttatttgatcttaatgactcagtctttgatagagcctgaaatggagaacacttgaagtattattattaatagtacccgcatgaatatacttagtcaatatatctatgctctaaattatctaagtatagagggtatatccatacattgtgccattgtactattgattatccaatgaattgtcaatttttgaaactttgaaatattttatattttttgcaattatatacttaaaaaatttgtgaatttcctcacaattgaaaatgaatattgaaatgttcatacgtcgtcacaccaagttgtgaatgatggtcgtatagataaaataatgaccaggtgaataaacgtttaaaggcatcgagttgtaaatataaacgcataaaaaatttacaatgaatataaaaattctttgaaacaatagtgtatccccaaaggatacattgttcatatggagcaatgtaaaagagaaatataattgtcttaaaaataccaagtacaaagagtgagtacccgtgtaccgctcaaaagaagttcgaagaaaggcaaaaagattaagtagcaggggcattgagatcttctgcaactttgctggtgccatcgcgacctctatagtatttgtgtcctcagcatcctcaaggaaaaggttcctacctaatccttgattctcagtaggagacatggtgcggaaagcattagccatctcaactatctctggtctaaacactacaaaatcgaagttcggtagcttggtcaaggtggtatagatgtaatcaaaaatagcctgatcataagccttctttgcattctcctttccagtctcaagatggggagtaagattagtattttattcctttaacttcttagtcttctcctctgcctgatctatggccttgccgaggtcctcgacttctttgtcttcggctacaacgtccaactttgctttcttcacgccttcttaaagagttgaattttatttcttcaaaagtttgaactccttgaggcccctaacggaagcacgcgagtacaccttcatgaactgggaggcaagttcgattgagtgagacgtgagatcttcgaaaggagccccctcaacttttgcaaaaaaatcatcactcacaaatatttactacaaagtcgtgaagttgcgagctttggtggtagggtccatcacgacctttttccccatgtcctaggtggttttttggtgtttctttgacagatcaaccccaagagtggtggtgacttcatttttcctcttttgaggtgtcagggcagagggagttgcaaggttgaccttcagtttgtggttgacagagggaacttgcttcaggaaagtcatattcgtgaagagatacatagggaaataagaatttgaaaagttaagttagcattatcagtaatcgttaagtcacattacgtgatacttgtcttgaggtttatttggaaatgggcttgtctatctttttcttttgtttctcaaaggcttcttgtatattggttctcgctggagcttggcgttggctagaatcaacttgtgttctcgtagctttgcaaaagtacacagtagatgccagtcgcgatcttgaactagaaggctggtcaacactttagcaatttccaaacaattttacccaacacagatcgagccaatctacctgcaaacatatataaatgttagcatccgtaaaaaggccaaaaaagtaattaagtgtgacgtacgaggtcagcgattgaagtctatcctgacccctggcatcttaaacgcataaaactacttcaacttccaatcccccatattggaaaccatgccttc

SEQ ID NO: 116314 - DNA, 2006 bp, Cannabis sativa
agaaacaaagagtgaaaactaaccgaaatatgacccgaaacttagactaatttcagcctaacagagatactatgaatggtcaggacaatccattaatgtcaggaaattcactttgggtttttcttcaaatacagatatggcgattaagattgaaatcaattcttatttgggtttctgtgagctagatatgtcaaataagttcctgagcaatcctttattgatgtctaatagccaagttagagactttgagttcatcaaggattgtaacttgagaaggttggatgggtggaaatgcaaatttctatctcaagtcggtaggaaaactccgattaattcagtgatctgtgctacccctatctatgccatgtctactttccttctccttaagggtctatgtgagtcccttgataaattggtgtgtaagttccggtgaataggtacctctaacaaaatgaggtatctagctttaaccaactaggactcaatttaccttcccaaagatgtgggaggtttgagtattaagaagattgcggacttgaatttctcccatgtatctaaacttggttggaaactggaggtaggggatgcttccctttgatgtcatgctttagagtgaagtacttcccccgccagacttccttttggtcaatgtctcttagctctaatgcttcttggctaacaaagggtataatctcgattcgtgagtttttacgtagtgagacatgttatttggtaggcaatggcatgctagttgatatttggcatgctccttggatttcgtggcttgattgggaacattatcaggatgccttcaatcctagagttcagtgtagggggattactcttcattcgactcttcttaatcatgttggtttatggagttttgaggctttaaaggcttggttcattctaagcttggttgggtctatgatgttagttaaaagattgcttgtcgggtcttctgatgaacttatttgaaaggactcttttgacggtaaattctctgtaaggagggcttatcatggtcttatcaaatcccgtggtaataatgtctcacctatgtggaagaagtctagaaggcgcctattcatgagagggggtttctttatgtggaaagttggtagagacatcttgccttttggtgttagacttcgtcaaatcttcagcagcaatgttgattgtgctatttgtaatagccatgatgactcttaccggcatttgttctttcactgtcttctagctcatcatttgtggttcagtagcccgtgggctattaggagtgatattcttctgtttaactatccgtttgatgttgttcattgaattctacaccctcctttcttgagtaatacggttagtaatgatcttatgtttttcaaatgttttgcttctcttcgttgtctttctctgtgattggctaggaacaaagcctttcttaaagggattgttactactatttttggaatttgttctactattgttaaggccattagagagatggattgttaatcccaagaggtcatctgtgactgctctgcgggaaccttttgggagggaggtgagataccttttggatctcatattattattgttattgatgctgcatattgcgattcacatgcctttgaggcaatgatggtttttgactcttttgggcaggtggtggaagctatggttgttaagcttattggtgatagtgctttgggtcgggggcaaagtctgtgacaattctgcatgctgtctctcttgccttgtgtaggggttggcattcactaaattttttctctgatcgtcaagtgttagtcaatggtatcgtgcacaggtcactgtcgtgttgtgagaggagtgctttcctctatttgttttcttgttttgatttgctgcctagtgcctcggttgtttgggttcctaggtctttgaatttgactgtccataattttgatgcttgggcaatttctgtgaatttttgtggtttcttttttttagggaagtagaaccctttgttt

SEQ ID NO: 116315 - DNA, 1895 bp, Cannabis sativa
  modified_base (26)..(31): a, c, t, g, unknown or other
tccttgtttggttggtccacgtatannnnnnaaaatcaggggcaacactaataaatttacaactatcaactttattctatttatataaaaatataggaaacattataacatgatttgatgatcatgtaaatttctcatctgggttgttgatgggcttgttaaataagttgggagttcaaggaaaaagagatattcttattttcctttttgcaattaaaccaaacagagaaatactataatataatatatggtacgtgtttatgaaatattaattgaaactatagcagcaagaaagtcgtgttgttttgtggccactgtgtacgtacggccccatgtaccaattttaatgtgaaaggaaattaagcaaggaggagaaaatatatagacagacaggcacaggactaaggacatggccggacgaagccgtatataataataataataataaataataaatatattatttatagcatgcacttaattaaatttaattatatcaaaacatgcaattcttttttatataatataaataaaaacagagaagctttttttctaggccttagaacatgggtgtgggcttctctctctctctctctattctaagtcattaatcatgcataattcacaccatagccaagtctatgacatttcagtacctttcatttatttttcaatttaatactgattatgactatgctcctattcggttggtacagtactgctgctattacaagggaccactttctcttttattctccctccaattttttttttaacttaattcaataaccattcaataatatataatatattaggtgggtgctctagttaattttgattaatagatttaacatttatatatatttggtgatgttgtgtatgtgtgtagttagtgtcgtgttcttgaatttcaattctttacttaaactcttattggattcatttacttaatttgttttattattattaagaagaaaacgtagaagcttttcaattttcatgaaaaataattgaaaataggagaagaaaaactttgaaaagctgaattattgtaacttaagagaaactctatctaattaactttatataaatgagtaaatttttaacttttcttaatctaattaaagattggacaagtgtatatataagatatattattacataggttaattcaattccttttgaccatttccacagtccaagatagcctgaatgggacaccacaccagtaccactgccttgccttcccttttttaaatggtatattttcagtttttaatttaataaattaactattcaaaatcaaatagaccatatatattggcacgtattggttggttacccaaaatattgagttttcaaaaacaaaatctacagtacttcttcatacatccaataagataatagtaatgtggagaaggctgttaatactgtagtttgttttaaaaaaagaataaaaagaaaccatctttaatggttcagtggggttgtttatatctcacgtgtacctacaatatgaaaacggtttacctaaaatacgtacgtacttcatatctcttccatacatctttttttaattaatcactaaataaatacaatggtctctagtacttaatgttagcatgcatcagttggtgtgggggttagtttttaggtgtcaatatagaattatacacttaattagagtgttaatattgatccatgtgttatagattgacattaatattacagctagagatcaaccaaaaattaaaaaaacttatcgtgttttcattataatcttataaaatatactattggtgttttgcactaattaagcagaatttaaaagggaaatttgattttctatacttagaaaataaaaaaatttgatttctaaaccaataatttaaacc

SEQ ID NO: 116316 - DNA, 1861 bp, Cannabis sativa
  modified_base (640)..(642): a, c, t, g, unknown or other
caagatgagataaatatttttaagtgtattaccttttaatataataaaaaatacttagcataaaatttagtatacgtgtctcgcacgtaactttttactagtatatatatatatgtaattttgtaatatatattgaaaaatagcttattgtggctagtggcaatttatggatcttttagtgaaggtgatttttgagattatttaagattaatctctttttgatttacaaaaagaaatagttgtgcgacttgatattgaatttcatacacaccaattttttaatttactcttttatattaataatattttaatggtatttttattttcttttaataaataaggtttaatttttttttttaataatatatctttttaattttagaggttgattggtttgtgcttataaaattgtattttgtaaaagagtgaacgtgaaataaaaatttaaatataatttgtgaaaattaatttttcaaaaggtgattaattataatgtcatttattcttattagttccaaaataattgaatttgtaattagttggtaattctaaatgaaaaagtatgcaaatatttagggaacttttagaaataaagatttgaaaattgtgatgatataatgtatatatttatataaatatnnntatatatatatatttttcattttagcttaaaacttaaaagtctatttggattttttttttttttaagaagagtcaactaatcaaatattttaccaaaaaatattatcaaataagtttgttaacgattaactttacataaaaaaaattagggttttttgttcctaaatttatagctatagaagattatcttctttcttcggtcaggcctgccaacttttcttaggcatgtgaaacttggtcggttttgctattgcgtttcgatatttgctactgtgattagtcttatctctatgacatgattttgagtgttttagtcttgtctatgtgacatggttttgagtgttttaatcttgtctctgtagcatggttttgagtgttttagtcttgcctctgtgacatagttttgttttattttgttgttgattcttatttattcttcgatggtttgccatcaaattattgctagtggtttagaataacaagttctttactactaaagaggttgttagtagtgcagttacttaccttgcacaatagttgagtgctcaagctacgaggttgaatgaatttactacaacagtttctactgttgtgtcttctgagtggtagatggaattgaaataagtgttcttaagattaattgtgatgctacagtctttttcatcttattttatttttagttttttttgtcaaacaatccgagaattagacagctgattatttggcttatttttctaattttaatcctggtcgtgcctccaatggggatgtcccgattgaattgtgggtaaataccatattggaccctgtgttttgtaaaagttacaaattggactctctattttgttaaatgacaaaataaaccatgtattttttaaaatggtaaaaataggaccataatgttaatttttgataattttctttttaatataacaaacttaaagacaattcttaacacgaacagatacaaaaaatataaacagttttgtcataacacatttagatcagattattattaaattttattttaacaagaaattagttcatggtcctatttgtacaattttgtaaaatacagggtccattttatcatttaacaaaatagaaggtctaattggtaacttttacaaaacacagggtctaaaatgatatttgtccttgagttgtatgttattattttagctgattgctattattaaaagagttttttttttttttt

SEQ ID NO: 116317 - DNA, 1876 bp, Cannabis sativa
tgtgatgctagtcttagtattgagaaggtcaagataggggaatgtgcaattatcaaagataatatggggatggtcatggcttttggaacttgaacttggtattgttgcttttatcctgctgttgttgaagctttaagtatttttccaggaatgaagctagcagtccgcctggggtacaattttgtggttatggaattagattgtaagtgttattaattcaattcataatcatattgttgaacactcttacctaagctgttttgctagagatatacttgctttctgtaataatttttctactatctctttcttgtattattctaggattgccaatagtgtttctcgctcgttggcaaagttagctctttctatgatggatttctatgtttggtggcgtggttactctgattgtatctttgctgacctgcacatagacattaattgattaatgatatttcttgacactcttttccctattaaggtttttccaactaggtttactcttaagattttaatgacgccattttttccaaaaaaaaaaaaaagttgtatggcttgcttttataagatgtacaaaacatatacccataaacattattttcctagcaaatttgatggcagagcgatagttaaaacacttcaactggttagggcatattttgttatttaattttttatcaatggttgggctttgttctccttgacgagcaataagatttacaagatgattttctataataataaacacgcatatcctaaaagctcatactagaatattagaaaatctaattttagttaggaaagtctaacatggatgaatgttcaggggtataatttgttacatgtcaaagttcgaggagcaaaattttgtagatatcaaagtctaggagcataatatagtacataaataattactaaattagtagaatcgaatgaaattggacaaaaatccttaaatctaacaatctcagtagtttaagaagaaattttaatagctaaaaaagttcagagcataattcggtacatgtcaaaatttaagggcaaacatccaacaaagtttagtaaatttaattagttgttaaaagaggctcatattattttgatgagggctaatacacattatttcctctcttaataatatcttcgtaaaagtaatgtaaaaggtgggttttggactaagtttaaaataaataaaaaaaaaaggtatggctattgaatattagtggtgcccaacaccttctatagatggcgtttcacgattggttagcgatattcatttaaatatttttttaagttcgatacttaattacaccaatagttgtatgacaccaataaagatgctagacaccactagtattttttaacaattctcataaaaaaaaagttacgaattaagaagaaatcataaataaaggagaatcggtagttttcatccaaaaaaccgattaaatattttcaagctcttgaacaatgaagtcaaaggtgtctgtacatatattagagaatttttgtagaattcttcccaaggctttcgtaagaggtcgtttgttaggttcccagaaagagagaaaattattgagaaagaaagtagtagtttggctttataacttaaaaattgttttcaggtttaaaaaacaaaaataatttttaaaaactaataaggatcgtttagccaaattttttaaaaactgggttttaaaaaactaaaaaacataaaatatcaaaatattgttttcaactttcaaaatttttttttgtctaatatattatattttagatttttgctcacatactcggaccctatactcggaaccagacccaaaccctgacctagaccctacgggtgttcatccgatccaatccgtacttttttggt

SEQ ID NO: 116318 - DNA, 1280 bp, Cannabis sativa
  modified_base (1107)..(1116): a, c, t, g, unknown or other
aataaaaaaataaacaatatgaacaaatttattattaattgcaataatttaagtggattaattatatttaggtttaactaactaaatattgaccctatacgtagcaacatctaataatttgttattttttatttatttaaaaaaaaaaaatcacccaatagtaccagtataatttttgtatttgtgattctcacattgatctgtttcaattttctttaatttattttctaggtaccacatccctcgatcatttctcaaagaatcagaaaaccttttagtgttgcttgaagaagttggtggaaatcctcttcaaattacattggacataatttttgtcaccgatttgaatgaaaacaactcattcaatcacctccaccaatcatccttctaatgctgaaataatttgtttatcttacaattattttacaatgtatggaactatcactaaaaaatatgagttaatgtgaatataattcataaaaatatgaaataatatgtgagaaatgcacatatgttcgttttttcttaatgcagaaattatatagagataattccgttcaaaatactaatgtattttgtttattgtacttttatatttattattgtacgataaaaaatattaaaatatcacaagaatagtatgatcatttgtaatgtatgacattctgagagagtattttataaattttggttaattttttgagcatgataataatatgagactaatatttttagctaaataatcataaattacaaattacatttcattaaaaaaaacaaatacaaatttagtttaataatactgaaacggtacaacttactcatactcttccggtgacaggaataaaaactaaacaaattttctcaaaactcacaaagcgtttccttttttcactttgtgtgatgtatctattccacactgatgaacttcaaagtttcatcggcagatcgcttctactgcaagccttttgctaacaccaggacacgtactagtgctgaaattctcttcactcaattcgatagcgcagttgttcttattccggcagaactgcatttcagttaaatatatcatgaagttgcaaaagtgataataataataataataannnnnnnnnnaataataataataataataagcagcaacagtaagagagaaataaaaatagtgcagatacatatattgaagtgtatgcaagtattcttatattgtggcattatgttctgaaactctaggtgcatttgtaaatgtaatcacattaattgtatatttattgtacttt

SEQ ID NO: 116319 - DNA, 1663 bp, Cannabis sativa
aaaaaaaattagactaaaataattttctagatgctgaaacaagtagggagtgcatcaatatatcccttttaagagagtgcattgtagaatcacttatatattatgtaaaatactaataatatactaaaaaaatactaaagctttctctaatgagacactaaaattcaaaaagtagtagaatttagatacaaaattgctccaataaaactctaaatgctattttatatatgtgagaatctatagtgttccactaaaaataatagaacactataaattacactaaattttttttttggattttaatattaaaataatatatttatgattaaatttttatatttttatatatatatattatattgtaagatagtttaataaaatagtataataaaaaatatttttagtataaattttagtattgtaattagaatataaaaaaatttaatgctaaaattatattcttttaatattaatttaacactacatttaacttttagcattaaaattgtccaaaatacccgtactacctcttaacaaatggactaatattttggctgcactccaaaatctattattatatctcattcctaagccgtgtcaaactaactttttcaatatataacgataaaaatttaaaatataattggatatcttttttaataaattattaaatatattatttttaataaataatagtagaaatacaaaaataatatttttaaaaataaatttaagactttttagctaaattgttttttttttcattatttgggtaaggattttgggtgtggactcttgcttccctacttttaagccacccctatttttaagttcattccatttaatatttaaaatttttactttttataaaaacaacccaattttattataaaattaaatcatttaaataaaaaactatatcccaccatttttttagaaagagacacactacttattaatttctctcttttttttttttttgacaataaacaattttttattgaaaaaatcaacattaagtacattaaaaagaaaaattaaaaaatcctccgtccaattaaacccacaattaaccttgagtaaacaatctctctcttaataacaatcttccactacaaaatttgaaaatctttcaaactccctcctaaccttcttttgttatcacttacactacaaataaaatgtataaatatatatttacaaaaattaaaagggattccatgcaacaaaagaaaccaaaatgtatatttaattttaaaaactagcaacaatcaaaaaaaaataaaaataaaaaatagattaatagtatataaatcaattgcatgattcccgtacggccctcgttatattattgagaataatgttggaccttgtctgtctctaatcaaaagtaaacaaaatacacctatatattatgactattaaaattataaatatattgtatgttatgttcaaatcaaacatatactaaatatatattatatattatctccatttgtttccaatttccacacaacttaatctttttttctaattattttttttgttttgtttactcgtagcattatcataataattaattggatatcttagttttatccatatttattctatgggcaaaatatcaaaagtagtttatgctcttttattattattattatta

SEQ ID NO: 116320 - DNA, 3415 bp, Cannabis sativa
tagaggccgctaatagggctaaggaggtggagagcaaatttgttgtagagacgaaggttcatgaagaatcccaacagagaatccttgacctagatggcaaaagctccactttgaagggacatcttcaaaagcaggaggctcgacatgtcaaagctttggagtaagccttcgtccattcaatatacactctctggcagcataacaaagccatgataaatctcttgaatgctaaagtcaggtaggaacttttgccccaactactgacgctagaggaggtggacaagtcaagtagcaaaccttagggatcaagagtagtcaatcctggaaccaccatccttgtaggtgagaacatggacaactctgctcctccagcctctgaggtacctgtttcaatcgagtctgcgatcccggagggccaaactcaagatgctccaacactagacggttctgctcagccttaacttgtctaaacttttctttattttatttttcttttatttggggaacaagggttcccctttttacatgtgtggagacaatttacacccttactgcagggctttcttagtacttggtcccacttgttaattcattggatattttcattttatatcttagaatttggttattatttagtgcttctagcctcgtgaggttctagttccaaaggcctaaacctttgattttttttttactaaatacttacacttaaatacatatttttttgtgaaaaagtgcttttgcagaagggtttatttaaaactctcaataattaattaacttgaaataattaattttttgagaatttaccctttcctgacattcatcacttatcttcaggaattcttcaaacttaactttttaattgaccttaatcaatcgatttaaataacctgaattttacggtatcgttaacctgaattaaccattaggcatgaacctttattttaagttaacctggatttaccattttaatttcaaatatgttaagatgatgacttactttcagttctccgagcctccaaattttaagtcatattccgttttctcacatttggttgtgttaaataatcttcaaatataataaggcaatggcttacttccagtttcttaaggctctagtttcaggcaatagttcctactcttatatttgagcatttaacttagctattttctggcagaaagagaatataaatatcttgcatagtaacatacatgctccccctaaagtgattaatagttgagagttttgatcacttgttatatgatagaacttttaaagaccaaatatgaaatggtgatcttttttttattcagatggttcccgccttgaggcgtaaatggaaaataataaaaaggccaagcaaaaattagaaatgaacttgaccaccattattttactgatagtatcgacgcaggtggtcagcgttccaggctcttggaattcttgttccatctagtctcttcatatgataagtttcatcatcaatggaaaatacgataaataacaattttatttgataattaattataattattaaataattagttttgaaatttatagtattaaaattagaaaatatggcattactgaaagaaaagataaattgttgaaataaaatggcaaaattgtaactagtgaggcccacatgtgtggccagccacttagtatattcttggcccattattttatcatttttaatccatataattaaataaaccctagttaaaatactattacaggaatgctctcattctcatccaaccttcaatcaaactaaacctagttttctaactctgttagacaactagtcgatgagagactcctttcatagtgatttcaaatccttattattgttcttcatcaatcttcaagcctttaatgaaagagtaccatgccgactcatagcaagtcaagtacttaattatagtgcggaagacggtagttaaccaaactgaaggggagaagatccaggttcagatcttgacaatgctctgcaaccgaaaggaaacaagggatagagatctgagcgaaagaagtcaaattattccgttgccaccaatgtaaggttttctaaactttatatgtgttgatttcattattttagagaattcatatttagggtgttaatcaaacatacatgttagtaaatctagatattggtaaaataaattctagcaactggcctcaaagccatgataattatttactttcatgaaatatgaatttaaaatgatgaattcgatgacttggatgtgttcatgttagtttatctgtgaattgatgaatgtttgtgaattacgaattttttccatgaaaaataattttattttcattttgaaaataatttatttggattccttgtgaaaaatttagcaattttattttttacggaactcgattccattaaaaaatgagaaagatatggtgatttaaaattttgggtgcataaggtgtcgagggtagagcaccgcacgcaccagtcactcagagaagttgacttgcgcgtgcgtgccttggacaaccattgtttgaagcctcggtcagctgggcaacttcggacacgagacgcgtgcacagatgctgcaatcgccgagaaaatttagcccaagaccctacaattcaccccatgcgcacgtgtagagggttggatgcagccttcttgggaagctatgggtgattttcactcaaaatctgatttttgtgatattttttcaccaatttcgaatttttttattttcaaaacccttaatatctatataaaatattatttttaatatttaaacctaaatatcaaaattttaaaattaataatgtataattttttaatagattattatcaataatttttttgatattttgaagtttaaatttaaaatttagttattttatatttaaattatggttagatttaaaaaaaacttgttaatttcttaaatttattgattatttaataacaatattaaatattttaatactagttatattttaaattcaaagatagcattatccttttaatttgaaatattataataaaattatcttatttgatattttaaataattataatttgaaattaagatggacatttttatagattttctaaccataacttttttaaattcataaataattattttatgaaatattttattattatgaattataagttaaaaaataatatttatgccaatattatattattttaatatagaaatttataaataatatttaaaatatttaaataacttagatatttttgtaaaaatttaaaaaagacttaatatgagatattttgacatataatttggaaaattatcatttatttattattttattcttaaaataataattttctaaccatatctattttaaaacttgtttatttgtgttatcccaaattttgcactctga

SEQ ID NO: 116321 - DNA, 1623 bp, Cannabis sativa
aaaaaaaaaaaaaaaaagagcactgcttaaacttaaaccctaagtaatcaaattcactttccattattaccaaaatgagaaataaaatactattcttaattcttagcacactgatttttaaaagggtattgggttattatcatagtcttctttcatagatactctgttcttctgcatcactttttctaaagatggcaggctaagatgtgttgtgagaacttgcaatatttcataaaagaaaattatattatttatttataatttgttatttcggtttccaataataataataataattagtactaccttcttctttacataaagtaaatattatatatttatatatgtatggcagctgctgattgcaccctctattatagactctggcgcccactttccaaaagaagagctcaatttcatatatgcatatagttcaataagtagttcaatcctaactatagatccttataaatttgaccataacataaatgtgtatttatatatttactcaaataaattaaataaaatcatgcttgacagctggcttgaacaaatatatatcactaaaaatgaactaattataatgaataaattcctctatctctaataatagtaataaaaatgaaaagaaaccattccatatatacaaattcaagtactaagtataagtagtagtaagggaaaaattaaagttattcaaaattcaaaatatcctgtcattggaatcgtttttattaaaaaaaaaaatgttcctttttctctttttcttggtgtttgcctttagattttttttgttgtagtgtttacgtttatcaaggttgggaaattgaagaacacgaaaaagtataatgttcacggccctccatttattctctcttttatgcctttgctttgtttgagctttgagtgttgagtgttgagtgttgagacagacatgtatatatataaccacactcttatctcgcatttcatcaccaaattccctctcattctcattctcttcccaactcaaactaattaccaattctactactaaacccactaacttcttctctcactcactcactcactcttaaggagttaggtaattatataattacacttcatattgtcacatttttatcattattttatttttgagtaatttaatcaaacagtttgtggtcattttatgtagaagaaaaaaacacaagaaagaaatatgagccgaccaggagattggaactgcagatcatgccaacacctcaactttcagaggagagaatcatgccaacgatgtggtgatcccaggtctggagacagaggagactttggagctttcggaggaggaagaggatcctctaattccttcgctttcgctactaccggctctgatgttcgtcccggcgactggtactgcgccgccgccaactgcggagctcataacttcgccagccgctctagctgcttcaagtgcggtgctttcaaggatgacgtcatcggaggcggtggcggcggcggttacgactgcattgacatgcctcgttctcgcggctctggttttggctctggcggcggcggtgggggtggtggccgacccggctgggaatccggtgactgggtttggaacaggtcatcattttt

SEQ ID NO: 116322 - DNA, 1419 bp, Cannabis sativa
cgcgggatgtttactagtatatatataaatatttatataggcggttgaaagatgtatttactgcaagctcttctctttgatttatcattaatatgaaatcttttaacatgttttaatcataatcataagtacagttcataagtactgctaatataaattttttaatattattaataacaatgtgtacatcataagtttatataatcaattatagcattcttaacaagtctatttttataaaataaataataaaaaataattcataattagttactgaatttttttaaaaaaatcactaaaacttaaataaaactaatatttacgtgactctccacgtaactttcatctagtatattaaaaatatatcaatgcggacacataaattatatgtaaaatttatatatatttatcttaaaaattaactttttaagtgaataatattttaaaataaaacttattcgttatattatttatgacataagtgtttgttatatatataatttaatatcatgtatcattactcattgtcaacacgttcatattaaagaaatgttaaaaggcaagatgagtgtttagtattattctatattgctattaaaataattaaatattaaatttcatatcttataaaaaaaatatcacatcttatataatataataaaataatttttacaaaatatctttaaccaattatcgtaaaacaattctggtaccgtattgtaagataaatattaaaaaatatgaatggagtgtctagcactttcctaaatatcatttcataaagtaatggtactattaatcatcaactcatataatttaaaaaaacgctacctatatagataatgttaaacatactcaataataatgttctttaatagtatagcattaccacaagtcattacggtgaggatgtgtcatattaatatatcattaatgcaatttagataatatgaatgtggaaacatttagagttaaatatccatttaaaaaaaattaaataattattatagttcaaagctagattccacatcattaaaatcttaattaaattaatgagtctatacaaaaatattaatgtagtatagttcacatattaaatataataaaattaataaatatatttaaataaatgagtgattacataaggcccgatattatttcagtctagcatttttctgttagaaaataagaactttagagagaatacttgaatggaaaaagccacattttaatctcaacttgtgtgatttgtgacttggtacaaaatgatgggattacatctctatttataggactctatggactaatctcgcaatattattaaatggctagtttctacattgttctacataattccctctactaacacaagtgaaagataattctagaaaattcaagagtactcaaacaaacaagaaa

SEQ ID NO: 116323 - DNA, 3412 bp, Cannabis sativa
  modified_base (1166)..(1166): a, c, t, g, unknown or other
  modified_base (3380)..(3387): a, c, t, g, unknown or other
aaaaaaaaaaaaaaaaaagcccctttggttaattatgatctacccaaataataccacttacatggtacttaaaaacaattttgtttttgcaaaaagggtgttgagtaaaatcataattacacaaagaagggttcttctcaaatttagttaaatttaaataaataaaacaaatcattaagttaaaattaagaacaaccgtacaaccaccggaatggtaaaaccaaaccaaaccagctttatcttaccatttccgccgtgcgagtgggctccaccttccgagaatcgcgcgtaacacttagccaagtacacgtcaccccacgaggcgggcccacactctgttttcagccgttggatcgcatcagagatacaatcctgacactccgattggctcaagtcacccacgcactgcgccactccctgaatgttaccggaaccaccaactctgtacaaacctccggcaccggcgccggaattagaattcatgtaatccaaaacggaatccctccgggacaacgcgtcggaatcgtacccgacggagggcccacatttcttaacgacgacggttttgtcttcaactccgagaaacgaggtattatcgtacttaacgaagcaaccctcgagttgcaacgcgccgccgcacgagtcagtgcagagagtaccgagttgactcaccgcgcgtgcaacacaccgcgagcaagcgtcgttgcccaggtcaccccggcattggaaaagtccgtacaagttgggagcgccgccggttgcggggatggtgtacttgttgtaggtagagaacatggctgagttgacgaaggaagtgagtagcgagttgactcctgactcgtaaggtgagccgggtgagtatttgagttgagaacagccaccgaagacgaaggtgtcggttgaagattccgatggggtgatgagaattgtggtgatgatgatgatgatgatgatgagtgagaagaacggtgggtttgttgtatacatgtttgataaaatgtcgaaatgagaaatgagaagatttgttgtattgttttagttgttgttgtgtatgaaaatgagagggtctatatgaatatatttagaaagagtttttggagatttttagcaagaggaaggtgaactagctttattagtagtggttttattttattttattttttttnaaaaaaaaaattatatataataagaagggtaattagaatgtttgtttatgataatttttacatatattaaattatacttttaatttttttttttcgattattgaaatagttaaatttaaatatttttttttttgattttgttaaatttttactaatataacgattgtattctttaaattttgatatctacttctctaaactttaatatgtgctagattgaatttctttttagtaaaattagataaaaaaaattaaatttaacaatatcaataattcagaaatttttttaataacttaaaaagtttagagaaataattcaataaatgtcgaaattagtaaaaatctaaattagcctaataataaataaggtattttggttatgagtttgtgtttttttattagttagcttgtcccctcaaataattagaaatgttaaatattttctcattaattttaaatattattaatttacaatatattttaagattttgttagttaaaaagagtacgatttaacaggggtaaaaattaaaaaacaaaatataattatagtcatagttcataaataaaattagtaattatttttaaagttgaaaggttaattttttctaaaattcatgcccgtaaaatacataattatttatttgataaaaaaattgagagagggagagattgtatgcatgtgtgagtgagagatttttggctttagtgaaaagagggtagtattagaagtagtacttttagtatgggttgctttaaggggaatttacgtaaaaatatgagaaacttgacgtgtgtaaatgtcattctatcattgggagccgttggtcgatgatcatcaaattatcaatcactaataataatgtttacatacaatcaataaaagatatgtatctctaggtaattaagtatgttgtattacatccatcataataatataatggatacattatattgttttaatctaagtttctattcattgttattgaatattagtagtgctcaatatcttttaaaagtggtactttatgattagttaatgatatttcttaaaagttgttatattaaattatagaacactgctgttggtcactagtagtgcttagcacctctacacatgtcgtttttcaattgactaacaatactaactaaaaattattataataaattatatcagactcgatacttaattggatcaataacgatattgacacataggtgctagacaccattagtgtcctttagtatttctctaaattatatgatacacaaaacttaatcacaccaatagtaatatgacacttaagtgttaggcaccaatagtgacttttagcattactctttatcgagaattgctaaaagacaccactagtgcctaacagtacactcctcggtgtcataccgtcattggtataattaagtattaggtcccatataacttaaaaaaaaaacttttaaaaaatatcgttaatcaattatatataagacactacttataaaaagtgttaagcacgactagtgcctaataacaatacaacccttcattttaatatggcttcttctttaggttttaaagtcaatttttatggttgaaatattggttaaagttgactatacattgtcacacaacacaactcatcgactcacatgaaaaaaagaaaagaaaagaaaagctactcgaaaaactttaccaactactactactacgactactaatactactattactatataattatatatattactatactaactagatggggggccaattgtgtgaggttgggtccattattatgagagaaaatcaagttgaatgttaatataattagtttcatgaattgataattgactaattatcaattactttagtagggtgttccccggtcaaactcaaacacttgttgtcaaacacctacaaagggtacaatttcatctcacaaatcatttttcagtccatctaaatcactataaatataattatatgcatatttccttaattttaatttctatctataaatttttggtatatgaataagttaggataagttataattttttttttctattattattatgtataatatatgatggtattttgaaaattttcaataatttagattattaaaattataattgaaacaacttgatagttgtttcgagtgtacaattaatatagatacgtgcaacaaaaacacttaggtggcgtttggtnnnnnnnnatgaaatggaatggaatggaaagga

SEQ ID NO: 116324 - DNA, 1922 bp, Cannabis sativa
atcgatcgcgatgtgatccaatgaacaccctacaactggttagcattattctagatgacctaacgcaccacctaaatatatcatgattaagctcaatttcatttactttttattttgcagagaaattaataatagtactaatgagtactatcatatctttatgatgaatcgttttatccttgtgtatatattattaattcttgacaagaacacaccaatttggttatataactaagaatatattataatcaattataaccaagacattgtatgttgacaaatcttttattttatttttcaattattattggtttcatgagcaaaattgaaattaagagtcggcaaaccctttaagatataatttaataattaatttgtagcatatctaactgtcactattagaaatattatattctagaagactaggtctctcataataagtcataaaatatagggaataagtttaattataagtgggtgaaagggcaaggtccatactgttggaagtgtaagatgatgcaatatataaggatcgtaattaataagttggaacatcaaattttaggtgttgattattagggatcaagatttagtaagatgtcaaattaacaagatatgccccatcaaatacaaacaatattgcaaaacataaagccaaggctttccccaaaggtcttttattagacttggacattatttcacatgcccatttttgtgatataaaacattctctttatacctcaaactacatgcacatataaaggttttgaggtggaaattttatttataaaaataaataagttcgaaatttattatttagttatgagcatatatttaggtcactagtcataatttcgagtcatgctatatattatgctaatatatatgggtcattttttaggggtgttcacggtgtggatggtgcgggttgtagttattttttcaaatgaaatcgcacatgcagcttttataatttctcaaaccgcaactgcatcgtgaaattttaaaattgcaaaaatcacatcacgaaaaatacagtgcagtttaagcggtttacactatcataattatcaaacgttataatgaaaatttaaaaatcaaactaataaagctttaacaatacaaaaagaaaaaaatattattaaagttttaatatcataacatgtataataatcatcaagtcattatattaaattgtctttaaaaaatataataaataaacatatattatatatatttattcatatatgaaagaaaaaataaaaattatcttgtaaaaatttgtgactttataatatatagtgcagtgtgctttgaaatgcaactattaaattcaaaatcgccaactacattgtactgtgcggtttgacaaaaatacaaaccgcaaccgcaccgtaaaagatttcaaaccgcatttttatgcagtgtggtgcagtacgggcagtttgtgcggtttgatgaacacccctaatttttttttttttttaaaaaaaaaagctagcctctaggaacattaccaattatgactcaaaggagcggagagctagaagaattcaatgataaatggcatccgtcaagataaggttattaatacatgatgaagaattaggccaccagactatactagcaatagcttgtaagaaaaatttaataagaatatcagccactacgttaacagttttgagggcaaaatataaaacacgcaacattgaaattggtatatagctcgaatgtcatcaaaaattaatctcaaaaatgaatttaaaactattgaattataaagtttacgaatcaagcatttgcaatgattcgacttgattattgtgaatccaaatgtattgcattgagagatatcatgccggtttgcaagagcttccacccattctggtggaaggctaccctccacctttccaagtgtagaa

SEQ ID NO: 116325 - DNA, 2735 bp, Cannabis sativa
  modified_base (2696)..(2700): a, c, t, g, unknown or other
taggttaattatattagtctaacctaattaaaattaaattagaaacataattaactttttttttgaatgaaaaagatgctttattaataattgagatcaatcataacaatgttcaccaactcagaaggtaaatttctagcatcaaaagtgcaatctgacaaagaagaagagctacgcgcaaggaaatgtgcggccttattagcagagcacttaacaaaggacaaagtaacattagacaactcagataaaaggttttgacagtcatggaccaacatcccaaatgtagaaggaataaaacagttgttgtggattgcttggactgccatcagacagtcggtctcaagtatagtaaaagtccatcccttagtttttatccaacttagggcttccttaattccgattagcttaacaatttcaggggaagtgctacctgatctacacgaagtaacaacttcaatgatacaaccggacctggctcgagcaataatgccaaaaccaaaagagttatgagctttaaaacttgctccatcaacatttatcttcaccatatttgcaccaggtttagtccaatgctcctcctcttttcctatctcaaaacgagatataagaggatcaaatctatgatgttaagcacttttccattggtaaatattagatcttgctgacagaaccacatccaaagctagtgtacttttctggttccatagtaacttatttcttgcattccatattgcccatgtcaccattaaagcttcttcaatttgagttggattattgtccttcataacatcttgaaaccacttgtgaaaggactgatgagaagatggaatgatattaacagaggacctatgccaacaggacctagcaaaggaacaatccaccaataaatgatgaatggattctgctgcaacattgcagaatgtacactgctgagtaacaggtacatgtttggagttgagttggacttagcccaggttccagttagagctctccaaccaaaatgcaagacttttgggttgtacatttattttccaaaaagctatccaaaaatcagagtccaaaccagcagaaatatcatggttttgtaaccatttgtaagcactttttactaagtaaacaccagtcttttctttgctccaagtccatccatccttttgaacagttagaggcagaagaatgctgatgattaaattacgatctcggtcatcaaacatatcatctaaaatctccttgtcccactgatgtctatcgatacaaattaaggaagaaaccttataattcacaagcccaagatgagaggtacggacaaaaggatctgtggcatcaggaagccacgggtcctctaagatagaagtttcaaagcctttggcaatgcttttccttgcaccagcaagaataagttgtttggtttcaaagatgcttttccacacatagctaggattattccttaaagatgatgtcaagaaggaacctttaggaaaataccttgccttgaaaaccttgctaactagagtagtatcatttacaagtagtctccatgcctgcttaccaagaagagcaaggttatactctctcaaatctttaaagcctaaaccgccagtactcttgtgtttgcaaagctttttccaactcatccaagaaacccctctgctttgtttagatgatttccaccagtagctactcataacagactccaaagatttgcaagtgttcataggcaaaacaaacactgacatagcataattagggagagcttgagcaattgtttatagtaaaatctcttttccagcttttgataaaatctgcattcctagctttgaatctgtttgcataatttgtcttttaggaagccaaatattgccttcttgttcctgctgattatgctgggtagtcccaggtagagactagaatcatctgcttctaggatgcccattctatggcagatttgagtacgatcagctggtgtagtattaacacttaaaaatacagagtattttgagaagtttaccatctgaccagaggccatttcaaaatccttcaataaagttaacacctttgcagaatcattgtcattggctcgacaaaacacatagctatcatccgcaaataacatgtgagaaataaaaggagcaccattagcaactctaatgcctttgatttgatgggtgatctcacagtgtttaattagtgatgaaaaagcttcagcacaaattaaaaacaaataagaggacaaagggttaccttgtcgaatgcccctagatggagtaatagggccaatactcaatccattatgagtaaccatgtactcaaccgaagtaatacactgaagtatgagaaagatccatttagaatcgaaccccatcctaaacaaaatcgcttcaagaaaaggctattcaaccctgtcataagctttactaaagtcgagtttcaaagccataaatccttccttgcccctccttttgcattttagatagtacatgacttcatatgaaatcatgatattatctgtcatgaatctgcctggaacaaaggcgctttgcgtgtctgaaatcaaatgtgcaagcactatctttaaacgattagataagactttggagatgatcttgtataaaacattgcacaaagagatgggtcttagatcaaataatcaacttttaaaatatatgaaatttattttttatttaatattttaaagnnnnntttagaaaaacacttagttaatggtatatattcta

SEQ ID NO: 116326 - DNA, 3163 bp, Cannabis sativa
atctaagattctggtaaaataattccaacaagaagtctagtctagatttctgaatcaacattttggtgctttcattgagagccatagcttaagaaagctactaatcaagatggtttcaacacattctgcaagtgttgacaggtagactgcagccattggccaagaacctgggggcatgccgttaacaaagttggaagtgggactacttctgcaccctaggtgccaagagcatccctcagaaccagctcctcaactcgtcctttgaggctactaccaatagcgcttgggactagcatcaacagcaatatcccacctggggagccacatgtggagataggacaccttgaggagaccgatcctcatgtagcttagctcagccaaactgtggcagacttgcaacaacagctgcgagactctctcaatattcaacacaaatggtttcaatactggttcgtggaaaactagaagaatatcaaaagccaatgtatttatcaagcacagtggagagctaacccgaatcaacagattagagaggcttatcactctaatagcaaaattgctctccgtagaggtattttcgagttggtgagagagacaccccgtcaactagatggttacgaaggaacttgtgctcaaggtgaaacccttaatgcttggaacaccaccactactccggtaactgagcaagcactcgacaaacaccaggcatggagacctcccgaagggaatgtaccttcgacctagagcctgaacgaactcaagcttgagggtgccaacaaatgggtcatccacctgatgtttaatgacctcaaaacaatgatagaactaacatgaatcccccaccaagccatccacaacattctcaagaaactagacctcgagaccctacaaggggaaatggacctattgctcaacctgaaggaagtagtaggaatgttattagaaattaaaggctataaaatctgacagttaaggaccaatgagccgcttcatactttaaagtacttttgagatgaaagaggagagttgtgtcgttactttgcctgtggcccagacggttaacaatacaagtacttccctcgagtacatggagaggaatttatcttgtgtgaccatttcaattctctttgcagttgtgatcctactgaagactactttgagggaagtagccactacaatgccttgaatgaaaactctcacaacaggtttcctgagacaatcctgagttcattctggaggcctcgtcagagttgccttcacaacctcgtttttagaagaaaactacaaagacctagattgaccgaagtacaagatcgacctggaagacaaagagacatgtgtgacctcttgaacatgagaataacaatggacatggtaatttctagagagatctaggtaaaaaaagctccattttggatgcaaaccaccaatcgcggggtcaattaggtagaattcaacaccttagttgctttactgaagggggtcacgacacctaagttgtttgaattcgacctcgatagagaacgacacttaccactctccgaatgaatcaatgctcgacccattcctccaaagttcaggaatcctttttggcattaacacattgggaaagaagatccactatcacacatccactacttcaaacagcaaactgatttgcaaggtgtgagagacgacatcaattgtagaatcttccctacaatactgacaaacatagctcaacggtggtaccttaagctccccctggatcaatcttctcatggaaagatctagttgatgcttttagaaaccaatttgatccttcccaacaatgcaaaatcaagcccaatgctttggtggatgtcaatcaacaagaagatgagtccctcaaggactacatacaaaggttcttagaggtagcctctaagaccaaaagtcttagtgaggatgcaaggcttatggcactcgctgtcgggctcaaggagatgggtcctctatggtctgatctttgtcttaatcaccatgaatgacttcttagatagagtagatggctttattaaacttgaagaagctatcacccgagcaaaggtctcaaagggtggaaataagaagtcaccagacactgaagcccatgatactgaggcgtacgataatgggaggaagggaggtttgaatggagaaaaagagtcaatgatagttgcaagcaaggaaactcccccagaggaaagaagcctaagactagggacaagcccttaagagattatgatcctcgcttcaccacctactccattcttttggctctaagagaagagatatatacgaccactcagtcaacagtgccgtatcacaaaccttttcctttaaaagaatcagggaagaggtacatgaacaaattctaccattaccataacaattacgatcataacaccaatgagtgtaattaattgtgggatgagatagacttttcgtcaaacagaaacatgctgctcttcaatggtatgtacgacctgaagctctagttggagggaatgccctgctccagcctacgctagttgtagacatgttaaagattatgattagaggccctcacttagttaggaattgaaggaaggccttagaaaggtaagcaagatcacttcagcatgaaccaagagctaaagtcctagaggtagcataacgtcctcgaaagtcttaacactacgaatgtgaacctatcaattttgaagaattagacccttatcatgttacctaccctcagaataatcctttagttgttgaggttaaatatctaatatgatggtggccacggtaatgatcgacaacagagcatcattaaacatcctgttgaagaaagccctactgaggatgggtttaactttagaagacctggaacaatgcgaacaactcatggatggtttcactggagccaacattcctccatgtggcaaaatgaagaatccactcacagttggtactgtcctaaactagaccaccatcatgcccacgttcatagtggtggacatgaagtctctatataatatgattctcagaaggcctaccctataggccctttgagccatctccttagtggaacacttgtctgtcaagttcccaacgatgactagtattagttgtctcattagaaatcaaggaactgcctgcgagtgctacaatgcatcgttgt

SEQ ID NO: 116327 - DNA, 2154 bp, Cannabis sativa
  modified_base (1970)..(1977): a, c, t, g, unknown or other
atctcagttatttaattgttaaaatttttatttgatttgtttctaaaaatttcagtaaatatgtataatattactaataaaatatttatatgtagatgagtgaactatagatgtggaaaactacactgtgaaattaaaacaaacaatataaaaatttgaaaaacataacagactggagaaagaatttttattattatttttcaaatgagtatttttgtactcttcaaaaatgtaaaattaaaaatggatataaattttctttttactattctgttagaagaatctcctcttacaatcgaggatgtatctgcattatttatttttgaaaagaatatcaatagacattaattcattccaaaataaaaaaaaaaaatacttattaatatttagggttaaaatggcaatagatgtgtaggtgagaaagagacaaaagagagtgtgaaagttgtgggtagtgtaaggaaagtgtgtggtttaacatgttggagaattatagaccatttgcgtgttgactgtcaaaatcagtacccttttccctttcccattctccattaattaaatcattcattgattcattttttttttctctcttttgattttctcatcaagtcaagtttcttaagcgtgaatacagacttccactccactttccttcaaccagtgtacattaattacgtgttttgtgttcacatgaaatttgtctcatatttggctcatattttgttctcttcaatgaaattttcttctaaacatatactaagagcaacaacaataattttagtaggagaataatgttagatgaaattattgggaaagaaaaattagaagagggaaaagaaaatcaaaatgaattgataaataacaaattatgagaaaataaaagcgacacagaatgttttcaatttattgtctgtgtggaaattatactattgtatattatcagtgatacattatttcttgtgattagactatttccaaaagtaggtatttcttttaataagttcgtaattttcttcaaaaaaaaaaatatgctcattaattttatgataaaaacacaaaagatcaaaatgttaatctgatacttttgtgtgtaaatgttcatcaagctattgaaagccaaatagtgtaaaatatggtttttatatagtaatttagaaaaatatgggagtaactttccttttttcttttatggtttttatatttgaaagttgaatttttataaatttgtcaattataattcttactaaaaatgcagcataattatattttatttttacaaatttatataataataatccctgctcattaacttttaagaataaaaaatcataaataaaaagaaaaagttaaattactatatgaagtttaaaaaatatatttttttttataatttccccgaaaagaatgtgagcagacacacaatacaacatggaccacttgataatgtcatccacatagagaggcccacctgaaagctctgaagcagttaagcccaatatcataaattttctctcatagaaaaaaggttgagatgcatgatcttaattttaaaaactaaattaataaatgtcaacttttcaaaaaaattaagaaaatggcaataatataataaattaggtaataaaaattattaaaacatatttattataaattatttttttaaaatatatatataataattaaatgaagttgtataatttttttagtattgcatattattatattgtaacaaaaaaagaataaatatattagatcattaaatatatacaacagtatttaatatatcttaacactgaaaattaatatactatagtaataaaattatatacaacaaaaaaattacaacaatactaaattaatactcaaaaaataaatatatcatgctaacaaaattatatataccgctattaaaaatatgtatacatactaaaaaatttatatataataaataaaaactaaatatcatcttnnnnnnnngatatactatagacaacaaaaactatataccttacaaaatatatatgcctacaataaaaaataaaattaaattaaataatattattaaaaaaaattgtatataacatattaacaaaattatatagaaccataaaataattataccatacttaaaaaattatatatcacctttatata

SEQ ID NO: 116328 - DNA, 1079 bp, Cannabis sativa
ctgaaataataatctactacttgcacttgataacattaacttatcgagttgattaggtaaaacattaaaacaaattccaaatccaaagaagtgaaaactctggaattctccttctgccttttttacgtgatttgtctgactttcttatatgataccagcaagttggttaaagatttgtggcacaaaaatgttgtagtgtcatatataaacactgttttgaaaaatgtcaatattttatagattaaactgtgtggctagaattcaattgacagaagatttaaacaagtaggtaaactaattattaaccatttttttttgttcataaaacaagaaaaagtttgtattttcacttaaatactaggatcaaccaataatatgatacataacaaaaagatgaattaatataatatgaaaggtcttcttcatcatcttcatggttgaagataacatatatacgtttctcttttcaccaaaaccaacattgtgtccaatcaaaccaaagtggaggctctattcaataatcttgagcaaaccccttgtgaaaacaaaccaattacaatattattttcttgcttccatcagagtccatgtaattgctcataattaaatatatatgttatatggataaaaatatattcgctattaaatcatataaataaactttcccatttcaccctatttattttatggtgtattaaggacaagaaaagaatttccattgttagcaaatgagactatttaccataagaaggtaagaaagtgacaactcaacaaatatatatgcaacacaatctaatccatgctgaattattgggtaacattatgaccaaacttttcataattttttaataaacatacttaactaatagcattttgattaagagaatgatagctcaatagttaaatcccaaatacccactatggaaatgaatattaaaatatcttatatattactctacacctataaaatatattactatcaagtgaagaatttaagactagtagtagctaatgctgtcaaaagctgatttataagagagctaacataataattaattaattaattaatataaatatat

SEQ ID NO: 116329 - DNA, 1960 bp, Cannabis sativa
  modified_base (1502)..(1505): a, c, t, g, unknown or other
tcacaattggatatccaatgtttggcggtcggttgtaattggatcggtcggttgtcattggatttgatcgatttatgcacactcctactctaatccaacggttggggagttgaagaggtagcatttagtgttcaacccaaacacttaatgttcatcattttatagctcaagtaatgcactcattaaaagaagagtcatctcaatcaaccagctgtcattataactcctctcaagaaatgcgcccccacgcgtgcgtaatgctaacaattgcatttaagatactgcccacatgctatgtaaataatgcctacggttagtgacccattaactgacgaaaactcttagaatatgaagcgatctcagactgccccacgtgccaggagtttatcacgaaaaagctaagaagggctgcaagctctaggactgcgttgcgtcctaaaagcttggaggtgaatgttatctatattttatgcaatatatgacacgtggcatttaatggaaaaggctcaattaatcctccatgaattagagtccttcaaagatgccgagttgttaaaaggtctccatgagtcaaaaatcatctagggcagaaaaatacgaaagcatacttgcggcaacatttgcttcttgagtgcggggtaagaaatgtccctctcgaacccgagagggtctggcagggaggttcgtttcaaatagaacctcaaatatgcactagaataacctaaggcagatatcgagcttcataggtgttcgtggatgttgactattctcatatgccaagtcaccaaaagtgacggttatgcttttcttgatataatatgatcttgtctcctacatctaagcgtgacagtgcgcacactaccaccatcctattaccagacggacattacagaattttgcttggaaaggaataagctttgagtgacatgtgtccgttacttttaaaggttcaacctttgcgtgatacgttctaagtgatacaaaatggtcccgattatccaactgcagtacgtacaggcataatgctacccacgggaccaacttgtcagctctacattgctagtaatttaccctaatagtgaaatttaagcaaaaatcctaggcaagtcatgagacgatccatacccaccgcttaggctataaataccccttcactttcatgcaatggggtcaagctaaaaacacatggccaagactctgctaaaattatccttgatcttcttcatctttgaaaagatactaagggtagagaatcagggtttcctgcaaaaatattgtaaattcttcaatattgcccttagaggctaatagtctgactcgtggactaaggttcattacctgaaaaaacgtaaaaaatcttcctctcttagcttctgtagtttactatttctttagctcttaaatattttagttttttaaaatatcggtaaatagtggtataaatacgtaactttaacttttggttgtaaataaatacccaagtttaatttttggcggtaatnnnncttaagttataattttgaaacttcgtaggtatattcacatgttattttcttattggtgtaataaaactaatttttttttaaaaaaataaaaatttaatgacattgaccaattaaggattgtcacgtggcaaattgcttaacacttaacagtcaggtacctagagaagttccaaaattataacttaggtattactaccataccaccaccgtcgcaccaaccaccatcatcattactgcgactccacccagaccccaatctcctattttctcgtttagatctcatttattaaaaattaaaatttcaggcaaaaaagaaaaagaaaaaattgagcttcatataccaaatgttaccaaaaattgagagctccaaaccccacttttcctctcaatttactctccatcgttggcgaaaggagcttcaaaatccatccacctagagagagagagagagagag

SEQ ID NO: 116330 - DNA, 1775 bp, Cannabis sativa
aacattgggtacttatgccactaaaaataaacattgaatttatgccgtttacaaacataaaactttgaatacttatgccgctattcaccctacattttacaaaaagttttgaggagcttctaacccgaaattttgatgtttctatgcaactacccaaactaaagtgattaacataaaaacaataagaaggagggagattatgatggatgaagagtaaaatggagggagatttttggaaggatggagaggtagggttatggttggtgttggaaaaattagatgcgagtcgatggagaggtagggttagggttggtgttggtgttggaaaagttagatgtgagtcagacacgatttgatatgaaataaaaatgggtgaaacatgatacgaacgcgcttaacacaaatttaatagttttttttaaataaaataaaataaaaattacttttttatctaaataaaataaaaattattaataataataaactatgtaaatatatatacatttagtgatacaatataaaagtgaatcaaataaaatatgatacgaatacgatacaatgacacgttttgtcataagattatattaactttatttagtattaggtataaagttagaagaatgtaaagagagttagttattaaaattatgcatcatttttagtattaaatatttgttattttgtaaaggataattttaatattttgtatcttcactttaattttttataaaatacttccaaaggtgaagggcatagatttgaaggaggtcttcctactaaataatggatttcacctccattttttactctctccctccacctgctccatccacccatctctcctacttactaaaaatagtacaaaaccaacactattctacaatttaagcaacacccatctctcctattctacaatttaagcaaaaaataaatactattctcattaatttttttttgttttatgagaaaatattattctcactctcatttttattttatttcacatcctaacacagaagattaactattttgctttttgatttgatatgataatgacacaattttcatgttgaacaaattcaaagtcctattctatagtatgtgacttcaatcaaaactaaacaatacccaaacaggagagagaaagaaaaaaaagtaagagagagagagagagataattagacaaaagaggatgaacattagatctgacctaaaatccttcttaaacgctcttttttctgtcaattattgaatttgacactgcccaatgcttcactttgcacgcgcactccacccttttttctctttctctattttgacccttatacataccactattctaactaactttccgagggtaaatttgtaattttcacccttattgctgcgctatttgtctctaacaccaatatagaaatgctatctctttcccactcacactcttttatgcgtgactttcacgctcctccattagccacactctacctagctaagctaaccatataattaaatggaaattacttgctaccaaattattccaggatttaaattattatgcactcgtttcgaacgttctattaagtcgtattgtattgtattcagggccggccctgaaaatatatgagcccgagacgaattaaaatttgaggccctcaaaattatattagaaaaaatatgaaaagatgagtgttatgggatttgaacccatgaccttagacattatgtcattcacctcaaccaactaagctatgaatatttgttgcttataatacact

SEQ ID NO: 116331 - DNA, 1567 bp, Cannabis sativa
  modified_base (34)..(35): a, c, t, g, unknown or other
  modified_base (1510)..(1534): a, c, t, g, unknown or other
ataattaatcataaacaactgctaatttccaaannaactaagcgggctttacagtccgtttcacgggaacgtgcctacacacctcatccccgagcctcgacagtctactgacctatggcatccacatgaagcatagggcaccgtaaaggctagggttgttcactaagtatctgatcggatccaatacacacaatccaatctaatccaatctgcaaaatacagatattcacacttgtgcgaattggattggattgaaaaatctaaaatccgcacttgtgcggattggatgttatttgacctcaaaaagtaaccgatctaatccgcacttaattatatatatttaaaaaattataatatataatatacattaattttctagtaatattaaaaaaagacacaaacctctcatttctaaaccttctaaatcctttttagtaatatattgagttgatacattttatctattttatgatagaagacatagagaaaaattattcttattcacatagacacttatacataaattatttgatttagtaatagatacatatgtatattagtataactctaaatatatattgtaatgattgctctgttttttcatatgagattagcacatatatattaacatatatgcatattggtttgatttgtatgtaaatagaaatggaaagagattattgttggagattaagaaacaatagtctttttttttaaatgttaaattatttatcattacaaaaagtatactgatccaattcgcactattgtgaattggattggattggatataaatatgcgtatcagattggatcccaaatatgaaatctgcacttggtgtagattgactgttgtttgaccaaaaaagtgaagattggatcaaatgaacaaccctagtagagaacctcattgaaaaaattcctcaagaacctcttacctgagaaaatttgaaagagcctaaccattggtccaccttagtcatacttctaacgaatgaggtatacctacatcattccccttcgtcttcacatcgcaaaaaactttctccaataggatacaacattcaaagaaattcaaaggagataaaagatcatagaatgggagcaaaaagtcgagtcgtagaagaccatcatctatatccgtcttccatggctccaagagacctcacgatggagagacagacctcaaacaccagttgaggtgcttccaattagatgagaaaagggcacaagaccactagcaaggccaaagaccaacataatgttgtgacactcaaggaagacactcagaaaataatgaaatagtattacttgatgaaaacttcctatcaataattcctcaagtcatatgccctgaccattgcaagctcagacacatgatattactgcaatacccaaaactttgaatgccgagcccccaagtaaatttaccattctaatggtaactaagaaagaggtcacctcgatgacctctatgttgggttttgtgccctaaataaaatctatttcannnnnnnnnnnnnnnnnnnnnnnnnaagatcagaaataacattttatattgcatggtt

SEQ ID NO: 116332 - DNA, 2007 bp, Cannabis sativa
aaaatgggtatagagtgtaatttcctctataatatatgatatgtaaatcatctctaaatatacatatatatttttatgaaaaaatttttatcgaacttctccataatgaagagagcaacatcagcactactaccattacatttgatctgtttcgaaccatgtgcatgttttcaaccaagtggtggtccaacttctctctccttttttttcgatcaactttttttttaatataaagtgtaaggatcatcggacaacatctatttttctattggtatgatattaatcgatttgcgcctaaacccccacagatttatttttagatatcttcccaaaaggcctcattagtgtccatccttatatacccaagatccttctaatttctagtcaatgtgagactttggttgtacacccaataatctttccctcaaacaaatgactaccttgcctctccttagacgattacagatctaaacttgaatccttcgattccaacactcaagatccccttgagtaagctagatgaatcccttcatcagctagattcgaaatcttttcaaatacctgtatcactcgattccaacactcaagatccacttgagtaagctagatgaatcccttcaccagcaagattcgaaatccctttgaatcagatttgaacctttgacggattggcagcaagcttcacctttcttcgtctggcaatttgaggatacattcacatggcaaattttgggatttggctctgataccacttgtaagcaccgtcaaacaccatttatttctctattggtatgatattatttgatttgggcctaagcccctacgaatttgtttttgggcacttttccaaaatgtctcattctaatagagatagtgtctatctttatatacctaagatcctttctatttctagttaatgttagactttgattgtacacccaacataaaagaattacttaatactgatttttttctcacactttcggtcttagataattttgaaaatcacgtgcactacaaagaaacaaccaaaaattatcatccaaataaaaatgacaccactgcaacaaccaagaaaggttacaataaaattcaaactcttaacccgaacaaaaaaaaaataccaaccaaaacatcctcactactttgccacataacacatgataaatgaaataaagtgatcaagttgataaaaatgggcagcaagtagtgagtttgtgtacatattagagaaacatagaaagaagaatgaaagtaaaattggtttaaagcatcactataggaaattaggaataggagtcccactctcactcttaccaactatttttgacagatgtatattggtatttttgcaattatggctatgacccaccaaccatcaatacaaattctcaacaaagcaaactagatatttttaatatttatgtatatttttctatttcattaaattatgaattaaaatgtgaatgaaaatagaataaaaaaaaaaagagaaattaaaatagattattaagcagtgttatcacactaatatctgtgagatcttataaatagttagtgatattttataatagttatgaattgtactaataacaatataatattttagattgtattaaataccacacaaacaaatacacatgcatgcttaatgcttatgggattgtagcctctaatgaaaagaaagatataattaaaaaaatatatttttttagtttcataattataccctaaaattataaataagttctcacaattataatttttatttaaagtagacaaaaaaattataataatgaaatcttttcaatgcgaaaatttctgttacttgacaccactactagtattttttagcatgtttttatattattatatttcatacaaaattttataaatattatgtaatgaaattagtgttaatatatatacacaaactatgtttcattcttatgtgttatgcatgtaagtatgtatctatacagggccggccctgggcataggcgggct

SEQ ID NO: 116333 - DNA, 1987 bp, Cannabis sativa
  modified_base (36)..(63): a, c, t, g, unknown or other
  modified_base (844)..(844): a, c, t, g, unknown or other
taaaaatattttataaaatacaattcaatataatannnnnnnnnnnnnnnnnnnnnnnnnnnncgttccaaacgagccctaatagaattggttattaattaattagtaataaatttatatattatctctcattaaatattaaaagtttttcaataatattgattggtttgtttgtttcactctcttgtaaaaaaattatatcgactttaatttaatttagaaggcttgtgttagctactttacctctagttagaacatatataaataaaatcaacaaaataaatataattcagttattaaaaatataataatttttttttttttgaaaagattaaaaatatagtaatattagtgacaaaaaaaattaaaatttttagtttattacacttcaagaaaaaattaatatttttttggctaaaataattttcgttacaatttttgacatttttaagtacttttaacattaattatcacacgttgtcgcatggcatcaattcaaaacttagttaaatctttatgaaataaaatattatttttttacattttttttaagcttacatttacctaccttagtcatgtaaagggtatttttgtaagaaaaaaaaaacaaaacctaaaattagtcattaaaaaatagtacaaagagaacatgaaaaagacagctttataattaccaattttatatataaaatatgtgatatttttggcacagatttttgtgttaaatatttttgacattattattttggtttaattatacatatgataaatttacttagtatattaatttttgttatttttttataaaaatactgtcagacggtattttttactgtattttttnataagtttcatactgcagtatattgtgttaagttttcaatgttgttctactagtattttttagttgttctacaatatttttgaaaagatttccgtataacagtatttttgtaaaagttaacctaaattttagtatttttataaatttctcatatatagcacaatgtaacaatttatggatctcttcatatgcaatattaaatagtaacgacaaatacgatatttattttctctatatatttatactataaaaatatacattgagattattatttttatttatatatatgcataaatcttctgttgaagggagttatcatgatctaaattaattaatatcacacaactacccatttgaattaacttattagtaagagttatttgaatattattttctataaatataatattttataggagaaatatattaattgtgatttgataattatatataatatggacatatatgtatacatatattatattaatttggtagttattagatcattttcatagctttgatatacacgatatatgtataagaaccaagcatataagacatatatattgactttgttaaaagaaattaatgatgtaattaaacgacatataaatatattatacaaaattaataatggattttatttggaaaattattactaaatgttatgtaaatatatacccattttttttgaataaaaatatatacccatttaattaaaattgcatcttgtattttttaatatatataaaaaatgtatataatgctgacaaaaggaataaattaatataatattcaagggagtagataataaattagtaatatatttatattataaatttataattatgtatatgaagcaagatttgaacagcctaactaaataaaatgtacatatatataatttacagatctatatcatactcacttaattaattattatttaattatgggagagattcaaatagggaatgaaatgaagtgaaaaaaattgtaggttaagtaaataattaattaaaaagaatacctaacgatttaaactaactaggtcaaccatatgcatatctattctatataaagtgtgcctatataaccgaattcttggtttatgagaaatttgtgggagactttttatttatatta

SEQ ID NO: 116334 - DNA, 1932 bp, Cannabis sativa
  modified_base (1077)..(1078): a, c, t, g, unknown or other
aaagaaagaaaggaaaaaaaaattattttttcatttataatttttttaaataatttatttacgtgggacaataatattgtgtcacgtgtacattatgtcgacatggacaatccgccatggcagttaacaattaattttggacggaagtgttaaattgctaacagaactcgagtattgggggttttaccgcccaaatttagagtttaggggttaaatgaaaccaaaatgaaagttttgaaaattttgtcgccatttaccctaaaagttaatatcaacattaaatactcattgaaaatatacaaacaattaattttatttatattattttaataaattataatataaaaacacttttcattaatgaatagtattaatgaatggaaattaagtaattaaaaatgtgtgatttattggctaaaatttggcataatttttagattgtgtctaatttggcacgcattttagatcaccactggcgttaacttttagcaaagtattctaaaaaatagctatacaccacatatatagctcatctctaatttgggcaatctttaaaattgctataaaaatccacatcatctcaaaatataatattttattttatctctcatccacgtcatttttaactactttactactaaaaatgttccaatactaagcaattttaaaatttaccaccatggtcccacacactattatttaatattaacttatatttttactattagtttatttcaaatgttatattttattattattattattgttgaaaaaacacgttgctcctgtccaaccacccaagctgccattaaatttatcttcaatacataaactactttagagagtagctcaccacctgaaacagccttgccaagctactttgattagcttgcattggagctactctaactggggctaatgaggttataaaataatattttataaagagaagacatgaaagaatgcccactattaactgatttttttttatgtatgtatataatttttcttttttttaaaaaaaaaaattagttaatttgaataaaaaaagtaatgggtttttttatttttacactnnaaaataatttttttttttgtatttttacggaattctatacagaaacccctattgcaactagcgctgcaacctaaatcgcaacaaaaaatcgtatagaaacccctattacaactagcgctgcaaccactttagaaacccaaactgtaaatttgaaacaaaaagttaaaaaaaaaaccgtacaaagggtaatttcccaaaaagtaatttgtaggttctatcaagtacaaaatttgggtgtataacactctgatattttgagacgttacactcgatagtcattataaaatcatttatgataaatataataaattcatttattaaacataaacaaagcatgagatctaattattttaaaaacaaaatatttaatttatttataatctttaatacataaaattttacaaaactaacgtgtcataatctttaataaaatatttaaaacaaaacactgcgactatctcctaacatgtaattcacgcatcgtgctatcaccaatttcactatttagttttacatttatatgcacacagagtacccaataactaacacccagtaaaaagagctatgttagacataaccctcctaactaaataacataacaatgaacatcatataaccatatcataatatgaattcaatacctactatactcacatatatcaacatcacaaattgaacttatcctcacatacaataaaacatcataccacaatataactcaatgcatgctatgctcatacacatataatacaatatcttatcacacattgtcctcacatacgataatctactcccactcatgttgatcagacatgaagtgtaacttgccctgccttgtgttgttctcacactcg

SEQ ID NO: 116335 - DNA, 1693 bp, Cannabis sativa
  modified_base (1281)..(1296): a, c, t, g, unknown or other
  modified_base (1350)..(1350): a, c, t, g, unknown or other
ttcaaaaagttatataagaatttagaattttcctatgtacataaatatattagatagtttaatttaaggattgattatatatctttttgccggcaaagactatatttatactcttcataaagtcaacgaagtattgttctaagggaatctagtttaatttgacaaattcaatgaaatcgaaattgatatttaatcttagctcaaataatagataaaagttttatattttgactattttctcttaagcttaatgattaatgtatatatcaaaatgatttacaatattatttctatggtttcgtgttgaaattaagattttaaactaagccaaacccttgtacgttgtgcttataattattatttatgatctctataataataattatcataactagctaattttttttttaaatgatactattagtacgtataatatgtgtgtttgcatgtatataatgacaacttaataatatccaattgcaaattgcgatcttaataataatttgctaaggattttcaattatattgagtagtctagtactcttttttttttaaaagcatagtagtctagtacttgccaacgcttaaacatatatatacatgcatacatatattcaaattataatttttattccacttgataataaaaatacaacacttgttaaaaaaaattaattaggtggtgggagtagtagtaacttggtcaaagtataattaatatccctatattacctatatttaacacaagaggaaggtattagaactgtcattcattagaaattagttaacttaaagtatatatatactattgggtattaactaatttatgggaagcttaattcttagttcggacattgtttttatttggggattattttataaataagaaaaaaaatataaagaaaatttgcattttttaaagatctacaattttattattattttttttttctacttatcatatttttatttctctaattatcatatttttccacttaaatttatcattgccaaattataccttccttaataaaagggagcacaattttgactcaatgtactgaaagttcagagtcaaaatgacatattatcagcaaaattactatttaccataaatctaacaaaatctagtaaaaatctcatattttactaacatttaaagttgtggaggaatattttacattactaataattcaaggagtatgatcttattagtaacaatgttcactacaagaagtttacttttagtcacaataaattttgtgactaaaagtaaaaaannnnnnnnnnnnnnnnaattattattcctatgttgtgactgaaaggtctgtgactaaaagtattagtcanaaaaattacaatttattgtgaataaatgtgtttttagtcacaataagtattgtgactaaaactaaattagtgacaacttgtagctaaatattatattttagtcacaagtaagtttttgttgtaactaaaagatttagtcacaaaaaaattatgttgtgactaaaaaattgtcatatgagtaacagttttttgtagtggttcaagggccaaatacctatttataattcaaataaaatagagatatttacatatagacacgctttttgtcttttattattaactataacctaatctatctcaataacaaatttaacgtttcttttataccgttttaaaactattg

SEQ ID NO: 116336 - DNA, 1602 bp, Cannabis sativa
taaattaattttttaaatgttaagtgtaaaataaaagtaattaaaaaaaaaaaaaatagaaaagtctattttgctaatttcaatttgtcaaaagttcattttgacaaattttacccgtcaagacaactaaaactaaacctaaaaaaatttcacttcttctcagtcgacggtcgactcccaccgcgcccttccgaccaatctatcttctcagtcgacggtcgactcccaaccacacccttccgaccagtccgtcctctcagtcgacggtcgactctcacccacgcccttgctgccctctctaaccagtccgtctcctcagccaacgacgatccatttaactcgtctcttcagtcgacggccatctcttcagtcgacaatcatcttttcagtcgaaggtcagatgtgaaatatctgttgtgaaataaatgaatagtctctgctttgaatcaataccattaaaactatggttttcttttctgataactatctgcatctttaaaaatctcaatagaatttgcattgaaatttttttacttcttttctttttgctacttcttacaattttttattgttggcagaaactgaagtcagattttagatccatgggactagtctcttttcaagttaatagctaaataacaaatattatatttatatatcatgtttagttgaatttttatatatttatataatcatgatatatatatggtcatgtttattaggatttttttgtatgtatacgcatatatatacacgcactgtttgtgggtttatctattgcgatatatatattttagtttctgcaattatttatgggttctgcttccgtattcaagaattaaaattgttaagtggaaagtctcgaagaatgtaacatcgtttataaattatacttgtttgtattaatatcataattgagtataattgagtctaatgtcatgatattttttacatatatatatatatatatataaatcttgaaggatcttgctgaaattaaactgatagagtgaaaatgaatccttaggaacaagaacatgagataacatttaaacactattatattattatacttttataaagttgataataattagtaaaattatttgactaatcatttatttattttttcttgttaggaatctggagctttgggtttggaacatgttatacgtatttaacatgttctcactgtttgctttttttatagtgttgctgttgtggtggttgttttaatttctatagtgctctcacggatttaacatgttttggttattttttttctcaagatttggaagatggaacatggtttttttttcttagtgttgctggttgttgaatttggagagggaatacatggttatttttttaatagtgttgcactgttgcggaatatggttgtgtttttttttttttactgttatgacttatgaaagtctaatgcgttgttgaagattgagaaaaagttatttgtttgttaaattttagttgtgttactgttagttttttcttttctcattttaaatttttaataaaatattaaaatgcaatccgcactaaaacaaccgatccaatccgcactattgcgaattggattggatt

SEQ ID NO: 116337 - DNA, 1050 bp, Cannabis sativa
attagcttcattgttgatgagatcctactctttggcagctttgtcaatgcaaacctctttagctattaataaagcttcaatttttgcaacactataggcatccgtcttgatattaacagaggtgataaatacattatactcaattgccaaaccattaaagatagcctttatgtgatcttaagcagaggtggggtggccaattgaagcaaatgtatcaattaagattttaatcttgaggaggtagtcactgagagcaaggtttttttactagctgatgttggcacgattcaatgtagtgtagtactctctcagattagtttagatctatacagcactgtcacaaccaaacatgcgagtaaggattctttcaaacatggaagaaagtaaccaagatacaatgatgttgtcctgttgctccattgatgggcaaagacgagtcctccatggcttgaacgatgaagctctaataccatgtaaggacttttgatccaagaagaacgaaagaaagtaattatgtcttattattgaaatgaatgagaattacatgtatttatataatgatacattaagctaatcaaaaattaaaccagaacaagtaacatactcctaactacccaaaaccagttaactaacttgacaactcagctatcttagcttcactaacacataaccacttctctaaaatagaaaagctttaaaatatttaaagaaccgtactaaaaatacactacagcagatgctttaaactatttcttcattttaaaatttctttaaaatgtactatttaattatgctctacatttatagaatactattcattgctctaagcacattttattaattattttagcaagaaaatacgtgttgatattaaaatgatatatttgaagtgaataaaatatattaaaaattttaaaaagtagggctttgttgatatattttaaagaagttgatatatgtagtagggctgaacatcaggcgagtttaccgagtattgggttggtgggttttgggttcaaaaaaataaaaccaaacccggacccgaatagg

SEQ ID NO: 116338 - DNA, 1271 bp, Cannabis sativa
  modified_base (103)..(116): a, c, t, g, unknown or other
atatttatttataaataaatttaaaattgaattaaattaaattttatatatttgaaaaaaaaaataattgaattgacttattagatttaattttattattatnnnnnnnnnnnnnntttaaattaataattaaataatagtaactctaataattctaagcaaacatatattgcatgttactaatatctaatatatatcaatcaatcaatatatacatataagaagtataaaatgatgacatgtcaatctaaaattcttctaaaaataatttaaaaatctatactttttaaaactattaattaattaataataataaaacgagtactaataagacaaccttatttcaagctgaaaagggaggtaaatttcatgctaaacatttctataactcgcttattgaagctcaagatgtgaagtacaatagaattatttggaataagcttattattccaaaacataaattcatattttggcatgtttgcaatcaacagctccttactcgagatcgtttatacaaattcatgagcctcccctctgatctttgcctggtgtgcgattctgatatagaaacgcataattacctcttcattgattgtgtttactctaagaaagcctgtgctgaaattggcagatggctggaaaatgtgatgtggctgaaggatatctttaacgtcgagcaatggtgcttacagggtcctcttgacttccaaaataatatagacaccatcattgtacttaatttagaaggaaatgatattgattgctgagggacttactattaaacaccaggtgacttttgtgtttgagtcctagactctaatatttgctctatgcagtaagtctatgtggtattaggagatggcttcaccttattttggtcacggactgtaagcaactggtggatggcacccacaacagataaacaccttactgagagtacaaatttatatttatgaatttgcttaacctcgttgattatgtggattttagtattgtctggctgccgagagccaagattgagcaactcataatcttgttgcttggattgtttctttaaatcggattggtttcttatttattagggaggtagaaccatttgtttctactagtttatagtgttttatgtttaataaaatcttacgttcaaaataaataaaattcatgctgtggttatgcacttttaattttcaaccaaacttctttatctagtaaatattagaatattttatatatggaagttattttctaattaaggaaatgattttctattt

SEQ ID NO: 116339 - DNA, 2759 bp, Cannabis sativa
  modified_base (2116)..(2123): a, c, t, g, unknown or other
atctcaatagttcggggggaatttctaacgaccaaaaaagttcagggggcacgatttagtacatgccaaagtttggggggaaaaattactaattagcctaatttaaaaatatcaatgcaattaatactttgtaggctatttaattataaatttttaaattgataaataaaatataatattgtatatttttaataactttttcaaaaaaaaattgatttatttttcaaaaaaaaaaacaagcctacaacaaaagctcattaattttgttttttgtaatgattatataatacttattatattctaggatttaattgtgaacctaagaatttcacattcgtttaccattttttatctaagcttgaaactcacccaaaatttaaaattttatttcaataattaaaagttaaattaataaagatttattcttatattctttttttattattatttctattccattctttactcatttgagattcaatgtttggcatttaggagagatcaactaaggggctttaagaaaatctcaaatattaaagttttttctaacctattgggatcatttgatttttttttttttttttttgttacttatgttttgtggagcagagaattattttgcctatcattttttaaaaaaatttccttttgtttcttgtctaaaggtttattttggtttgggtgaaaaagagaaattaagtttgataccatcttttttcctatttgttgaattttataatttttatgtgaacattttttagattttactaacaggaaaacttctcttacagaatcacacaatatagaatcaatgagatgtgagatactagtacgtaggaattctaaaaccatatctacacaaaaaaaaaagttgaaaaatcgtctcaacatatatactattacataccatttttttgaatggaaacgaccgaaacaaaatacaacaaaaatgggtaggggtcattgctattccaatgccaagtgttatctagcccaatagccatttgatctaagttatgtgcggctgtattctcttgtcgcggaatgtgttgaagagaaacagtggggagtgaagataacacctctcgtatagagctcacaattgctccatattcagtaaactagtatcacttgcttggatgttcaaaatgaggtttaagtagtttgattctatctggtaaatttcaatgttgctctctcgacgccagcgcagtgcctgtaataatgttcaaccttcagctatttttttgggcatcttcctgtgatggttcttagccatagcagccatgacttgtcctaaagagttttgaaccaaagcgccaacacctgattttctttccctggttgaaacagcacagtctacattaagcttttgtttccccgtctctggaggtagccaaagccactccttgctttggtttagactatgaggaggaagatgagttctttaatgttgttgagcctgctggtaaaaggccaaaaaatcctctacttcctaacatatcttggagggttgtttctattgattcctgaacacaaaagaattcctattgttccaagtcttccaaagaatgcacagaaaatggttaaaagtatcacttggaaagtggtatttaatgtataacaatatatcaatgatgtttttttctctcaaaatactaagagtgtgcttaaaaatcgtacctgaccacaccctcttaacacacttatagtcaaaagaaaagcatgctgaataaactcaggatacaggtcacaacgaggacaattgggggagggataactatttctacgatgtaggttaacagcagtgggaatggtgtcataacagaggcgatagataaagtgcttaactttggagggaatgttctgcatccaaaaggacttccaccaagtattgaggagattagtgtttgaagcagaaggcctggaaacattagctatggatttggctagaaagtaccctgttttgacagtgtagtggctagaattggtatgctgccagaaaagagtatcaaggtaattaatgtcaggagggggaggagacaggatatcatgaacaatatcattaggaaagtggttgttaaaaagggtaatgtgttagaaattattttaccannnnnnnnatttactaacatgtatgtttgattgttaactataatctaacaccctaaatatgaattcctaataaaataatgaaaataaacacatataaagtttagtgaaccttacattgattatagtagaataatatatcttcttccgcttagatctcaaatccttgttcctttcggtcgtagagtaataacaagatttgagcctggatctccttcgggtgttggatttttcacaatcttccaactatgattgagtacttgacttgatatgagtgggcatggtactctatcactacaggcttcatcaattgatgaagaacaagaatacgaatataaatatacaaaggaaggagactctcatttactagttgtctcataaagaatgaaaactaggctattttttataaatggatgagaatatcttattccttttatagtatttcaactagggtttagtttagaattaaatagaattaaaaaaagataaaataataaatttgttggacttaagtggttgcccatgtcatgggcctcactagttataattttgtcattaatttaactcatttttcttttcacaaatgccatattttaattctagctctataaatatcgaaattatttatttaataattataatcaatt

SEQ ID NO: 116340 - DNA, 702 bp, Cannabis sativa
aacttcttccagcactaaacacaaggctaaggaagttgttcagaactatcttggaagttgtcttcctgctatcggtgattagctttgtaagttggacaacgattccttggactacctaacatttgtgaaactatttctccgcagcctttagtgacttacttttttttttctttatttcagatcttcctaaaacttggctatgcccatgctccagctaaaggcacaactctatctttcatgcagaaaattgtagagaatgattctatggttatggaaaaagactctcaactgaaggagaaagatacctagatcaaggagaaggagaagcagctaaatagggtcaacaaggagctttctcacacgaaatagaaaactgagggtctgaaagaaaagatccttgatatgccatccacatctgagctggagaagagtttggaggagactgaggagaaagtgagagagcttgcaaggcagaagaaagctttgggtcgattgatgactactaggaagatgaaatcgaagagctcaaaaaggagctagatgagatagaaaattcttgcaaggagaaataaaaggtgttggacattgccttgtagggtcatgatgacatcatagccgagtatcatgatgtagctatggagatgttcttgttgggttttatgccctaaataaaactccttacaatctgattagtaatcaata

SEQ ID NO: 116341 - DNA, 3169 bp, Cannabis sativa
  modified_base (28)..(32): a, c, t, g, unknown or other
ttaattaatcacgttttccataaacctnnnnnattagcaacgagctgtacagtatgtttaaaaatcacgtaatacgcatatgctagttagggcgttacaaaaacagttcatttagtcgagtgttatcgattgattctgtctcacttccttcaaaatccccctctttcttgaaatcgtgatcaggtacctcaaagtcctcgcccatttattcaacttcggttttaagggcatgtctcgagtgaataagataatcctgaggttacaccggagactcactgtcgtgtatttcaaccgttactggtttagcaagttcttgaaccatcctatccatctcatcaatagatagcgagccctgaaaaattctggcagtaggggcttcgtcctaaaatatcgaggtggggatgaagctatcgcttctttctatctcatcagtgaaggcacctcctctagaatcgagtctctggctatccgataagtcgctcatctaaaagatagaagatcttttcagtatggtgaaagtgcaaatttaaacaaagtgccctcacctgtataaagttcagaacacaggaaaaataaaagagctgacctaacatctcaagaaatggctgggcgtatcgcagtaacataagggtcatgtcgctacatgaatattaagttactgcgatgcacccaccatttagtcacttctagcaataagtaaatcgcaaagttaaaactaactatgtgcctcaagaaatggctggggtgtcctagtatcctaaggggcatgcgcttatcgcatgaacgttgagttaataggacacacccaccatttcgaagaacctagttagtcccaataagtgactacaaagcaagaaaaatgaagactaactgcatgtctcaaatggccgggtgtatcatagtgacccaaggagcacacagagattgcatgagcattaagttactgtgacacacccaccatttcaaagactcagatagttttcataacaaaagtacaaacgccctaaaagcttaaaaaaccctaagaattagtaaattctagccaaagagggttaaaaggcttgataattggtctggtaaagttatttctgggtatttgaatattcaaaaaaattctcgaacacttgaaatactcattaaaaacttacgagtactcaaaaattcatcaggaaatctgcgaacactcaaagtgttcttactgaaactcgtgattactcaagctttaggtatatatttccaagaaaaatagggtgttttatcaaaagacaaataaccaatccaattatctcatgtattttctacccctaaaagcacagagtgcatacatattctcaaagaaagaaaaatagttacataaatggtaatccactaaccttgaaatgcagtctttctttggatgattctatgggtatcaagaacttcaaaatccttttctgatgaagaaatttcagaaaaatgcaaagagatttttaaaggttcaatgtttggagaagagaagaaggggaaaatgaaaatgagagagaaatgaatgaagaatcatttcgcatcagaaagtttaaatactgatatccctcatttattaggatgaagacacgtggcaaaggaatgcctaaggtctctcaatccaaaggttaccaataatcacgcctgcacaaaccctgaagagttttgataatgtgacacctcaatggattaaaagtaatcctaatcctttgaccagacaagcaaaagtcaccacctcgtgacaacctctcgcctgcctctctctcatagtttcccccatgacatagctgtcaatcgtgaaactaggagcatgtgttatagtatgaatttttcacctaaaaactcgagaccaagctcccataaagatgacacgtggactcacattccttgaggggtactgagctgtcagaaggagactacttgagtataaaccttgcctcaaccagactcagcgagatgatgtgaccgtgacagagtctagtcacattagtacgcctcgcacgatgcaggaccaagaaggccaggtttaagattcgcacataccacgatttaataccacgatatatgcgatgaccataaaagtcttcctgtgaattagtaaagatcgattctttactcagtgagctagtctggatgaccaaaagcactcgataacccgataaggactcgcacatcctaagttatcgacttttccaagatatccatatatgcgactcagataggacgcagatatcttaacacatagactcaactagtcttgtatgcatcttaggcccacaagcttatgtgaggatatgaacagacaccactatggtcgcatacgttgctatagttagtgaattgaatcgaaactattcttcatttattacatttacatttttattgatttaatgttgatattcattgtaaaaataatttgataattaattaagttttgtataatcaaaggacactttctttttatatagaggagtgatccaatatgaaatggacaagacagaaagccttgcaacagttgactaagaagaccatgatctgactgaaccactacccttttgttatttatattttccagtacgtttgagtgcccattctttaaatactttccattctaggtggactgctcgcatattttcatatataattttatttcaatatttgattttgtgttctcaaaattcctccaacaacaaccaggatggtcaactgtactgaggtagtaaggagatcgaacatcctcgtaagttagtctgtctactggattggaacgatgaacaacaggtggaggaacaacagttgttcaagaaggattttcagcgaaatttgttgatggtggaagagccatgtgagcttcgactctggaaggatcatcaaaggttgtagctaaactcgtggcccgtgtgcgcaccatgatcatagagaaaagaaggagaatcttaaagctacaatttaaattctcggagcttcaattgtgtcttctgataccatattagaaaaagaacattaatacttgactgatctaaaaagaaagttgtatctaattgtgttaatggtacaaagagaagttttacatatacatgttgggttttgtgccctaaatgaaacctatttcaatataatcagatttactaattaataaaggttagaaatcattttatgttgcatg

SEQ ID NO: 116342 - DNA, 2062 bp, Cannabis sativa
tctctctctctctcgcacgtaccctcatcgcagccgcctccaccacgatattcgtcggtgtgttggtagcagttcacgacctctaccccgagatgaccaccctcgtcgcttgcatcaggtatggtttctcacccattctcggtttctttctctttctctctctctctctctctctccttatcttcgttgctatcactctgtcaccgccgctcaatttttgtaggtggttggtgcctcgcggtcggggtcggggtgatgattgctagtggcagcttctctacaaacatttgatttgtgcattacacaatatatatatgataacttttatgtaatatatattgtgtagtatttgaggtttgagttttgatttctgtttatttttgttttttattgtgcttaaatttggcttgtatgggcttagatctgatttttttttgtgtgtgtctatttagtgcgtgtgttataaaacgacgagataagtgtaaaaattattttataattgtttgcgagtgttgaaaaccgacaaaaataatttgaaacgacgattgataaccgacacaaatacacacattttttgcgtctacagtatacacgtcgattgggggaaccggcagtaaaaattttgatgtcaattaaaaactaataggaaatgtgctttttgtagtagtgatgccttaggaaaatacatagaatgtatgttaatacatgagattaatggattatttatagtagtatgagaaatacattagattttccttttctctctactggagagtttaaagtaaagaatgttcgtgggctttctcgtgagatcaagcccatggagaagacgatctgatgactaggtggattggattgggattgaattggtcaacactgcgggcataaattgtgggcaattaatctaaattaattgcataatatttgttgtaggaagttttccctttaatcttaattcgatgtactgttgcgatttgacaacaggaacaggagtttccttatttatgtctaggaatataaaaggaaaccggaagggtcttctgggaacattgtgccttgcctctttggtctcgcgatgacggacatgtcttatggactcaatttactgaagtcgaatgactttgcaaaggaaaaaccacaacatgttcctggaaggtaacacccagatgggcttggcccattttttttaatgagggtcccattgacgggtcttgaacgttgatctggagtcaacatgtccaatgctagaaacgcggatagcatttaccccctaagctttcagaatgttgtgtatagtggaagcttgtatctctttcttgatttagacatgtggaaattgaggaatgaaatagtgatatttcaaatgtcacttgaccacggaagctggcttttgtatgtgacgacaatgcatccacgtgtttgtcgcgcgtgtatgacaaggcgtgtccatcaaggagttgtcttcctggaatggctacatttttactgttgtttaatttttggtgcgaaagctaaaaaatgggcaatttcatcattgtgtcacatcttgattgtgaaagtggatttagtgccattatacacatagattgttggactccctgattgttggatggaaggtgtgtttttagagagaagatcgtgaccgtctatacacttctcacgtggatcacctttttgggtataaataccctttgtaacttccagttaccaattttactctttttttttaattttcaatccttcgaagcgcaccactctccctgcaatctctagaacttcaaatcgttttcgaagaaactccttctttatcaacctggaaaacaccgtggacttttgtcttcatctactgctaaagattagggcacgagaatcccctcaccttccttctccgatgatcatgacggttacaggaaattgcaagcctggattttgaagcagaaatcgattcactaatgtgcgagaattcccccaaactaagcttttactcgtcctcgagtaagacactaaataaacattaaacaagtcaatctccaaaacatgagtaattttcaagtagcttcaa

SEQ ID NO: 116343 - DNA, 2070 bp, Cannabis sativa
cttggctaaccttctctatatcatttatgaccacaatgatagactcaaatattctgtcatattcatcactatcaacacatgttgcttatttcttcatatttcaaagacaaagatccatcttcattaaactgcatttcaaacataaaataagttttaagaaaacattgttattcgccattgttgttgttggttaatagcaaaaacatataaaaatgtcatcacaatacaaattctaaaggcaataggagtagtagtacctcgatgaagattttagcacactctgtcttaagaactagtgtttctacacaaggaaaaagcttcatcattgcaccgacaagacgagcataatctgctattgggagttttcggtttgtaatagttaagtgtttcgcctcgtaaaaaggatcaggaagcaaattataatccctaagttcttcagtaaatccctaaaccatcacaaaagcaaaaagcaagcttgtctgaattcatttgaacgaaacaaaatagtaacaaaagcttagaaatcaaaaatcaatgttgttacctacatgtatgtaacaatgcagcttcaatgcattgcatttgctaaagatttcaaggaagtttctcagctcaacgaaccaaaaccattcggttcgctcaatagagcccgttgccaattcaatttcagccttaaccaatccagaagaagagtatctaaatgttgacaactgaaaaataatcccacaatatctaaaacaacaaagattaggagtgttgatctcagctttcaacaacccccaacaactttgaatcctcaaactcttgagactcgaatgagagatcacaaaactcccagtcccagtcaatccacaatcaagcaatgccaaattctcaagcaaaggaatttgcttgatgtaatcatcaatggcatcaggctgaccgaaatccgctcgctcaattcgtaaactcgttagtaatctacaattcaaaaacctaacaacaccaggagaattcaaagccctaatgtacacaaaagactcaagcttttcggctttgatcacaacattcggggccgaaatgccatagtatttgacctctaatgttctaagtttagggcaagaaatatgaagctcagagaaaccaaagcaataatccaatactaaattctccaacaaaggaaaacatgacaacaaattcttcaaactattatcatctatacatgaacaactgagtataagcttcttcaaagaagagactcccactaaagaaccagcaattaaaataccaaagcttttcagagacaaaacgtcgagcagtttgggttcaaaaagaagtaaccacaaaggagttgaattaaagagaacccagaactcatcagaacagctttgaagttcaattaccttaaaatcacgcttaatagccatggatacgagctgaacgaagcgagagaaggattggtcgtcggtgatgttggcgcagagagagaatttgtggacgttgaaacccctgtggttgcagcgttcgagccagagggctaagcttcggtgggcgtaatcgaagaaatgtgtggctttgaaaggtagtttagtttcgtcgatggagagaatgggagaggaaagccaggctgaacgccatgttttggaggaagctgaagctctaatggcgtcctttggtgggagatgagctaggattttgtgaatgagtggctccggcaagaaggaggacggtggtgatggtggttccatggttgggtaaaggtttgagctttgaattgagttctagggtttagcttttaccagaaagaatcaatgtggccattgtagaaggagagagaaacgacaatgttactgaagaaacgacaataatcttgtcaaacataacaacatctttctccaaaacgacatcattcttatctcacattatctctttagtgtcattgtttattttgtaaattttggtatataccaaatcttattttctttataccacttggggctagctcaagtggccataggtgggtgtgtgagtgttggaggtcctgggttcgagtcccaagtaaaacatgttgtaatttataaacgcttaaat

SEQ ID NO: 116344 - DNA, 2121 bp, Cannabis sativa
tacatgagctatgagcggagcacaaataatatatataaataaatttaaagattcaaattatgtagatgtggagagagatttaataatgaatagaatgagtcaatcaagaagacatttattttcttttctaacaaaaaaaaagacattaatagtaaatcatagtcaaacttctcaagtccacctatgttaactctaatcaaagtcttattattccctttaaacattttacatcaatatttcacgattcctcgaatatttcacatcaaaggaatacaataatcctataatttttaaccaaaatcacggtagaaaataatgatggagaaccaaacaaatgcaataatagtataatttctaaccttttcttttttttttttccaaatcctgtcttggttaacaaaatcaatcgaaaatacaattttatgttctataaattacaataaaatgaaaaagatcaccttggattaggaaagataaccatatccagcggcaaagagataatttgtgatgattacaggtacggagaccaccataaccattgcagctttgttaaagcctaaaaaaatataataataggacgaagaccataaatagtaagtcaaagcagagctttttagtccaccaagccacaattttgtcttctttcttttgtccattcacaaatttaaatttcttttaagtcctcatccaaaaatgttgcctcttcacgctttgtaacgttaaataactatatactccgattttatgagtttcgctggctgctttatcttgtaatcaatatttatttttctctgatgattaatagtattactttattctccttccttcaattttattatttgttaaaaaaaatctaaatcctttataaataaaatttatattagtttaactatttgtattttataaaaattattaattagattttctgtttattaaattatattagattttatattttttaaaataataccctaaattttgaggaatattatgttggccactaaaatttggataacatagctagtctagggttccatccttttagaattatttgtatacacaacacaagcaatgtagggataataatccatggattatttttttttaaaaaaaaaaaaaataattgattttataatttagttaggtgttacaacattttttttttgggcaaagttagttaggtattacaacataatttctctgtttttttttctttcacattcaaataagataaagtttttttaacttttttttttaataaaatcacattgcaaaacaaataaataaataataaaaaaagaacaacaacaaaaatactatgagtgctcatgagttataaattttgtaccattttaattaatcttgtagtgttttttcccatcaaggaaaatactttcattaaataatccaactgttgttttatttttttttttagatgcgtttacagagatttttataataaagattaagttaaagaaagaaagattaaaaagaaaatgagaaaagatttttacatggttataacattaaggagccttagtttacaaatcaggctgttattaaactcttaattatgaaatttacaatatgtattttctggtttttagcatggaagaataatgctatatttctttgatgggtcggacttatccgaacccattaagattatttgagtgtaaaagtctactaattgagtaaatacaactttttattaatataatttgagtcatttggtcaagtaggtgatgcttaagttgagttgagctgccggttgtactgttaatagtgataggtgaaatgtgagtcgttattaggagaaaggaatatcaaaatagtgggtgtccacccaaaaagataatttttgtattattgtgcatctttccaatgtctaacacaggatataagttgctaaattttctaaggatcgtgtcatagaagtgctacataggcaacctcaattcgggatactaactaatcccgcacgacccttggagtatctttcttgagttcacagtttttgactactaaggtggcatttaattggaaggaatgaaaatataagaataagaataaaatttaaaatgcataaaaaaattgataaaaaaaaaaaaatcattaaat

SEQ ID NO: 116345 - DNA, 4474 bp, Cannabis sativa
tttttgggtttaattattgagtttatttgttaacgggagatcaaacgtaatcgttaaatttaacagaatattttttttatttttaagtatattctgttttaatatataaagatatataaaaagggaatccatcccgaacaaaacaatacttaaattaattgattacccttaaaaataataatgttacagggcataacctttcaaataccactttagtggcataaacaaaacataaagcagagaacaaaacttaaataaattgtattaattaaaactgcacacataatacttcttttttctttttttataaaaaaataaaaaataaatacaagataatgcatgtggatcgatcgatcacgagaaaaactaaattatgagagctagggtttaataaattaataattactacagtaaccattaacgatagccagaagaatgcttgccgatctggagactttaacaacagaagcatcgagtttcttcttcatggttgggccaaccttctcttcttcgatctcatcgtggcacgtgtattcatccgttaaggcagcactggcccaagtctttatattctccgtttggaacttggcctcatcggacgatgtagaattatttctattaatgctatcaagggcttccttgcactgctggagttcttccacagagtccttgaggctgtccttgcaatccgcgaggacggccttgtccgttgtcgtcaatcctttagattttccaatctttacgacggttttataagcgtcgctggcggcggctagggcaaatttgagagagtaggagcatagctttttaggattggatttgattttggcggcgtagggcataagtgccttttggcattctttaacgtacaatgttgaattacatgcatttttgacataggttttagcacaagtagatgatgaagtatgataatcctgagctgtgatggctttgttggccaatatgaggagaagggtggcaatgaaaaatgaggaaaaaattggagatcccatgtcttagattgattatagctagagagttatttttgtgtgggtgtggcaaggttcccctttttcttttagagaaggattgtcaatgaaataattggaattttcatcttgtatatatagcagctagctttgacaaaatataactatgtctccatttaaaactattaattgtgatcgatacatctaagtctcagtcacaaaatatacataataatgctaattaatcatgattagagacccgaattattactattaggtcataactaagtatgttcccgataagtggatttttataattaatttgacattctatatatagagctggcaacttatttaattatcactattcactactattataataaatatgcagaaatattgctattgttctatcacatggaaaaatgcaataattgaatataaaatcaggggagagatcgaatatatctggaattacaccatatatatatatatatatatgatatggatttagttaaacatggcgcaaacttcgagaaaacgtatatattaaaattaacgggaaataagaggcccgtggaagagtcatatgcaccatcaacaaagaaacaatacggtacagcagacataattaatggtaggcggcatgatcatatattagtgtgttttaatatcaagttttatttaatataaataatataaaaatcgttaatgaactccaaaatgccatattaatatggtgttgaacatcaatgaaaaatattttcaactaatcaaattacaataaaattaagtggtaaaagttttcaaccaatcgaattgatttgagaaagatcccactaatttaaacaacaatattattgccacctactaattataagtgtgtaagtatacatatcttgtttatacaagtgtgaaatatatacgatatttgaacaatattatcagcattatattattagaaatagtcctatattactaatatgggtgtaaaatttataaatcactcatcttattgtcaaatgattttgagatagaagatacaccttaactatacatttctaaattctaacaaaaattataaattatacatataataaaattaaaattataacaacaatttgactcaaaaaaaaattataacaacattttaaatactaattaaaaacacaaaagctttttttggtgagcgacagatataataatatataagatctctctttcgctgtcttacaacgagttcctccctagaactattaactcttgataggatggaatcatattccttaattttctcctatttgcacgtgaagctataaaacaagctacagtgctaattatatctgcatatatatgctatatgtcatatataaggatctgatttagtttagtctagtatatagtacatataatttattattaattggtaggtcagcatatttattggaagaaaaaggaaacatgtggatatatatagtttacgtatggcggccagaatatatgtgtatagtataaaaaatgaaaaaagaatttcatatatatataatatagcatccactgcatgcaaactgttatataatatagaatagatagtaattactgtctatgaaatagtgttctgtccatgacaacattattaacgtgaaacaaaatgagaaacgttaagcaaactctattaattgttttagtacgtaatttgatttaaatatttcaaagacaagattcttttttcttctaattaattgttacttagagttaaaggtgggccgaagtcataaactaaggataggatggaatataaagcaaattgtaaaagttgcgtaagatgaaattcttagctgaatatagattttggtttggagtgtagaactgtataaaaaacactgaagattatatatatctggctgtccaatagcaggaacacacatgttgatcatgttatggtgtggggcttatttcataattggaatatatatctttgataaacatgacatgagatcgcatcacgtgtgtgcgccgcgtaagacgcgcgctgcatgatgagtggcgcccttgttggacctcgtgaacgtcccaacctccatctccatcatatagttctataaataattatattgacaaaataccttacaaaaagagtattgaatcaatatttatattaattccttgtcgtaaaactagatagtgtagtgaaaaataacattgtacgtgtatagtcaactacataaattattatatcactactaacaaatgttacttttacgtaactgcactggtttacttttattagtgcattccgcaaactgcgctagcaaagaagtcaaagttttaccaacatacatttgcagtggctaaaatctaaatttaccatcgcatttacgtgttaggaaaagtcatttttgccaacacttttcattttatactgacaaaacactactacaaaataggctattcccaatggtttagaagagggtcaattattggaaccgttggaaaaggtaagtggaattttttcccatcggttgtagcaaaaaaactgttgggatagttattgccaacggtccgttggcaatactaaatagatttttttttttaaaaaaaaaaatagtttatcctaactatttttaactgttgagaataataagtatacccaacagtttataactgtggagaataattagtatacccaacacttattaacggttagttactacccgatggaagtctttcccaacggttataaaccgtcatttaaagtaactttttataaactgtcatgtcatttaaagtaattttttgccacagttataaaccgtcatttaaagttccgcatttttatgacacccacataaataatataaaagacagttataaactgttgggaaaagccaattttgtagtagtgaaagttctaataccaatattgatttgctaacccctctcccttttgccaacacatcacaagtaaattctattttaccagcgcaatactaactttgatcagtataaaaatgtgttggcaaaagtgacttttttgtaatgtattaaatacataatatatagaactcatttggtatgttttaggttactgaattaggttatatatatattacatttttatatcataatatagtaaattttaatcggctttttttatttacatactaaaaagaaaacaatattaccaaaatacaatgaattggctcattaaatattatacacctcacaaataaagaattacaattatacttcttctgttaaaccttcagccgcacaaataaaaaaatacacctgcaaaagctttgaccaatcaacaaagaagacaactgaaacaaaacccaaaaaggtgaaaatgtgccattaattttggcgactcactactacaatttggtcttttagtgacaccctttagtgacccacgtaaaagtgcgtgtcactaaagagctaggagtgatttttaatgacacgcataatgagactctaaa

SEQ ID NO: 116346 - DNA, 2106 bp, Cannabis sativa
aagactttagagacaatcttataaacaacattacacaaggcaatcggtctaagatcactcatacttttgggtttggacttcttcagaataagcacaatgtttgtatcctttaaatgatttgggaactcaccaaaggtaaaaaaaggttgcactaaccgaatgacatctctgctcacaatatcccagaattttcggtagaaccctagattaaaactatcaggcccgagggatttgtcggggtgcatttagaaagagcttttcaaacttcttcagcttccacagtatacataaacatagtttaactatttgggtagagtttcgatgggtatacttttttattcttttactgctcaacgcctatttctttgcttaattattggccattatggcatcttttcaatggtgttttcataaaccacattatgattcattctcttgagagttgaaaatttaatcatacttaaataaatggataattctaggaagaagttatggtaattaattttaaatttatcttgatttttattttcttaacttaagatatttaggtgtttatatattcaaaaatatttgtccttaatcacaagattcacaataaaaatttaaagaaattttcctatatatattgtcatggcgcaagtttaatgcctaaaaatatgagtatagtcttgtaaacagctaacacgtggacccaactctcaataaaaaagaatgaagtgtcaatagatagctcctgtagagctaaccttgcatgatatgaacttgcgagaagaccgaaatatggtctaatcgtacactatgtacaacattatgtcaagaaataagcaagacccgaagaagcttttactgattgcgcatatataaattatatgcgatgagtaagtatatctctactgcgacatgtaaagattgcttctttacacatgtttggtccgaaagactaatatgttcgacgactcgttaagaactcgcaagttctaagttgtcaatgcaatgttcgaatatgggattaaggatagttgcagacattcacctaataggcccaaaggcccattatgcgagtaaaacactacaaagcttgcgagctcgcgtgtttagaatatggatagttaaatatgtgactcgacaagtcaaacacattcaggtaattaatcaatgaacagacaaaattgtttttacatttattatgttaacatttatcttaattaatgtaataaacggtcttatttaaccggttttgaaaaatcaaaggacatttactttctataaaaaggagtgatccgaatcaaataaactaagctgaaagaattgtcaaaagtcaactaagcagacttaatctgactgaattactatacttctttatctcatttactttttactgtttttattttgtctatttcgtagtttaatctttgagtatttgccactctaggtaaatacttgcaaatttgcaagtgtgtattcttgctcaactcgaatagatgttatttttggtattgtttaatttcttccaacaacatatattgataaattaaggaagtggaggtagctaagtgggctgagaatgtccaaagaaggggaactttttctgaaaatggcaaactaaacttggttgaaagttttgtgatttgaatagggccttcaattataatgttatcttgtctagccactactttggattggatttagtggatgacacatttgaatcacaataatattggcccaacttttttttagtaaacttatgtttttcatttacatcgactacacttttagtttttcttttttttttcaaaaaatatttatatataatatgtatactagtttttttttttttcgataaggtagttgtacatgccttagacacgtacttgtttgtttaaaagtgcttgtatacaaacatcaactaaccaaaagagagtcatttatatacagtgtttcagtttttacaatccaaaaaaagtaacaagtaactagttgtggaagtattcttaactttactgacagttaatgtttttttttttaaataataaagcaaatgtcattttttacttttcaatacctaaaatatcattcattatgtaaaaagtattataaaaatatctt

SEQ ID NO: 116347 - DNA, 1306 bp, Cannabis sativa
agtaaatctagatcttggtaaataatccccaacaccaagttctcaaattcatcataaaaaaatttcttgagctgatagtgttcagttggattcttcccttggattagcatatgactccagccctgtctcaactaacagtaaccaggttagtaacaaagatattaattttgataaacttgacataacaaatgttgttgttgacacacaagatgttgagcaagaggaggatagagaagttacaaaagaacaggagcaacaagttgaaaaacaaactgaaagtgtcataccatctcatcccatgataacaagagaaaaagtaggaatatttaaaccaaaagtctacatgggcaaggcaaataccaccctgaatcttgaagaaccaacttcactcaaagcagccctcaaagatgaaggttggaatagagccatatatgaagaagttggggctttaaaaaataacaaaacatggattctagtatgtagaacaccggacatgaatgtcattgaaaacaagtaggtgtgcggaatcaaaagaaattttgatggcttgttccaaaggtttaaagcaagattaatggcaaagggattcaataaaagaccttgtattgacaatggagaaacctttagtcctgtggtaaaagcttaaatagttataattattctcaccattttttttcaaggtcttgggatgtcagacaacttgacattaatgattcctttttgaatcggactttggaggacaatgtgtacatgcttcagcctgttggttttgaagatcccacgaaagctgattatgtctgtaagctcgccaaatccctatatggtttaaaataggcacctagggcctagttcaataagttgaaagccactttgctaaactagaagtttgggaactccaaagcggattcctcaatttttctgcataaacagtattgatatattcttttttcttatttatgtagatgatataattgttacaagaaatgatggtgagaaattgaagtaatttactgccaaattaaaccaagttttttccctaaaggaccatggtttactgcatttcttccttagtattgaggtgtatagagatgagtcaagaatgttcttatctcaatcaaaatatattgcagatcttcttcacaaaacaaatatgattcacttgaaaccatgtccaacaccaatggcaggagggaacattttatctttatctgatggagagttacttgaaaatccaatagcatacaggtgtaatacccggaattaagaaaaggattagcaaaaaccctaattagataattatgaataa

SEQ ID NO: 116348 - DNA, 1347 bp, Cannabis sativa
tattgcttgcaatttatgacaaatattctttctgcacacaggataagaagataaacacatttgacatcaccactgggaagctaattagatcattcaagcacaataaagattttggagatccaataaaggtgagttacattagtgatgaaaaaggcacctccaatttcaactcttaagctaaaacgttttcctgtttgcagataacaattgacccaagctgtagttacctggcttgctccttttctaacaagtctctttgtatatacgactttattactggggaaatggtctcacaagcaattggacatagtgaaattattactggcgccatcttcttacctgattgcaagcatatagttactgtaagcctctgttattcttaaatttcatcatttatgggtagggaattttgaagaattcagggctctctgctttctttgttaagcttgatatttgtttcattttggattcaaaacagtgcagcgatgatgcgattatgcctatatatattatgttcattcttttgcaatgcatgacacgtatgaacttctaaattttgtcatgctattaggtaggtggtgatggatgtatatttgtatggaaattgcctgttcttctgtcctctacaatgcaacagacgatgaaggaaaaatcaactccattgtccccaaaatgtttagcccagccagtagcttttactgaaataattgttcctaaagaagacttccaatgtagagatgattccatagataaattatcaccaggaatgtttgagaagattggacaaaaggaaactcatcaaggaggtgaaactcaggagaacaagagattcaaatttagcgtctcaagacttccaaggtgggcacaagacaaattaacaagctctaatgtcccgagagaacactgtttgaattcatccaaggtatcttacaattttatttcattttccaggaaatattagactaagcagtcttattccacataaatgctctcataatgtggttttatttttaagtccattagaagttttaaaattattgtgcagacaattgttcaaaaatggccttagtgattgcttataatgctgttatgaataattattggctcttgaagtaacaggagctaaaagaacagaagaatagcatctctcatttattggttcctcactatttatagaactgtaattcaggcaagcaaaatgcctgaattatgtagttttccctggttcacagtgaaaaaaatctactcttaggtggcgtttggttggaggtaatgaaatgcaatggaaaagaaaggaaacaatcttcattccatttttttgtttggttgcatattaaagtgttggaa

SEQ ID NO: 116349 - DNA, 2194 bp, Cannabis sativa
  modified_base (1164)..(1191): a, c, t, g, unknown or other
aggatctttgcttacagtttattaaatccggttttctaaaagtatccttaattcatgctcgcgtgaacctgtatagatggattttattctattttttctttaatgtattactatactcttattatttttaaatgaaatgttcattttttatatatatataaaaaaaacattaaaaaaatcatatcaaaactcaaatgacagacctttacagcactagagacattcctcccttgaggtttaaatcccccaagaacactaatggcctgtggagtaaggccaacatgccccatcacagcaattcctgactcaacaatggatttcgccgcattgattcttgatggtgaagcaccttccaattttatggcgtccattcctccttccttcaatatcctcaccgccgtatcaacggcctaatcaaaacaacatacaaaaatccttaacagccaaacagccagaagtgaaaaaaaaggaaaattggtacctgactggagctagactcgtaagacccaaaaggaaggtctccaaccaaaagcgggcgcttagctccgcgagcgacagctcgacagtgaacaagcatttcgtcgagggaaatagggagagtggtgtcgtgtccgtggacgaccatggcggctgagtctccgacgagggagatgtcgattccggccatgtccaagtggacggcggaagggtagtcgtatgccgtgacgacagtaatgggctcaccctttttgtgcttctgccgtagatgagtgagggttactctgtcgttggaggtttgggcagcggggccgccatagacggtgttctcgggaacattactcataaaacgtttgaacagagaggtggccctgtggctacgagttaggtgcgaagctctagcggtcaggaaagccatagtgtgagagagagacgttgtgttcgttctaagagctgtacatttttgttttatatgcgtatatatactagtaaaaattacactattacatgactgaaatcagtatagataattgtagttaaaaaattgtagttatgtgatacataaacaatcaaaattaaaatattcagtaaaacatcaggaaaacaaaaataagtcaaagctcggtttagtgtagtggcaaagatatttggagtttttttatttttacagtttaaaatagttttttnnnnnnnnnnnnnnnnnnnnnnnnnnnntacatagaaactcctattgcaacaaaaaatcatataaaaacccttattgcaactagctctgcaaccattttagaaactcaacccgtaaatttgaagaaaaaaaagttaaaaaaatagtatatgggataattccccaagataattttagtctcatttttttaaaaaaattttggttaagaatttaaattccacatattatgtttagtccttcaagacactagtttgcatcatctttaatgggatgagaactctactgatgtctcaactaagataaaataaggtataaaaccttagattgttaaagctatcaatggggtgggaaagagatctacaccacatgatctccttttccagtaaaaaaaatatcatataaaataaacatactcgaggagtagacctattcttggtcgaatattggaacaagttgtttggttggaagtccaaactttttttcttttggtggccaagaagtccttctaaagtcagtgattcaagcgatcccaactaatactatggagttgtttcgaatccctgtgggcattattaatgaaattcatcttctttgtgctcgcttcttatgggggacgaccttgataaacaaaaaatacaatggtgcacttggtctcgcttgtgttggcataagtcagaagatgtatgagcttttgggatatgtttctatttaatcaatctttattggccaagcaagctgttcggttatacaactttcttgactttttggctgctaaggtaatgaaagacttttattttaatacaagtaacatgattcatgtggaggaaacttaaagagcttcgtttttaagaaaaagtatcctttggggttgggatttatagataaaagggattctttggcttatggtgatgggactcatgttcgtattggtgaagatgcttggactctaaaagatcttgtgggtcgtgtctattttttggggtggtgtcgagtgaaattccgtattttaatattcccagtttgattatttaa

SEQ ID NO: 116350 - DNA, 3025 bp, Cannabis sativa
gggctaaacctctataaaattcttgtgtctttatattgctttattatatatcaattgctataaatcacttatttcttactaaattcgactcattgtcgttggctaaaagcgaggtcaacatatatgatagataaaaatataatacaataagcagataaagcgaacaacttaagagggatcagttttagggttgaaaaattaacgattgaattttccaactctctccctctagctcacgtctttctcactctctctctaccccttactcacgcatcactctctctctagaggtgattgtgtgttttccctatctcaatcacagtctcatgagttgagaagacactgtgatcaaaaaattatatttatctgaattcaatctgatagcccattgtattcttagagtgttgaaactaacttcgaagaccatggtgtgaaatcttcaacaagtctcactggattggatgattgtttcattaaaatgaaaagataggaagaaaaccctaataggcaataagagttaaaaatctctacattaatagttagggtttgtgttatgtataattgtgttgagatttggggttttatcgttcatattggattcaacaattttttttattaaatttgatattattaacttccgattcgactctgatatgaaccataaaaaccaatagtttacaacatgagaacccaaaatattatggaatcagctaatgtggttgttgatgactctaaagattttacaaaattttccatagaagttgagattgattgttttttggatcctccatttgaagcatcaagtatgatcctaacggagtggatttgaatccagtagaagcaagtgttgaatctgctacaacaactgaaggatgtgaacaagaacaacttgtttcgtttcatcaaaaaatcattactaattctattcagaaggaacccagcactagagtgatattgaatcatccaaaagatctcattcttggaaatcttgaagaaatcatggtaaccaagaaaaggtatgtaaattttattagtttcctttgttttgtgttaacccaaaaactttttatggtgacgtggtcaatgtttgacatgttccaagaaaaatgacatcttagagttgagtagtcccgagtcatagcagtcgacatgggaggggtccctagccctacacccaagttgacttcaggaactctagaatggaagttcagactttgataactcatttttaacacactatgtttcagtatctagtaccatgaagacatgaagcaaccaaatccaggcctcaagagctgaaaatatacgaaccaacacctcagaagtcaaccttggcacctaggatttcacccaacacccaaattgacatcctcaactagggtttcaatttctaagaccgtcttagaccaaatgggtcaaactttgcattgggacatgaacaagacatacacgaacatatttgaggcatcaaaattagatttggagaaagatcattttttagcactcagagtagccgatgtttggacacccaatgaccaagttgacaatttgtcaatttgggccactttcaagtatcagattcaaatttgactcgttcatcttgttcatattcatcaaaaacggtaaaaaaagtgctttcctggatgaaatagtacttcttgggtgctagaatcaaggctcggtgcctaggatgacacctagggtaggcccaacacttaggttgacattttgtcaacctgggccattttcgagtattttttccaactcttctgagcatattctacgtttttttagcaaagattaagattcaactatttatgaggaccaaacaaaacttctagatggcatgaaactagacccagtgcccaggttgacatttggtgctaggcctagcgcccaggttgatgtattttcaacttgggtccagtttttcaaaaaagtgtttcgggaatttttttctatcattaaaataacaaagatacaagcaaacttagggagaaaaccacaaacctgagggcttggaaactcagcctaatgccgaggttgacctagtgttgtgcctagtgcctaggttgacaattaacctggtgcgctggttttgacaactcaaatgcctattctgctctgttaattctctttgaaatggtcaaaaattgggtaagagacctcatcctcaagttctagaaccttggaagtatcagaacgacatcctggaagcttcgaaataagcacccaacgctcaggttgacaaatggcctggtgcgctgggttctgcttatctgattttgattttgtctcaatcattcttctagattttcataataattgagagccatgaagtttgaacagtcaaattcataacttcattttttcactttttcaataaggtgatttactcaaaaactaggtaggtttgagtctcccactttgcaaaacatcaacatctctaagaactggtgaccaactttgccagaaaacaaaaatagaccaagtgatgtcaaaatatcacttaggcatcaaaaaatacatctctgaaatgttttcccactcacccagcgtccaggttgacatcacatgtcaaccggggcattagatgccacttgggcgctgggatgtcaacctgagtgctaggcccagaatagcctttagtaaaattatcataaatcactcaatatggatttgattgacacgattcaaattgagtttcgaagatatttcaatactctatcaagtcttgtctcatagttcaatcacaattctgaagttattggctcaaaatttcactccaaaaaagttacaaatttaagctacaacttactaggagagggtcccgccgtcatgagttggactccaaaattgacgttcaacctctgaagttaattttcaccattagataatcatctacaatcacaaatagccaccttttatttttttcatattttttggattattttattcctattttcaaggaccttcttcacctataaaaagagagctcctgtagctcatttttcacattcagaaa

SEQ ID NO: 116351 - DNA, 3273 bp, Cannabis sativa
  modified_base (3196)..(3197): a, c, t, g, unknown or other
aacccgatatttatattgggttgataaaaatatgctataacccgacttaaccgaccgacgtacacccctagtatatactcatggaagtaagaaccacgctcatgtcctgaatttagtagacggggttagtggaggcgcaggctgcatacctttttgttggaagttaggttaggtcagcaacaaaatgacttaccatctcagaggtaaaaggtgccagggttgggcccaggtagtgcttggaccaatcggtcatgggatcaagatttaggtcccagacctccccagtatactcaccttgaaaaggcccatcatggacctcccttagcctttttattaaagcatcgacctctacattgcctttggatagctcatccactgcataattgtgtttggcaatgtggagttggacccgctcttcatcaggataggccggggttaggagaatggctaagggggcggggaagtcttcagcttcagtccggatcctagagtcagagctaggactgggggtggcttaccctgtaggctttcttgaaggctccgaaagggaaaccacacctttccattcccagtcaagtgggggtacctcttcctcctcttccttaatcagtaccacctcctggttcccaggtacctcttcagtcgggcccccaggagtcaccatcacctggggaggattaggcaccttcaacttagggctatgagtggtggctaacatggccagcaagttgtccatgggttttgctgttcaaagcaaacaaaaagagttaaaaaaaaaagcactaaggaatcacaaatgcaagtataacacaacaaggctaatcctaccctgacgctctaatttttccctagaaaattcataaattaaaaagttagtgtcgtcatcccctagaaagctatctcaaggaaggaactaactcaaggtcatgtaggaggaatgatccaaaagaatgggaacaagaggaccgaagcccatttgagactgacccaagaaacaactcaagttagaaaaataaaaacctttgcattatctccccactgagtatggggcatccgaaacttatacagcctcatgtaaaaacccaatggccttaagtaagaataatcttggatggatggaacaaaatgaatgttcaaaggggacttacgggctttagaggtactagcaccaggggtcccaaagttcagaacaggaaaggggaatttaggcctagctggggtcttttcttttcctaccttctcttggatgagcctcccggaagcctcttagaggggagcgtaatggagatcctgctctttcttgtatccatacttgttgtatttatcctcgacaattgaaataatgtcggccctgagcgccttcttgctcccatgattatgggtgttagggcaaattactttggaaaggttaaaattctcaactgattgaccctccgacaattggcggtcatcaccaaatctcctacattcaagtcttctttcttatagccagcaagcacctggacatggttcaagaaaagttgagtgggagcagtgcggtgcattggggggatcctgacccagtccgtcaataggtccaggcgctcaaaggctttaaacccaaaagaaaagaaaaacatatatgacagtattccttaacgttctttcgaaaattgaagggtaccggggtttcaatggccagatgagcttgcaacttgtaaaaaccatctttaaatttgtcacccttcttgggcacagaaagaagtttgtaaaaatataaaatttcagcggggcggggagcagcccaacccctagcagcataaaaattaaaaaggcttgatagcaggtggtaggcttgaggaatcagttggcatggcgtaagtccaacaaatacgaagaaatcaatgaaatagtcctacagaggtaacatggcttcggacataagatgggtctggctccaggctccaaaattgttgtaattgtggttcggtgtctcttcatctctgggaagacgatgataaactccagagccagacaatttggtcccatttacagccactatcttctccagttgatgggcacaggtcaaagtagaatggatttcattggcctcccaatcgttggaacaacaagaatatttcttgtaggcaaatgggccttgcataacctcttccaaggtggcaagcttctttggccccttcttggaggatttggcactagacacgttgggatttgacatggagttggtgtgatggagctcaagaatttctttgtcgaacccaaagaaaccgtgtttgtgaaggtcttgaagaacttcactcatttgaaagataagaaacccagcagttagcccccacattaaacccaaggtcaaaaaggggaatgggggtcccctaaccgctgggaagatgccccctccgaatgaatgtcaaaacgaatctaactattcacagtggcgaacatcgagtgcaaagcatccaagcaatacagagaaatcaagagaaaagttactgtcgccgaaaaaattaccagaaatagatgtctcagatataaataaaaatagaactagttctataacataatgaataaaaactaataacacaaaatagctcaaagcgaacataattgaaatataaccggttctgtaacataataaataaaaacaaataacacaaaataactcaaatcaagtataattaaaatagaactggttctataacagtgttataatgaataaaaacaaataacatgaaataactcaaaccaattataactaaaatagatccggttatataacataatgaatacaaacaagtaagacacaataactgaaaccgattacaattaaaaaaataaagaggaaatcagttcctaaaatactgaaacataaattaataacaaaactagttccacaacaaaatatctcaaaatttttgtaatttttaatgttgtttttgggagaattggttatgggttgactcggtactgagtttgatgatgagtttggcaattgggtatttttggagtagatatggtacgagtgtaattttttttgtgggttggagcatgttgaatgaatatttttgtttgagttattttattaaactggtttttgtgtgtgagtttttatcttagttcctttacggaaccatttttttgtctcaaaattttaactagttgagaaatatatctgatttctttatattatatttgagtnnttgtgtgttattatttgtgtttatggaaccgattcttttcatatttatgcctcaatatttttcggaattgatcccc

SEQ ID NO: 116352 - DNA, 2038 bp, Cannabis sativa
gtattcaattcatctcaaatatttaaacataataataccttccgtagcatctttttcggaaaagggcctttcaattccatgtgaagtcgtagcatgtcattatttgtagcacctggaaaaagaacctttcctgtataaagctcatataaacagcatcctacagaccagatatccaatggatgatcataaggcagcccaagaactgaaaaagagatatcaagaaacaaatcagctttacagctttaccaaaaaatattctctcaaataatcaaaaattcctgttcaaaagttaactcactaatttcaggagcgcgataaaaacggctaacaaggtaaggtgtgatttcatttttgccagcaaacatagcattaccaaaatcacaaagtttcagcacattttttgcttcatttacctgaagaaaagaaaaaagtaaggcaaaagaaacaatacgtatcaattaaaataataataaataagagaaacaaagcttaccagcatattgtcaggtttgatatcacaatgaagaacaccacaattttttagatgcttcaaagcaataaaaagctgcttggcataggctctaacagcagtcagcttgagaccaatattgcgtccaaacttctttaaaacctcacgcagattcatatgaagagattcaaaaactagacaaagatgatttcggtatttgaaatttgataaaaaacgaacacaatgacgcttattatctggatcttgaccaactaatttctttaatatgaccagctctgtcagaccagccttgtacctgtgtataagaagagaacagcaaagtttttaaggaactataataaaactcttctctaattgtgacagcagcaatcaatcttggtgagatggcatcagaaatgaatccaatgaaaactaaatcaggataaggggcaccataatcacttacatagtatcattactgcgtattatttttattgccacttcttctggttcaccattactagccttagcattttttgctctaactacagttgaaaagacacctttgccatgggctgcagtaatctcatatctaccatcaagtaattctccaaatctgtagcctgaaaatgatgatcaaattactgaaggaatacaatagcatgcagaaagaaaatgtatgcttatatttagtcccttgtattatcttaatacttattttaataatccaaaatagtttgcaattgatcactattttcaatattatcaaaataacatttatctgaaatacttagggagcgttggatatgaggagttcaaaataatctatttataggaaatactatgaaggagaatgtgattataggggaacttgtaaactgtatttggctgtgcaagagaatatttaattagattttcattaattgaatattatggccattgttatgatgtttcaaattatgttttcgttctcattttggccttccgttagattttattgaactataacatttattcatgatcattcaaataataaaaaaaaattatataaaaaataatttaacaaaatatgataaagtatatgtaattgaaagttcaaattaattaatctcaaatatgatgaggtttataattaccaatttattttttatttttttaacaaataataattttacttttcatgtataattaacaaaaaaatatctaatatataataaataattattatatttttttaatttttttacaataactcataagattcttttgtttgatttttaaccaagcaatgtaattcaattaacttcagcaaaaaaaaaatgtaattcaattaacagtatttgattaaaattttctcttgcacaactaaacacaattaacaagttttctaacaatcatattctacttcataacattccatctaatcagactatttgaaaaccttatgccaaatacccccttaagattcccagatgaatattttggtcattcaaaaatagtagccaacatcaagtccaacgtatacaaccacttgaggctagctctaatggccataggtgggtgtgtgag

SEQ ID NO: 116353 - DNA, 3131 bp, Cannabis sativa
gatcagcttaccggtattttcccttatggatcaaaggactactgactgtcacaagaagagtctgcccacaaatccttttcgacaatctttttgcccttcccggaaacagcttgcacgaaaggacggataacctctttgacagcttccctaatgataatgggaactttagctagagtttgtttcctattctccctgttcttcgtcttcggcttagatgatggttgcacaagaacaggcacctcagccaccaactcttcttcttcgacctcactgaacgagtataggccatactaaaggaagttcttctcggtagccggtaaagaaatgttttgttcttggctcgacatatgtggaatggcttgagccctggtcctcaacccgagtgtaaatggaggttggtcataagtcttgaccttttggaaagatgggtggttggccttcatcccttgcatgatatagtagtcctagatgtatccatatatctttgagacatttttgtccgtggtgctgatcagccaatagcattctacttggaaaaaataaaaatagcccgaacagccttgtctagggttagaattcagctcaaaaaaccaattcgtatcgtgggcaaaggcatcccacatccgtgctacaagtatagtacgtacaacacagccaggtacttgatccccttcagtgtaaattgtgttggcaagatcttatagtagtttgcaagttttgagaagtatgggtgaaggggtagaatagtccctattgggcgtgtgggctagaccacatgcagagactgtccccggggtcattggccagctgaccgtcaaaaggaagaaaggttgtcacatctccaatgagccctttattgtctaagttcatcaacctcttgagtgtgagggtggatgggggagaaatccacattgatttaggcctttcttgatgaaaggatgggtgagcctcctcgtactcttcagtagcataatggatcttttccaccattagatctccccacgtgatagtaggctacgtagtctcattgtatccaccgaacccatcaaatggtgtaggagcagcagtgaccacttcctccctcttaacttgagctagacaggccttgccctaatcttctactctttgtaccttagtatcaccgacatgcagttcaatagtttcaccttttaaaccctcatcggagcatgaactaacgccattagccgagctagatgagaatcttagatgaaaatttcctataagtttgtttagtccttgccactttcctagccttgggtgggcatttagacgagggaatttttgcagcgttaactaaaatctttgcttccacaacagtgctccttgaaggttccaactcaccaactggtaaagtgtctgaaaccccttctctgaccttgtatgtccaagaaataagtaaatatcgcctgaatccttcattcagttcccaaatgaatcatccataattttcaccaccaacctgatcaatgtaataatggtgttgcatggtaggttttggaggttttgactcctctcttatgactttccactcgtctattgaagtctcagtcaacgatgaagaggctgcgcagagtctagactggtcctcatagagcaattaaagtaagtcatcatctactcagtgcttacctccccaaaattcacacgatttcatctacaaaagagggaaagggaggtaagagccgaccaaggtcacggatagaaaccactttgatgcttcaaccagacaaatttaaagatcaaagaaggaaaatttcatcctaatgacaaaaaaccttgtctgaaggtgttcaagaacttggatgaacccagaattctccagaacatcccagcaaggtatttttgagtgtttgtttaacaaaaaacatgggaatttgcaagaaactaaagattatggttcgtgcacataaattcaatatcaaaatataatttctaatttccaaaaatgaagaataacctagttcgaaacccagatattagcagagatattcaagacgcaattttaaagtaaaatacaagaatttaaagaaattgcataaaaagttcaagaacttactcattgttgaatatcacctaaaagaaattcagcaaaaatgtgagatgaaatctggagatcgtcttggaattccttaaagcttagaagaaaacttgaagattgagagaggatgcattattgctttgatatttcttaatttcaaaatagcccaacgagagaaatgaagtccaaagtcccttttataggtttttgagaggaagtatttttgtaattcaacgatttaaattttgggtttccccccaaacggtacaatcagtactcattgaggtgtccaactgtcaacatatgcaacccaagacacatttttgaggtgaagcattaaatgtttaaaaatacaaaaatatagtttcatttatctacctcgtagtctggttgtaaaaaatttaggaagcaaaaatactaattattctgttaataaatatgtatatacgtacaacctaccataataattaaattaatatatttccttttaattatttctctcacaaaaataaaaattaatttatctctgtcaattttcacatctctatggctatgataggaaatgtggcatacaatactaaatttgataatagttccttacaaaaaaaaattgatactagttagtattttttttttaagaaattacaaattttataggtttttatatttttttttgtgcaaaaatatagtttttttttttctttcaaaaatgttattttatgagaaaattgaagtaaaaatttaaaaaaatgtgaggaaatcatgtaagggtgtaatcaagtgcccttttattttgtagggaaacttacaaaaatactaactttttcccttatctttacaaaaatactaccacacggtagaaatttcttttatattgtccaggcccattttttttcttttaatactgccccaagccatttttttttcttttgtactgtgaacagtaacaagagacaaatgacgcctccttccttgttgggaacagacagagcaacaacacaacacctgctgcaatcccaaacatcacttccacaacaacaccatatcaagaaaatgtggcaatgcttgaaaa

SEQ ID NO: 116354 - DNA, 1899 bp, Cannabis sativa
tagtgttgtctacagtgcccacctaaatatggtgggacactgtagacaaacccaaaattgatattaattttgtcgtgcgattgaagtgatttttgtaaaaaatcacattattaatgagtttttgcaggcccattggagttggcctaagaagagggacattgaatgtttaaagtcattattatcaaatctagaacatctacaaaatgttagaatggattaaaatatgttctaagaaattgtaaaagaagctaataacaccttataaattttttttaaaaaaatagaattacttaaattaagattaaatagttccaaagttattagaacatagtataaggtatttaattagttagttaattagagaattctagaaatatttaaagacatctttgtaacctataaatagaagtgaggtgtgtgcttagggtgcaagttggagcaagagaagtaagagatttagaagtatgtaaaagttttagagtgtctaagagttatttgtacaaagtgttctaagtttgtattagtactcttcgataaaaataaagtatcataatttttttactcaacaagtggtattagagttaggttcgataaatttgtggtggtagaagagcttcttgttgtcatgcacaatttgagtttgtaaggcttacaagatgggttaagcttgtttggtgatttatttttcataccacaatggggtaacgctcaagtaattgacggtattacaatcagaattacaacacttgttcaacgacgatagagtcatacctacaaggccaagacctgggaggtcgtcagtgcaactttgaagaaatggaagatcaaagttgggaaggcgatgcttgcaatcaagaccacgatcgaagaggaaatattatggcacattaggaaagctgaatcaccaaaggaggcatgtgacaattttgccacactcttctcaaagaagaaacgcaagacttcaatttttagagaatgagctcttatcaatctcacaacaaccaatattttaacaaggtaaaatctctttgagatttctagtttagagcctacttctataatgctataaacaagaataagaaggataattattcatgggtttaggcctagatatagaaggataattattcatgggctaaggaccggatataaaagttttgttgttacaattcaaggttgacctacaaaaccttctcttatcgagtttgagaatttgttagctgataaaagatcttttgctaagcatatatcaagagtttcaataaagaatgaagaagatcaagcactcttcaacaataaaagacaaagacaaccaaagccacaaagtaacatcaggagtaatgagaagttacataagcaacatcgaaactcttagtcaggaggtgctcaaaagaatcgtgataagaataatcagatgagtaaataaaagaacttttgatgttataactatggaaagaaagagcacattgttagagattgttgttcaaagaattttgtcgaatgcattgcaacaacctccaacaagaagattgatgtcgaagaagaatgagatattaaagcatcatttatagttgcagaatctagcaagaagagtggaagctctgaggaatgggcgttggcagtagttacttaagagcatattaattacaagaacgacttgattattgatcctggatgctcaaattatatgacgagatatggaaagctgcgagatgcgacaaaatacaaacgagaatgaataatggtaactggaaataattccacactgtcaatcactcacatcagtaaggctaatgtagtccttccgctactacaaatataagaattcgcgacggttctaaaaataatttttttcggggaccgtcgctaaaaaaattaagtaattatttaaaaccgtcg

SEQ ID NO: 116355 - DNA, 1523 bp, Cannabis sativa
aatcactacaagaaatgaaactttatcttttatatgctgataaaagttaagtattattctaatagcaaaagtgatatttgttgtagtgaacaccaaaataaatcgtatatgaaaagcataccagaataaaatggtggagaaggagatggcgctggttgttgtgatgggggtagggatggtgttagaatttcaaccgcagtagaattatagaaaaggtaatcctcatatctaaatctacaattggttcccaatacttgtccaccttttttcccatcgcaacaaccaggaattttttcaaatgcaacctccaaacaattgttgcagtcctcctgggacaggtcaggtgtacactgcacaagtccatatatggttctaaatcttggagctgtagcatttgctgcagcaaattttcgaaaagaaccaccagccgcgcctcgtctcttcagatgttctaacaatccattaagaatttgaaaatattcaaccacaatatcagaaggcacgtcttccgtattatgataaattatgtttggcttagtttccatgacaccaaacaaagagcggtttgagtagcgcaacatacaatcgtcgtaccataagagtgtctccttttgattagggcaacgctgtgggagaatatatgtagagtcattaatacatttcaggcacacatcgggcaaggtgtcgccgttgcatagtccgattgcgtaaacttggttggatgagttgccgtaggagagattgtaaaagccgaagccgttgttgttttcggggttaggaaggtttgagaggaggtgattaaggttatcatggtatgtagagttgagagtgtagttacctttctctttaacacattcgacactttgagtagttgctttttgaggtacgagaatgagtattgaacaaaggaggagaggaaaagctagtggtgtcttcttagccatatagatcgtaggtagatataaatggtgtatagtttatattgttttattatgtttaataaggtgattcaatgtctaaattagatgaaggttgtacccaacttaagttaaagtttaattctagctctttacgtatggtacacgatcgatcaaatggctaatatggatggactacttttattagagatatcaacgcgggagtcagagtcagagcctatgatcgtgtatggatataccatgttgaatagccaacgactatttattataatggaacttgtcaaagaagaataataattacctaatgaaacgaagttgtcttcgtccatggatctctacttcatttatggatcgattgccctttttttctttctcttttatatatgaacaagtgaaataatgcagaacttgtcccatgctatctttttcgttttgaaaaatgctaaaatggctatacacgtggattgaaaaataagtatacaagtccacgatgagtaattcgcacttaaactctttaccttttaatttttatacacttaggtgtcgtttggtaacacttttatttttttaattttttaatcacaa

SEQ ID NO: 116356 - DNA, 3372 bp, Cannabis sativa
  modified_base (978)..(998): a, c, t, g, unknown or other
  modified_base (3345)..(3346): a, c, t, g, unknown or other
ttataatcgttttagaagttcgtatttaggatgttaaacaacatacttgtgagtagatctaagatcttggtaaaataatttcaacaaaaaggataaataccaatttgcatcctatattttacaaaatttattgattgaacaccttattttattaaatgataaattagactttatatttttaaaataatactaaatgatatccagcattaattttttgaacattacctcacatgcctaagtataaatcacatacccaatcattttctctcccctcttttaattatatcaatcttatttgtcttttagtattgcttcacacataatgacataggagattttataccttttttttttttactctttttatagaaattaggttatttatctattatactaaaatgaaatactgtatattgatagaaatattacatcttatttttttccaataaaaaaattccttcctatgatatcctaataaacttatggtaaataatttaggatttatatttatattttgagttaatcaagtaacaagtgagattatgattctataatctagttcaacatcaatgttaaatttactataagtgagtaaataagcgtaattgataaattttagagatttacatagcatgtgtgaatgtaatatgagctatatgaggaataaaaatattttcaagtttggcgaccttggagacttgattgcgagccggaaatagcataaaagatttaattgatagaattattgtgaatattgtgataatttcataatatagattggggtaattaagaatatgcagaatttaatttaacaccctaaagttaaaaaaaaaaccagtaactaaaaaacaatagaataaccattaattaaaagttattattaatatataatgttattattattattattaatattaatacattattatattatattattaaaattattattaccaatatattattattattattatnnnnnnnnnnnnnnnnnnnnntattattattattattaacgttaacagtacatatataagttataagttacaaacagaaaacatacaaaacaaaacgaaactctcgttctccgacgaaatccttatttccctttctttattttcttcaaattctcaaaacatagcgatctaagattcgatagtagcagaatagtgaattctctgagcaaaaaaaacttaaagtaaggtttaatttcgttttaagtttaaaacaattagtttcgtataggggttttacgaattagagtagtaattaaggttctgaccttataggattgttcttgggtagtcatgagacttgttttgatattttcttgctgaaattgaggtgattttgggttaaaattgagtttagaactttatatagcttaagtctgaacattggtggcattttgtgaattaagggctcgaatttagtttctattgcgtaagtatggtagtatgtatggtatatatgtgccatatgaagtttggagtggtttggataggcttcggtagcatttcagtgagcgcataaacttggaaattcacattttttgcccccgaccaaccggtcaaccagttgggaactggtcaaccagttctgggtagtctcgagaactggagaatcgtatttttgccataactttgcactcaggtgtccgttttggaccttctatataccgttttgaatcttgcgacgagctctaccatatggtatatgttttaaagccaaaatataagttttattttagtgaacatttaactttgggtttggtaggaattcctaggtattcatttacaattattaagtagtattttggggtaaacacttattagtttattattgttatggcatagggcctagatcattgatcgtactccaagtaggtcggccaacatacctgaactagaacttaatgtaagaaaagtataatgtgccacatggcatgagaagttctaaatttatcgattgtctgattaggcaatgagaatgtgataatatatgagctcacctaattaggtgatacaatatacatggcgacgtactgggtgtaggtacgggcgtcagtgacaaatgatgggtaccgagtgtaggtacggactcacctgattaggtgacccaatattcctggggacgtatcaagcgtaagcacgggtgtcggtgatataaaatttcctagttatggcatagattgaaaccattattgggtaataacctactccccttttagctatattgattgtgagataatgacgtgcatatcactattgaccacccgaccaggccctccttgagactcatggagcttagttttacattctgggcattttttcttttggccggcatattgaccacctggtcaggcccttcttaagacttatctttttttatgaagttacttatgaaaaaatcctgaaggctacattgatttgcccctctctggctagcataatgatggttgagccagctgattgcttaggaggcagtccacagtccatgagcactaatctcatatgggatctgccatgcacactcctggtcggaggtccattctcatttaatgtcagctagatcatgccacatgtaaatgccacgtcagatgtgcaaacttttggataacagacctctctttttatttttcttctcatatatgcccttttttagtaaaatttataaataagacagccttttttttacaattctaattgattagctcaataaattacttgagtctacaaggaaatattatcccatataatgtggggaccatgggcctatgtaatcaagctccttataagtatatccaaaatttaccaaataaattttctcaattattaattcctcctaactccactatagattcagaattgcactcttgattacatgaaacgctctatataccaaatatagatatgttatttataagattgcaaccaagctattgagttctagaatcagaaacatccttcttgaaataatttttcattctcaaggaggctttattaaagggaggtttatagggcataatctaatgatatgtcaggacttggtgaggaactataacaggaaagctaataaaccgagatgcatgatcaaacttgatattcaaaaagcttatgataccattgagtggggattttaggaggagatgcttgaaggattaaattttcccaggaagttcatacagttaataatgaactgcatcacctctcctaagttctctctcatgttcaatggaactctacatggtttctttgaagctaggagagggcttagatagggggatcctatgtctcatcttctgtttgttttaggtatggaatacctgttgggttttatgccctnnataaaactctttacaatctgattagt

SEQ ID NO: 116357 - DNA, 1915 bp, Cannabis sativa
taacaatgtgtgttttatttaataatctagtaacaaagagtaaaagatatgattttttttcctttttacaataacaattacatcactattttaagtgattaattggtaagttcaaaagatctgatgtaaaagaaaaaaatatatataaaaaaaatagtaagtaaaaaggaatattattaaaaatttattgtaaattattccacttgttctaagttttctattaattgatcaaggtagatattttctattaataataacaatcattgaacatcacttttggattatttttagtaaagtaattcgaatcattgtatgaataaataaaataatataaatgtttgttaaaaaaaggagtcaaaaaattaaagtgtaaatattccacaacgtgtggttgaagtagaactaatacatctatgtatttcaaccaatcctagttgattttcagatcatctttttgacttttctttatttatttttaatagatttgtttattactattattctttttaattaaaaacattgttagagcatcttcaaaatattacgtgtagtgttgtttaatataaacagtgcacgtgattttttttttctttttttattagaaaaatattattttttatttaaaaagtcattaatttaatgtgatgtgagacaatagtggataacttttaaaattgtcaactattaaagtattttttttaagagaagatgacaaatctaatgtggatgagagaaaaaaaatatgagaacaatgtgtttattttggcaattataggtattgctcccgtcagagattctcatggggcacccaccaaagtgtcaagcgcaccattatgaggtagatcctataattgattagtgactttctataatttttattaaagtaaaataagtgggagtttatattaaattacaccaataacaatattattagataccatgagtgttttttaacgtttctcttttaaaaaatgttatttagtaacattacgagtgtgatattataattaagtatgaggttccacatattttgatttaattatttttatgggatcgatattgctaactatttataaattgttatattacaagtgcacgtctttttaattttaacatttatcatattaataatagtgttaattacaatatttttaattaactctttttttttttgtttttaatttaaaaaacacatattgaaatatttttctatataaaaaaattccatgatgttctttgttataattacggaatcattcttcaatattttttaaaaaaattatataatttaacttttttttaacacaaaatattaaaagtactattaagtataaactatttagaattttttaaaaatttaccaaaaaaaatataataattacaataaataaatacaaaaattaatatattctattataatgatcctcttatcacattccaaaattattaggaaatttttagagcactaacatcagtatctctcattctcttatttattttttaaaatatatatcaccaaaatttcattttttttatttgaccttaaattgttacattatatcataaattaattactttatttttttttaatatcattcaaatattatattttcttactatattttatctatttacagtttcttttctaaatattaaatattaataatatatgagagagagagaggagaagaataaaataggtaatgaaagtaagtattaataaaataatgtttgaacaaggaaacagtaatcactagatgatgtagcaaagtactgtaacatgctttaaaaataaaaatgaatcaactaatggagagggctttctatttaactgttagagatattattacaatagaagataaatcaaaatatatacaactcaattgtaaaaataatacaaggacaataaaagaga

SEQ ID NO: 116358 - DNA, 2091 bp, Cannabis sativa
catcaattgtacctttgagatacctcattagccacttaacaaccttccaatgtgccatgcctgtgttccctatatatctgttcatagtgctaacaacatgactcaaatcgggcctagtacacaccataatgtacatgatgcttccaaccaaattagtgtagggaattctttccatttcttttgcttcttgttcagtggagagaaactgtttgctagagaattttaagtgttgagcaatgggtgtgctaactggctaagcattagaaaaaccaaaattgctcaatactttagagatgtagtcagtttgagatagcttcaaagttttagacctcccatctctgagtatctccatgccaaggatctttttagcaaggcctagatccttcatttcaaattccccactaagcatcttcttaacttgactaatctcttgagtatccttgctaacaattagcatgtcatctacatatagaaataggtagacagtagccctagtctttgatgactttacatagacacaactatcataaacactcctcttgaaccctgctttgtgtatgaaatcatcaaaccgtttctaccattgtctagatgactgtttgaggccatatgatgaccttttaagcaaacacactctatcatccattcccctttcaacataaccctctggttgttgcatcgaaatttgttcctacagttctccatgtaaaaaggttgtcttgaaattcatctgttcaagttctaagtcataaattgtcatggtcaagattaatcttattgaggcatgtttcaccacatgagagaatatttcagtgtaatcaaccccctctctctgtgtataccatttttccaccaacctagccttatacctgcctttttcaccctctaaaatagaatccttgtgcttgatacccatttgcacccaattactctttgtcctagtagtttcttaatcagtatccaggtcttattttccttgagagttaaaatctcataatccattgcagcattccacttgtgtctatcaactgacctcattgcttcacataagttcggtgttcattattacactgctcaatgtagagagcataatgtataatgtcagcaaacccaaacctctcacgagctcatggtttgtcttttttgtctatctctggtcagttggtacccctaagtgtttgcaggactggtttcaattgcctcttgctgttcatcttcactttcctcatcaaaaataccttcatgtgttactggtgcttgatgcaatgtctgattttcttctttagattttccagcaggctccaccttaaactccaaatcatcctcagatttgtcacgggtatggtttgttggtgtggtcatgacatccttatgcaccttgtcttcttcaaaaacaacatccctgctaattatgtatctgtcttgattcccagcctctatgaactacagcttgaaccctttcacaccctcagggtaccctaaaaaaatgcatttatttgccctgggatcaagtttcccttgcctgacatgagcataggctatgcagccaaatgtcttgagatttccatagtttgctggatgtcctgaccacatttccactggtgtgttggattggattgtagctaagggacacatgttaattaaataacagacagtcaccacagcttcaacccaaaagttctttggcacgcaaaagtaaattagcatgcatcttactctctccaagatggttctgcttagtctttcatccagaccattttgttgggagtttcttggcattgttttgtgtctagcaatgccactttgcttgcaaaaagaactaaacaactcagaacagtactcaaggccattatcagtcctaagtctgttaactttctttcttgtttgagtttctaccagtggtttccattctttaaacttgtttaaagattcatgcttatgttttaaatagatacccaaacatatcttgaataattatcaacgatattgaggaagtaccttgctccacctcgagatacaatcctggaagctccccagaggtctgaatgaacatagtccagagtgccctttgttgtatgtctccctgtccca

SEQ ID NO: 116359 - DNA, 6396 bp, Cannabis sativa
tttttttaaaaaaaaattataactggttttatgaggtattatgtgtaatgaggtattttgttgtggagctagttttgtttttaatttatgtttcaatgtttcatgaactgattttctatttgtgtttttaattgtaatcgatttgagttatttcgtattacttgtttgtattcattatgttatataaccgattctattttagttataaccagtttgagttatttcgtgttatttgtttctattcattataacattgttatagaatcgattctattttaattataactggtttgggttattttattttatttgcttttattcattgtgttatagaaccagttatatgtcaattataatcagtttgagttattttgtgttatttgtttttattgattgttatagaaccagttctatttttatttatatctaagacatctacttctggtgacttttccagtgacttttccaacgactgtaatttttcggcgacgataatttttccaccatcgacgactttttcagcactagtgacttttctggcaaacttattattacaaattttaccaaatttatttattgttttttttctcatattttaaactttaattattttttaatcacatatattttttttgcattatttatgccatataaaagtaaattccattacatttttccatatttatgaaaaaaaacccttgaaatttaaattcaactttttcacccgccttgattttctaattataaagagatttttacaccacatattgaaatttcaaactttttttttttcttttttacctgtgaaacgattttttttttttttcaaaaaactatatattttttatacagtgtactatattaaattttatctattattccactgttgtttttaattattctgtttagtgttttatagttattttataaaaaaaagtgtttttgtaaaaatttctatgtggcagtaaaattataaatttttgccaaaaattcattatttttataaaaacttcaattatcttataaatagaaacagttgaggccttagggtaaatattgccatttctaaatctttctatgtcagatgaaatttatgcatattcagaaagataaggaagggtcaaggcgacagtttacaaaactctgaacaaaaaatacctatatgcttaaactaagtggcaattaattctttacagaggcaaactaattaattagataaccaagtgatcctcacaagcataaacaataaatattatacaccttgaaaaccagaaaaagaatataaatattcaaatctgcacagatcaactctagaagcaattcttgaagcaagtagctttagaagggagagccaacaggtggtgttagaccaagataacgcattatcctaagtcggcgaactctccgttcggggttcagtggacatgtaatgtcctgcaaaagaatgcagtcatatttatgaataaaagaagcatcaaaaaggtgattcccttgcaatgagaatgaagttagagggaaacttacatcgaagtgaagtttaggttttcgttccctcttgcccctgcctcttgcaatgatatcgtcctctcctctgcttgatgataaggtagatttatctgtgatgatgaaatcgaaagatcaagagaaaactttgttctgtatcttaaatagtagtaagtcctaattcatataagaagatgtttttataaacaaaacaagggttcatgccatcgatacatcggtaaacaagaaatgagtaaagaagcaagcgataagctgctctactacagcctccgaaaattgcgtactacagaacaaaatgcatggggccagagttatgatatcatttcaagaactagccggaataaatgaggctgcttaatattataaaaaaatttcatacagaacttgaactttctttgtggaaaattgagggctgtctaatcttgcctaatatggtattgtttcatgtttgagacttagtgctaattctgtagaccttcttaagacatgattaagaatatatagtttcaagcaaacgaaacaaaagcataccagaggaaagatcttggtcgtctgaatgattagaagcagcaggtcccttaatcaactcactgctcaatatatggcgttccttttgttgtatgtcctgcaataaagtgttggtgcaaagctaatcaacactccaaaattgtgtttaaaagaataacacattcaacacccaaattgtaaactgaggtctcatcaagaaatccaatctctaattaagattctacagctaaaatcaaggaacttttcaaacttcaggtaaaactgacaaaaaaagttgttcagtacaacatccaaaaggtaaaaattattattgtttgagcagtgatattttgcactactgtaagaatgtaacgtgtacctcagcagaccaccacattttgtgtgttttcaccaatgcaacacttccgtccttaccatcttccctaaataaagtaggaacaacattcattaaaatgtacaggattcttactgatgatatcatgccacatcattgcactaatatgatcccattctatttctcacagaaataaaatttaagaaaagaccagaacctgttatcagaagactccaatagagcatcttggcctactaattcaacttctactaaggaagcttctgtagaattagaggataatccagatccttcctcctgggacttgctgcatcgaattatagaattcggaaacaactcttttccctctgcattcttttcatgcaacagagagcctaaacataaatggtccaacataaggagttaattgcttaaacatattcaatatcctgacaaaagaacagttgtactatgcacctacatgagctaaacacacataattgaattcaattagatctctgtcacacggtcatccctccctccatctacctagtacacacattgaattttaatccatagcaattttgtaaaaattatcaaactacacaagatatttctctgatgaattgcatccccatgtaaaaacttctcggtaacacaattagaactcagtacacaaatattacagggctccaaaaccttgcacgttcgacagaaattatttaaggataccatcttaataagtgaacaaaaatgtaaagctttcaccaagacaacaattagggataaaaacaacatcgattccagcacttaacgataatgttcaacaaaattcaaacatactcatttagaaagaatcaaattcgaacaactcaacacacttccaagatcaaaacccataatgtaaacaataatcaaaacaaattcttgataatcaaccaatgaaaagaaaaaaagaaggataagaagaaaataaaaaacctgaatcgaatagagtagatgatttgcagaaaaaggaagagaaatcagtgcggcgtttgggcggagagctccttggctgttgagaacacttgggtatattatcaatcttcttcctctccgctgccacccgcttcttcgccattaaagctctcaaaattgaagcagtgaaactcaattgaattgggatttagatgtatagattggggggcaagtaagccctaagtatagaatcccagaagagaaggtgagattgggattgagattgagagtgaaaggtcgaataagaataggcgttgagagagtgaaagtttgggtttgggttagcattgggtgtaatctgtctttcaattgcatacactaacacaacaaatctaaccgtcttttccttcatgttataataaaataatattatagccgctttgatgatctaattctactatgagaataggagtagattatattatatgtatgcagaattttttttttctttgataagaaagatttttaaactttattaataaagacaatcaattggagggacaattatcctctctagtaacatgatcatgatcagggagataataaaacgatctagcaagctaatgacagaccgtttaacataacaaatagaagcattcttaaaagaattaagtaattctccgcaatcatgaataacaacaccaaaagtagaaacatttcaataaaactataaatagcattgacaacgttgatgcaattagtttctactttagcatgaatatcgaggttgtattttaactagctaagagcttccttttaccccaaagcctcaaccaatttcgcacgcataacactctccaaatagtgcacacgggcctccacaaaagaaccaactgagccacgaattaccatgaaaaatccaaaattccctttattgttgaccattgttgcgtctatgttaattttgatcatattagacaaaggtttcatccgatgctcaatctccttattaggaccaaaagatacttgaggaacacacaaattatcttcctgggcaatattcctaagatcaaaaagaataacaacagacataacaatattaaaagttataagagtagtattgttatatgagaatctgacaagggacacgtggaaactaaataataaatgtagctcaaatacttcaggctcaataactggcctaactgacatcactaggccgaatctataaaccattaatccttccggataaataacacacaacttgtccaagcgagatttcatctagcatggtcaccacccattagacatacaaccacatagccgaaagaagatttggaagcccaatgtagtttcccattttctgtcaaatcgcacaagattaggaattaccttcctataatcttggataaaagattatatcttactaaataaggaaacaagataattgggaattaagtaattataatgtgtcattaatttccatgaagataggacacgagtttgacaactagtatcgtgatatggtcaccatgttagcgccccatgggccgggcttcaccaaataagcccaaagttatatttgtaaactctccattagagggaaaatggtaactagtatgacctctatgctctataaatactacataaaccctacatgcaaagggttagaaattcttggctcacttgctcaggaaaaatagagtgttcataccttctgtaatccctaaggcatttctagtctttcttaataatatcgactcatggactaaggctagttaacgctccaaccacgtaagaaacttgagtgttcttatctcatttatctttgaattattatctttggctcttacatttaaattattagtttctaaaaatctcagtaaatattttggtactttcattgagagctgaagaaagcagtaataccattgacgattatatactgtaatcatggtactcacccggaccaaatttggccttcactaccaggacatgctgatggatgaagttgatcccaacactgaaataggaacatgactcaatggagatcctactaaagcaactagtcgtcgtgtgaataaagttcaacacgatgagtgacatgtctatgatgatcttatcaatgaaggagaggaaactgaagatggtgatcctattgacctagaggatgaagaaattggtaaagaaggtgaacatgatgaacaaaattctacggtcattaaaatggccaaaaaattggcagcaactaaattgaaattggtggcccaagaagatttctctcgtagaatgttggtataacgccctaatgattaggcacgctacagtgcctttataattacagtacacacctttgatagtcaaagggttttatcaaaaatcgtgattaatttaaactttgattaacattaaactttaataactataatcatatagttatacaaaaagggtgggatcccgcttttaaacttgtttacatgttcaaaataaactttacaactatgtcccacatcgactacaaaataagcctaagttttcctgagaccaaactctccaggtcgcaccatcttgacatgtacaatcatccttgagctccaggctcattgctgctcagccttagcttttcctttacctacacatgcaagcaataactgtgagtcaataagctcagtaagaaaagtatataacatacaatatattacttacttgtatttaggcgcccatacacctatccacaaggcttaatagatgattaagaacgttcttaacgaatgtacgacctctgtaccacatgcactacataccgttattttactagtatttgtaggatttgaattgtacttcgagtgtaacgccttgatgcatatgctctacagtgatttttcaaatgacatactaccttgttaatcaagggttttcttcaaaaattgtgtcaaatcaaaactttgaataaaattaataaactatgctcattatatggcattaaaataataaaaaaatcaacttaaaatagctacaaaggtggccggccaagcattagtggattgggcctt

SEQ ID NO: 116360 - DNA, 1624 bp, Cannabis sativa
tttaatttttttttctagtataactctatttagttataacttcttaattagaatataatttacttgatcacaagtgtattattggatagaggttctacttaatttgaaaaaacatgcaacaaccacaaagaagtcatttaaagacaacattgaaaaacaagatatcaattctaatgttgtacaatcttggtcgtacacaagcctgaggaggagaagtgattaataatagtcaattaatgacgttgttattgaaaatcaactttacaattttttagctattaaatgcttagcatacgtgcgtgtatcaatttccaatttattatattaattataatttttttagtattatgatgtagagttctaataagatacttttataaattatgttaaaggtcataattatttgtattatagttttgaggagaaccacattaaacaaatataattattattattattattattattattattatttaaaaatacagatataatattatagatgagtgctaattacaaccctttatcataatttgttatttcacgctcaaaattactttctgcaatgttttttctattttttttttcatagtgacattcattaatagttataatactatctctgtaaatatcaaacttagttttagcactaaaaaatatttatttctttttcaaaattttaggatgatgttgtaactataacaaataatgttacattttaacacgtgtttttgggcacataaattagctaaaaaattgtaataagagattttttttttatggtgattaaatcaatcaaaaaatatatataattttttggtcattaaaaaaaatgaagttggataattttttaagatgggtaaattgttcaccctaattattatattatttattaaataatataatatataaattaaatacataaccaaataaaaattgatcaatatatattgtggggttatttagcattttataacttctacaatactattactgattaaatgtgtaaaaagaagttacactactttagaaaggtatttgtatcctatataattaataaggctctacataaatttttgtaaaccgcccaattcgaataacctgcgcaaactaaattgagataacatgacgaaaaatacaaactgaaaaacccgacagaaatataacccgcccaatctttatattaggcgggtcaaaaataatatcaacccgcccaatcaacccgaactaactcgaccaattgattaagaaagttttttatatatatatatatttttttattatatataatctatatattatataatttatatacatatttataaaaaaaaaaaattaaaaattcaaactactatatttttttatggcagataatttaaaatttaaattcaatctttatatttatttcattatcacaataactaaaatataacaattgaatgtgaaaaaaaataaaacattagtgctcgttttgaacgggttaacccgactaaactaaccaatttattgggcgagttgaaacttttttttttcttaattggcgagtcgcacttagatttttgtaacccaatctttacattaggttaaataaaagggtaaatactattttgggccctgtgttttg

SEQ ID NO: 116361 - DNA, 1295 bp, Cannabis sativa
tgacatgagagtcatcaatcaattattgtaaactttttatatatacaaattgaatcaagaccaaggcagtatactgccgtaataaacaaaaaaaaattaaaacagtaaaaaagctaactttgccgtgtcacagtatatttgaaagaaaaatggaaaagttagtaaatgatgtaaatttcccaatgcttttatacttttaaagcacgatagaaaagattattgaagagatcacaaacagaaatactattgaaaatttagaatgtttccttttagctcttgtcacatgcgcatggtagcaaagcccaatcttgggctaaagggggctaagctcgtgcttaggccaagacttaaaattttatacataggtatggatagttgtagaaaaaaattaaagaaaattacgttgtatacttactttattttacatgttttaatttttacctttatttttatattttttaaaatatacccacttttatagatgatgtcctcattatacctcttaagttaataagaattatgtgctagatttaagtggaaggtgagggtatattgggtaacctactcacaaaagtgtgtacatttatttttgattaatagatacaaaaaagaagtatttctcaacttattctctgtgaaattttgtggattaaatcatacccaagcccacttacctattacatttacactcaaataaataaaaaaaaattaaatttgttttggtaaccaattttataggtcttaccaaaacaaccgagtatccagttgctggtataatcggttacccaattttacttaaaatctacaactcgaaaaattttgagcctaagaaaactgcatcttatatccgcaataagccataatctaactaaacataacttcactacaataaattggggctttagggacaacttttgtcatctctaatagtgtaggaattcgcccctaaaattttttataagtgacttgtcgtctctaaatagttgtccttgatagttcgctcctaaaaaaaagcactagaagcaacaaaagtaaccactcctaaaagtatttgttagttatgaattttgactttttagggcgacattatcactcttaagagtcgccgctaatatatttaatatttaaaaacaataaaaaatttataatataataaatatatatttttacaaatgaaaattatattgtacttttaacattaataatgttagagattttattacaatagaagaaaatcaagatattacaactctattgtaatacaatacaaggaccaacaaagagattaaataaat

SEQ ID NO: 116362 - DNA, 1078 bp, Cannabis sativa
  modified_base (1007)..(1009): a, c, t, g, unknown or other
tggagtgggtagatggaggcggggagggtattatgggaaaaatacaaaaagcgtcatataaaattaattatatatagttttagtttaggggaataatatatgggttatttaagcatggaaattcaaatttcccattgagaagtgaagcgaagcaagtttaggttgagtacaatgaatttggtcaagcaatttgtgatcggagggtaaacttggcatcaaagctagcgaacaactatatcaatagagtataaagattggacaccagtacattaagaaaagaaaagaccaatatgaatatgggagataatgaaggtacgcatctacaagattttttttcccttaatacttttttagagcatgaaaacaagaattagacagtgcacatatacctaattagcacatatacctaattagcacatatacaaattaaaatagtcgatgagctttaaagtgcacatataattattgaacattattatggtgagtttgtttgattatatttgttttccacatacagtcatatattatcttacctttattcattattatcttatctagcttacagttacttcctagtttcatgtactaatttaacttataagctcatcacattcgttttttggattcggttaatgcactaatgttcaatcgtccagaaattggagaaacaatccttgctgcttatgccaagtactttagggctaacaaacaatcaatcccaactgaaataaattaccaaaatccattggtatgattttgcaaattttagtttatattttgaatattcaaattttatcaagttatcaagtatagttacttcaattttttcattattagtgtccacaacaaagtaacaaagaatgtagatattacataatgaaaatggtggacttgattcaatctgacaatcagtccacctatttgaatgaaacattaagtaaactatgtatcaaatattattaatattgaacttatacattttgtcactataatatatatatatatannnactagcaaaaaactacgtacgaggcacgtatactaaatttatgttagtttttttctatgttatttgaaa

SEQ ID NO: 116363 - DNA, 2727 bp, Cannabis sativa
ttttgtagggatatgtttggaggtgataatagcactagtcctttgttccctgctttggttgaggagaaccagcttcagtatcctcccaatgcattccctcagctgcaattatttgcagattgtgattgtgagtgtttctttctctttttgttttgttaaaaaatcttagatctttcgtgtagacgattaaaggtggaaatgaaggtgaattcttgatgtgctttgcatgagtgtataatatctttatctgcatataacctctttggtagagacaaatatgagttacattactacaagcagttaaattttgtagcaaaataaagagatttaaatgatattcacactatatctccagatgtttggtgcctagtaatgattttagtttggagagatgctactcggttcacaagcttccttttattctttaaattatgtctcaacaagttgtgttagctttcttttccatcttgtttcatggaccaccaagctacattcttttggggttaatgcatttatttagcaccattattaactacattgctagtgtgctgtcattggagttgttttgcaactttattagaacctttacttctctccaacctcaactcaaaccccaactccaactccacctttatcctctttggtaaatagccacaacaatctgtggtacacccaagctttgttatctttccaactccatcatctccaccttctgagttttatcctattatattacttgtcttcttatgtcttttgaaatagtttttggctgccaacttgacattgctattgtatgttttgtcattttccctccttgacatttttatcatttgattatagttgttggtttcttttctttattacctacctttccaaattatgataagtatctcagttttggggtgtagtctctcatgaatcaatgtctccatttttcacagatacaggtggctgcaatgttggtcagatgaaccatatggcaaacaagcatatagcttcaacagacctaccaaatcatagaagactcccagagacagattccaatttagtacaacaaaaaaatctgatatctattaataattacttttgtcaagataaagctggtcactctggaagcattttgaacccaaaccctgtgtccaccggccttaaactttcatatgaggaggaagaacacaactcttctgttacttcagctagtgagaatttaaaagctgttctccctgttatttcctcagtcaatgacaatctgaaggtcgagattgatcggcagaaagaagaatttgaccagttcattaaagctcaggtaattcacattgtttttcaaataaatcaacttacattgccattcaacttggaacattctaaaaaaatatggagtaactgtttagacacatcacacataacatgatctattatgttttaaacaagtttattcagttcgttaagtttcaaggcaatgtttccacaattcatggtgtttcatcgcattgtttgtccataaaggtgcaaattgttaccaactctattgaacttttaccaaccatttgcctttcttggcttattccattttgtaggaagagaagatcttcaagggtgtaatggagatgaggcaaagacagacagtttcctttctaaacgcagtcgagaaaggagttaccaggaagttacatgaaaaggaaactgaagtagaaaacatgaatcgcaggaacaaggaactaatggacagaatcaagcagatcactgtggaggttcagacttggcactacaaagcaaaatacaatgagtctgtaatcaatttcttgaagagcaacctacagcaggtgatagcacaaggtgccatacatgtaaaggaggggtgcggggacagcgaggtagatgatgcagcctcttacacaaacatgaatcatctcggctctgtgggtgtctctggatctgcggttactggtaaaccgatcaactgcagagcttgcaaggttagagaagtttcaatcttgttgttaccttgtagacacctttgtatgtgcaaagattgtgaagggtttattgatgtatgccctgtctgcaacatagtgaagactgcaagtgtgcaagtatacatgtcttaaagttgtaatatgttaatgagggaatgtatattttctttattttattaatacacttacttgtaattgtctttccctaattggaaggatttatttattttatttatgatgtttactacaacatctaatgattatgggtttcattagcagctcagtcacaaacacatagacacatcatagtctccattcacttttggtaatggcaaagaaaagtggttgcaatcttggtggttcttaacttaagccagctttcttgttgtgtcttcttttgtccctttatattttatttgaaatttcactttgtattaaacaaaacttataacagggaaaacaaaaaacaaagctttttgtccaattatgagtagcaaacgtgggaacaacaagatggtattggtttttgtgttaatgggaagtgcaatagtatatttatctaattggaaaaaaaaaatcaatctttatcaaattaaatctcaactgggagtaggcctggccggctctacatcttatatacattaaatatttaacctggtatctggtttggccctttcatcctattgctgcagaactatgggaaatcaagttgggacttaatttaggtgccgtttggtaaaatttttgtttt

SEQ ID NO: 116364 - DNA, 2735 bp, Cannabis sativa
  modified_base (2690)..(2709): a, c, t, g, unknown or other
aatagtggttttgggggtttacccccagaaatttgggttgtgggggtttaatgaaaccaaaatgaaagtattgggggttttgccgccatttatccaaaaagtaaacctgtaagagagggtttgttcaattttaaatcattatttttaataaataaataaaaaaaaactaccacgaaaatgatataatcaatcaaatcataatttttacactcattaaaataataaaataaatacataggatagtaaatatgtaagattaaatttgttcagctttaataatcatttaaaaaaaaataactgccacaaaagtaacataatctatcatatcataacttttacacttattaaaacaataaaaatgaataattcatgagaagacatgtataagttaaaaattaaaatagaacaacaaatttatttagcaaaaagtcagtacacaatataaaatataggcagtaaaaatatagcgttcaacattaaaattaaaataaaagtaggaaacacactacccaaagtaaatttcccaatattaaaaagccaaaatatatgttaaattttttttattattaaataaattcaagcatactaaatatgctaaatagattttaataactacattagtatatctagggacttttatatttaacactttatttttaatctaattgtcaaaaataactcaaactcaagcattaataatatatatacatgtattggaaaatttacatctagttacttttattataaataattactaatatataatgtatagtttaatgtacccaattttttttaggatgataattacttatatattaagtggtagctaaatatatattttgtttttgaattttaatttataatacttagtggtagataaatgtattttttttttaattcgtaagcttttattacataaattatacccattcgtaacctacttacaaatataatataaattaattaatttaaaataaaattactactttttgatatccaattaaaataaaaataataccatgtgatttttatataaaaatcattaatctatacttaatagtatctaaattaagataataatttgtgtaaaaaaattaaaacaataacttttaactagtacctaaacgcttaggtaacttattaattggtatctatatacacataaaataattagtatccaatttggattaaatactagttagtagttaaggtatatatattatatgtaaaatatgctttaaaaaaaatatgtaagcaattaaaactaaaattagttgactaaataatcttcatagtcaaacaataaatatataataagatatgctataaaaatcttgtctattaacatgatgagaatgtttctctataaatttctgtcatttctttgtctttgatcatgacatctagtagttactcagtgaaggagttggaggatcttcatgctagtatcgagattgaaggagaagatgatgctatcactacgttgattttgaagaatctgaaactaagattgctaatgttgagttatgtattgttggaaggttcctcacagccagagcaattgattacgatgtcatgcgccatatgatggcctctctttggcaaccgggaaagggtatgtatgtgaagcaactggaaccaaatcgattcctatttcaattttaccaagaaattgatttgaatcgagtcattgaagggagttcgtggacctttaaccgtatacaatttatttttacaagattgaaaccagcaaacgatccacgtatagtatctattaactctcttgatatatgggtataagttcatggccttcaatatgggtttaagtttgaagctgttcttcaaagggcaggtaatttcatagggacatttgttgaatttgacccaaaaaatttatgaggtatttggagagactatatgcgtgttaaggtcaccttggatgttaatgttccattgaagagaagaatgaagttgaggcgtacaactggagaggaaggtttctgggcaatgttcaagtatgaattccttcctacattctactttatttgcagaatacttggccactccgagaaattctgtctgaagcgtttcgatactctagcagatcaaattattcaaccttatggagcatgggtgagagcccagccacgtcgacgacatcatctcatcagaagccaatggttgcaaaacggagatgatgatgaatcagagtactctgctggaaccatcacgggcgtgaacaggcagcaaagcccaatcaatctcctatgatcaaggaacaaatcgcaggagactagtgagcattaatccagcttagcgtcaatcaccacaggtcaaaaggaattatggaatctgaagtagttatgaggcctttaaatggaaatatttccattaactcaggagcttatcaattagatagtcttgatgaggaattagaggaaaatctgattgtggactctaagaggagacgcacaagattagagaggaattctaagactattgattcagcccaaaatgagccaaatggagtgaataatgctagacttactaatgaagttatggaagaagacattagtggaattaatgaacagagagctaatcttcaaatgggctcaattccttgtggacattgtgcaaatccttatcacactaatattcttgtttattgttgtcaacacagtggaaagtannnnnnnnnnnnnnnnnnnntgtattcctatgatttatcaatacac

SEQ ID NO: 116365 - DNA, 2927 bp, Cannabis sativa
acaactaattgtaatttttgtgactttaatacttttagccacggatattttagtcacaagttttgttgtgactaaaaataagattttttgtagtgcaactagaccgtaatcgaattttcagttccacatcatcatcgaatttgacagtcggtttcagtttcgatttttgaaataaaaaaatagttaaactaaaaaactgccaaaaaccatccaaaaccgccaaactgaaaaaccactaaaaatcgccaaaaattgtacggtcaattttatacggttataatttcttaacattcagttacggttttcgtaaaataaaaaccctaaccgaccggtcagttattaaattgtaaaaactgactataaccaaccgattttcacccttacttacaaccaacagtggctcgctgttgcaattcaaataacactttatacattgagataaagaaatgccaaggggcactagcatattattgatttaatttaatattgagtcacatccagtttaatttaataaatagtataaaatattatggtgttatagagcacctccaacgttaggtttggtgcaaaaattaggtctaatgtatcactatatatctaaagagtgtaaatggattgggtcagatttgatccggctatggtccgacacaatccatatcatataatgatcaacttcgctagatcacatacccagatcggatcagatctgacatgacttatttggattggatctaatccgacctcttatctttttttttttttttaagaattttagttttacatctaaacttgtaattttatatccattttaattttgtattagtattatttaatacaatcttatatttggtatgaacttgtattaatagattgtgcaaagctataatatattttcaataaactcgacctcaacaccaactacaggttaggtccaagttcgggtttgggttcgggtccagggttcgagcctgggtccggttttgggtcccaggtcataggtccggggctcgggtctgggtcccgagtctattgtcccaagtttgggatcccaagtcctgggtcccgagtcctaggtacgagtctgggtttgggtcccgggtccgggtctggatttgggtctcgggtctgggtctggatttgggtctcgggtccgggtccgattttgggtcatggtctgggtcttgggtccgatgtccggggtctgggtctggcttcgagtttgggtccggatctgagtttaagtcttggtcccaagttcgagtctgagtcttgggtcttgggttccaattcgggttcgagtccgagtctgagtttaggttcaggtgatctgggtctcgagaccgactctgggtcttcaattaagttttttttttaatatattaaaaccagatcagatcagttctgatccgaaaaaaattaagtggcacagagcggatctattataagatccaataagtatattaatgtttcagatcagaaataatctgtcgaatcggagctctgacccgatccagctaaatagatcttttttgacatacttatatatcttacactattatagagtgtgtactatagtccatggtatccatcttttcatatataataatattatgtatattgcaaattatacagtgcaatccttagctaaaagaggtgtttcagcatttggaagaaatttttactcatagccttttttcctatggtcatatatattgtaattatttaaaatattttgcaaaattttaagaaattctgaaaaaatttaatacgctgaaaatatatttcaaacagtctattgtatatgttactcttttacatgcttgtgaaatatattgtttgaacattgctttaatttatgttactacatgcaatatgatattttaatttatcaggttttaataatttacaatattattttcatgtaactaattagtatttttatttaaatcattaaattaaatataataattgtgatattttttgtaaattaaatattataataataaatattttattaaaataataatataataataaagatttttttagtttaattttttgtattgtagttggtgcgaaacgaatttttgatactaaatttaacgttagtgtgacaccaaatttattattaaatttggataaatttggagaagcttatagctgttagccctttaaagtgtctaatataaaataagtagggataagttgagggatacttttttttttctttattaataaaaaatatcctcatattatattttattaataagtacccacttttgtgagtgagttgcccaatatatctttatcctctacttagtgcaactacaatgagagttgctatacttgtgactgtcagaaagtgtgggtctgtttgcccaaaattgttgacttttcaaatagataatataagcatattgctcatgctcagcactgatgctcatatttttttatttttatttttttttcttttatttttctttctgattggttagtgtaaaagcttaataattctagaactgaaacgttgttagtgttggaggtgctcttaagtctatcacataatttacattaacttgagggatataataaagacattattatttataaaaaagtatatagcttaaaaataaaaatataaaaataaaaataaaaattaaagtaaacaaaataaaataagtatagcttcgacctttcctttctctctcttccatggcgaagaaaagaaggaccgtttgaaagccagttactcatgggttggatcctgacccgattgatgatgcagacgatggagaaacggagaagacaactgaaggagacactacagaactagataagatcgctaagatgttgaagactgatgagatttttcgagcagataaaacctctgggttcatcaaccaagtcgtcgaacaggggcattcgaa

SEQ ID NO: 116366 - DNA, 1526 bp, Cannabis sativa
  modified_base (1420)..(1460): a, c, t, g, unknown or other
ctctctctctctcttttactctctttattagagagagaaagtgctcggacgtgatagcaattagtgaaattgttaacagttcgaattaaaagtctctgagttgttgactattgaaagagaaatattaatgcacttatcttttaatctgacggttgagctacctcttgaaattattcattagcatattattccttgtggaccatatatttcaacggttgtgatttattggatcaagcagaagtgattaacgtgactgttgctgcgttttactggtttgttattgctaattaattccacgacagtctaaggtgtgaacataagccacgtgacaaggaatattcacgtccaactaggagatttagcataacgtaattaactattagaaatggtaaggagagaaactcatctgtgtgaggttagtaacttgtgacgattcatcgacggtggagaatgcccaatcaaattatggaatttgacttttagaggtattgattttattttatttttcttttcgaccaacttttgggcatggattagtgcgcaatcacgggggtgagtatagtgtgtacgatacgaaattagtgtttttactttttccttcaacagtaaccctatgtttggtatgttggaaaaatggaaggaaacataacttaagtgagacaatgaagagattgtaaaaatgagtgtaattggtatgagaggaaaatgtgtgaaatagaaaactataagcatggactaccaaaatttatatacccacttttgtccgacgaaaataaactaacaccaaaaaaatatggatattcaagatagacaagaatagtcttttacttaacagtgaatatccacctagaataaccaattctcaaagaaaaatttgtgagtatgcaaataataacagtttaaaagtaaataacacaaaaaattatagtggttcagtcagagattagtctgcttagttcacttttagtacgagtgttttgttcctttattcactttggatcaccctttatataaaaagtaggtgttcctttagattataaaacttccaagttatgactgtttattacattaattacatttaattgaaaagcgaaatgtttaaagaataaatgaaagaacaatttcgaccgttcttgattgatttcttgaatgtatgcgacttgggaagttgtatatcagccgctcatcttccaagcacacgagcttgtaagctctctacagtattcctttgcatataaggtttttggacctaaggtattctcagggctatcttatgggtggatgcatgcgattaccctgattgcatgtatgggcatttgtgtatagaacataaaacctgcgagttcttagtgagttgtcgcgcatctgtcttttggacagggcatgcataaagacgcacactacaaaaaactgctacttnnnnnnnnnnnnnnnnnnnnnnnnnnnnnnnnnnnnnnnnntaaatgtgacttttagtcgcaacaaaaactcacttgtgactaaaacatagtatttagctacaagtt

SEQ ID NO: 116367 - DNA, 1472 bp, Cannabis sativa
gtaaaataaatttccaacagtttgaccaggcagcaggcatttcgtcattgaagtcaacagaaaccaccttcccagcaagagcacccaacagttccccattagcaccggaaaaatactcccgagggagaagataaaattgaacccacacctggagtgaagagatcgaaaactcattaccaacccgtggagtccaggagctgaaaaccaaggtatatccttgaacgcaccagggggcattatccaaagcccattgactatcctcagcatttttgaagctaaagacaaaacagttaagattctttgaaccttccaaggcaccaactgtcacaggtctttcccaagtcttcaataaatattcttgcaccttagaaccctccgcaaacatgtgagcaaccaacttcccataaagacaaaaagaggaaagagctttaactgtcgaggcacatgggaccaaagccactgaagcatcaacaatcgagatgcacttacctttgctccccggtttggtagcattaactaatgccataatgacagacaaaagattccaacacacccaaaactaacatcaaccaccacaacagacagattataaatcgacataagtaaccaaagtcaaagaaaacactcaccaactcaaaacaggagacacaagaggaatgaacaaaagaaaacaaaccaggtaaagccacactcacaaaataactcgaaacaaagagaatgaaaggacaaaagcacaacactcaacagaccagaagaaaatcacacctacaaaacccaccagacaaagggaggaccttagggaagaaaagtagaagacctttctccatcctcttccactcgtagcactgctaaaacatatattttacatttatttctacaccaattttaaacgttcaatctaaaggctcattttttttttttgaaaaagtttgttattataaattaaagaaaattatttacaacaatagagaaaatggcatagggaatcattatccaacactaaaatttatttgtcaaactatgaacagtttagttagcatataatctaacatgagatacacaaagagaagggagataagataaatgattttaatatcaatcaataagtcttgaaagtaagaaaggcttgatgtttgataattaatagagttcaccaatactaacgtgttgacgcgattttttatcaactgatctaaaaagatcgtaaaaataaaaaggattgcgatcaattaatttgactaaataaaatcacaataaataaagtggcatcattgatttggttgaaggcatcaagtggatgaatgagagcatcatttttcttttatagtgtttcaactagggcttaagactgaattatatggataacaaaagaataaaatactgggcaaaaatcacttaatggccgtacactgtgaccactttctagttacaattttgcaactttatttcaaccaattattcttctttcaata

SEQ ID NO: 116368 - DNA, 2375 bp, Cannabis sativa
cacgtggtttattttgagtatttttataattgttgatttatttttacgaaagatttttataaataaattaaattttatttatgaagaaaaaaattaaaaagatttaataataagaatataaaattaatttttctaaaaataaaattaataattttggtaaaaatatctaatttaattttggtttaaggtgttgttaaagcttgaaaccactatacctactgtaaacacaaattatagaaaaagaagactcatttgagttcacggaaatgagataggattggtgtgtgtgtttagtcttaatctaatccattgattacggtgaaactaaaaagataattgtctaatcagtcttaattgatagacaattgaatttggagcacctaataaaagaaaaagtgaaaacttgttaagagattctattctaacatcactttcttatctaattcctcttctccaattacattatgaaacacactaactattaattcccatttaaaacaacaactacgacaagaaaccacaaagttggctctaacaacatatttagcgtgccaatcctgacactgagtggaatgaattgctttcaagtttcaaccgtatacgtagccatctttattgaatttacattaatcttgtttatattaaaacgtgtttttgtccaaatacacatttaaaaaaagtaccatatattaaattgcttcttctaatcttttgtgaatttattttattgtcttagagctgtaaatgttgctgctgatattttgactaaatttgttctataaacaacaactaatacagtctggtggtctgagtgtctctcttgtatcaaaaccgttattattgctaaggccatctatcaatgatatcttttaactctcagttccttaaaaatctttgctctttggtagtattttctgaagctattttttcagtaccatatattttatactttggctaattaataattaattgttacctttgtaaaaactcttccaaatgattaaatttttaatattcccaaattttctttcattgtaataattatctattttttgtatagtatatatattttaatttatttaaatataatatctgaattaaaaaaaaccaaaataaaaaatatttttttgtagtatcggaaattaataaaatttataaaatattgataattttataaaataaataaacctttatatatataattccttttttttttctctttgtttctaaaagcatccaacccccggaatatatgcataatgaattggttttatttttttttatgtaaattaataattaacataaatattaatttcatataatatttattttatatattgagtataatatacttacagaggtgtaacacaacgaaatacgacttcttctgtatattcaaaaattctagagagagaaggaaaaaaaattttccgatagaaaataaaaagctcgtttggtacgccatattgtattatattatattttattgtattagtattatttaatacaatactatgcttggtagtaacttgtatttatagattgtgtaaagttataatatattttcaatacattcgacccaacaccaactacggatcgagcccaggtctaggtctcgagtccgggttcaggttcgggtctaggactgagtctgagttcgggacccgagtcggggttctaggtctcgggttgcaggtgtgggtctggatccaggtctcgagttcaggttcgcgttcgggtcctgagtctggatcagggactcggggtccgggtccgaatacggatctgggtccaggtccggggtccccgtccctgttcaggtccgagttcgggtccggtttgagtcccgagtctgtgtctaggtccgggtatgggtcctacgtccgagtccaggtttgggtctagttttaggtacgagtcccgggttcgagtttgggtccgggtttggggtccagatctaggatcggggtccgtggtctcgggttcgagtcccaggtctcgagtctaggtcgcaggtccgggtttgggtccaaggttcaggttcgagtctgggtccgagtcctccgagtcctttgagtctaatgtccaagtttggggtccgaggtctggggtttggggtccaggtcgtgggtctgggaccaagttcaagtccgggtctagatttgggtttgagtttgggtctggatctgtgtctgggtctggatccgtgtttgggtccgggtctgggtttgggagtttgggtttgggtccaggtctgggtttgggagtttgggtttgggttcgggtccgggtccgatccggaaattggtgttgaccccaaatcctttgtaaatattataatacaagctaatacggaccatttattatgtattaaa

SEQ ID NO: 116369 - DNA, 2738 bp, Cannabis sativa
  modified_base (595)..(599): a, c, t, g, unknown or other
  modified_base (710)..(713): a, c, t, g, unknown or other
atccacataattattaatatttataacatatgtataattatcaccctagtaattgtacaattactttcaaacacattcttaataaagattataaaaaaactgttaattaattataggacaccaccttagagtgatagcactttagtaccctatagtaatgctctaaaaaatatgttttttctattatgtattttttcttttaggaaaaagtctcaaccaccaagcatcaagagtaataagcattttaaaaaagtaggggcgatgatttattcaaaaatagcatcaactattaattaattatagatacaactagtatcttctagccaccaaatcatattacgtaaaaatcatctttctttacattttaaaatataatctaccaaaatagtagaaaaactattccattaggtcgtgttcaatagttgtaccaaattggtgtatatatatatatatatattgtttactaatttggtataaaatatagagtaatttaaagcataaatatcttttttttttttttgaataaaaaacataaatatctaagtttaactcccagttgcaaatagatatctaagtttaatttttagcggtaatnnnnnttaagttatatttttaaaacttctgtaggaatctggctgttaagtattaagtaaattggcacgtgacaatccctgattggttcacgtcatttttttattttttttaaaaannnnagtttaaatataccaataataaaatgacatgtggataatgatttgacatttaaggaccaggtacctacatagttccagaaatataacttaggtattattaacgccaaaaattaaaattagatatttatttacaactggagttaaacttaagtatttatgtcgcaaattactctaaaatatactacttttaatgcaacaattttcatgattcaacacccaatataataccaatatgacacgtaataaaaatattttgtttaaaagatctcacatttttattatttacattcattaatataataataattaatttataatataattgtcattgttatctaaatttctacacaaggtggcgtgacatctacttaggtgatacgtaacagatttcatgacctggacggaagattctacttttgatgaactatgcagggagattacatactcaaagttagtagaagttggaatgtccaagtaagtcgtgtgagaacacccaactagcttcaacatgtgagcagctcgcatgagccgaccagagggtgcgagttgagtattttcagaggaggtatcttacatatcttcatgtttatccctaattttacgggatggatatgcagtatcaaggaagaaaagggcaatctgccttgttttccattttgctcattgtaattatagaaagtaaaaagttttctcattttattgcctattagttttgggaaactaatttatatatttaatccctataaatagtagagtcatctcactatttgggagaggaggaatttcactcagaaaaaatacacgagagaaatctagatttaagagtaaaatactcaaagattattgtaagagctttcgagagagatcaatgcattcttgttcatctactcacaagttaatacaattaaatgggagtaagctattaccattatcaaggggtagaacctctataattctggtattttctttaatttatattatttatatttgttattttaattaattcttaattgctttaatttgactcaccgtcgttggctaaaagcgatgtcgatattttggtgctttcattgagagcaaagaaacacaagtctttgttttaagtctttacaggatacaagatggttgtaacaatacaaaggggaaattagactgaaattacgaattcaatgtctacaaatcctaatgtgcagatgcctgcaaacctcagagatccaatcaagatgtacggaccccgatctgattaatcctcagccaccaacaagcctgcaaacagtaggccaaggagtgactatcccctagctgggttcactcagggcgtgtaagaaactggaaccactagtactcggaccgagtaaactgaccacggtactggaatcccatctgctacaaattctcaaaagtcaatcagtgatgacactgagctacaaaacttgcgagctgcactagagaaaatacaaggccacaataacactcttcattacgatcaacaagatactatagcaggtataaattttacttttgaagaacaaatacgctagttcgaagagtggagggatcgagagataaaatcatgagagcccaacaagaagtaattataactgttccaggcaggttgtcgtactgatcaagagagcctatcgagtaattataactattcttcactataagcttgttcaacttccgataatcgatacacatccgaagggatccatccttcttcttgacaaataatacctccagattacaccactatcgtacccaccatcagaccactatcgtaccccatcgtaccatatacaaaaaaaaacgcacacacacacacaaaacgtagatttcaccaaaactcaattttttaccaaacaataaacaaaaaattcaaagaaactacatatcatttgtatgtccgtttcacagtggtggtcgtgggtcgtcaaccacgcacttgatagaaccagagagagagagagggagggttgtggatctcggtcatgcaacaaagagaactagagagagagagagaga

SEQ ID NO: 116370 - DNA, 1589 bp, Cannabis sativa
ggttagaaatttacaaaggtcgatatctaatatgaaatttaaaaagaaataaatagagaataaagagaaaaatattgctttcttttcttgcatggtttgggaaaacactatacaaatttatcctgaaacactttctatttgtgcaagtctattttagaggtttttagagaaagtttacattgctggattgcaatataggttgctaaagttagaaaactcaatacattttgagtaagagtattagaatttagaatggtattaaaatcagttgacttaattcttataataaaatgctgatatggcaaattatcaatggttaatacacccaaatggcagtatctgatctccttacaaggtcaacattagcaataaaaattttccttcctttatggaaaatattaggtcacctttttgtttgtcaacccatttcttaccccaccatatacatatggtaaaggaaagaatcaatcttaattttgatttagaataattattataggtactatttcttttgggtaaatttttatttagggagacaaaatatgctgttggcactagtatgtaattataaattaagatactccaatataacaatatatccagttatatggtttcaggttggtaaagtttctttcttgtatataaaaatgtattttatgtatagaagagaacatttaacttttttcttttcttcctttataaaaatgttatgtttcatacaatacaagtatagaagtttgttcacatacaaagcaaagccatcttttttattattttgattgataattttgttcacttcagattgcaagctgtattgcatagtgaaaaagttactctatagatacaaatatcaagacttgaaaaatcaacattatcatgcaaaaagcagtagcaatatattagctagatgcaagctagttttaatctattgactagacatttgtgaaccatactacgtctttaaattagggggtatttctttatattaattaatttattagcaagtagtgtatacatatagattggtgtgaagtaataaaaatttcttcttacacagcaatagggtcttgtcagatgtgattgaatgtggaagaatcatataattattaggggaaaggttaagaggataaggttcatattcaactttcaagcatttgcatacaacaaagcagctactcttagtataatataataaccagaggactctattttttcttcattttttttttctatctttccaatgacttaagtgtttggacagaattatagtgtcccaacattaatgttcctttttttgcaccattagacactaaacactattgatagtcaatataaacatcttgtatcaagtatctacaatctactagtgattttcaaattttgtcttcttctaaattttatattttatttcctcttcatttctccatcacgtgattccactatgttatatggaatcaaaatacaaaataatgctctttttttatatatattattaaagatgcaaagataagtgtattatcataaactgtaaaaaagataattgggcaaggttctgtgtcatattttgcaaagagagagagagagagaga

SEQ ID NO: 116371 - DNA, 919 bp, Cannabis sativa
aattttttgaaaacaaaaaacaaaagacaataccaaacatgctctaaggttttttttccttgttctatcgtcaaattcccattgtgcagcagaaaaccggaggtctctcctccaccgtctagactccttccagtgagtaagctccttgaaacctttattttttctttatcttcttgcacttcatatatgttccaccattgataaaactctacacgcctacaatgcggtttttagtaaggccttgaggtgccacgagttttacttttcctctaggttagatgaatgtaggttttagtttagaaaggtggtgcctttatttgtttggaactcttaaatttttaggttagggaagaatctagagactcaaagtccaatttattctctgttgtagaatagggtgtttttatctgttaatcaccttggctggcgcatatggtctgttttaccctggccgacaaattggatgttttctgagtaatattaggttgttcgaatgttcacctctctcttacctttttgcacaaatgaacctgagtgactattagagaggtgaacaccaaatcgatgcggaccttcttagtctccttttcgaggattagcctacactccacgtagatagttctccatctaaagattctctggacagttctacgggcagttttcactttaaggtcagtagtggttctcttgaaccagagacataagtccatcactactctaaacatattgaaggtgagatctatggtcggtttgtttgggaactgaatggaggctggaggaagttccttacaactttttggacatacatttttcggctaggtgtcccagacaacattgctagaggggcgtgcatcatctgttggaaattattttaccaggatcttagatctactagcaagtatgttcattaacatcctaa

SEQ ID NO: 116372 - DNA, 2201 bp, Cannabis sativa
  modified_base (1290)..(1303): a, c, t, g, unknown or other
  modified_base (2130)..(2166): a, c, t, g, unknown or other
aaagtaccaaccctgtactcgtgttggtagagccattattgtactcccggaagttactaagtgttgtaccacatgcacgacataccccttggtattcgtgtcggtaacactgtaacaactctaaaaacctacactatactaacacccttaaaatcacataaacaattagttttagtagtgtaaacaattaatacaagcatacattcatatatacattattatgctatcttacctcgttccgggctcaagttgccggtcagcctgagtgaaaacgtagcttgacgttttacatgaccctaaaccataacgttcaaaactcaatgaaagacacgctaaaatacttattggggaattcatacagaatagcctaattaattatatcaaactcaaataaatctccatgatatgcatattataaagaataattaaatctcatgcataaaccctaattatttaataatccaaagtattaatcatatgcggtcattacatcgataaaccaatatagactcgcatgtcttggctctattagcttgttatatgatgttcgtataagcgactttaaaaggatgcatacatcctagactcgactagtctcgaatgcatcctaagcctgcgagcttgtgcaagaatatgaacaaccaattcacgctataaaagtcacatacgttgctgtatttagtgaattaagctggaaattgttcttcttttattatgtttacgttttttagtaatcaatgtatgaacggattgataatgaatgcaatccttgtgtaaatgataggacacttgctttgtatataaaggagtgatccgccgtgaaatagataagacagaatccttgcaacagtggattaagcagaccgtgatctaactgaaccactatactctcttttgttcattgtatttccagtttttgcaaagtatttttgtgttcttaatttgaatactcgctgttctaggttgagtactcgcgtatattccttacttattactattattattatttatttttggtgttgtaaaaattccttcaacaacagaaaatataccttagaaaaataaacaaagtcatcccttgcactaagaaacccactctctctcctttcctctttctcttctgtctacctacaaccatcaataaaaacaaccacgaaactttgacacaataagaaaggaccattgacacattttttttttaatgttttcaataaaaaaaattatctaaaacactaatttaaaaatggggaattactcaatatactgtttttttaatttttttttttcaannnnnnnnnnnnnntttctaaagtggttgcagtgctagttgcaataggtgtttttatatgattttttgttgcaatttaggttgcacagctagttgcaataggagtttctatgtagagttccgtaaaaatacaaaaaaaaaaaaaactgttttgaagtttaaaaatgaaaattctctttaaaaatttccaacaaatcaatattttataatttactaggtttaatatgttaagagatagagacaatagcacttaactctaatgctatattggaccacatgaaaacatggatgaatgaagaggcccaagaccaagttgtgattttagctcatggaacaagcaataacaatgaaacgagaagatgtgagttgcaacacaatagaggaagccatggatcatcccaaaaaaagcgagccaacccttctaacttcgagattttataatgatgttgtcacgctaaaattgagagaggatgtagctctattcttctgttatgctttttttctatttgaatctaaagtataaaaagactcttgtaataatcttgattttttttttttgaattaaataataattgattcattgggagatttgtcttgtctcgaagattggtcattattatcactagttctttcattgcatcttcctcactatgaaggatgagaaccttgttacattgattcaggagttgcattcaaagttggacctcaagctccaacaatttaaggacgaccacaaaggagagttacagtcattaatgagtgaataattagctcaaacagaggagttcttagacaagtgtgtcactcgaatggaggagcattttgttgggttttgtgccctnnnnnnnnnnnnnnnnnnnnnnnnnnnnnnnnnnnnntaataaagatcagaaatcattttatattgcatggt

SEQ ID NO: 116373 - DNA, 1544 bp, Cannabis sativa
aacatctgatccgatccgattggatattcaaaaataacatccaatccgatccgatcacaattgaatatccaacgtttggtggtcggttataattggattggtcagattttattgaatttaaacaatttatacacacccctacctaccactttccttatgatgtagagcgttgtggcttgtacttgctacctagcaatatgtgggaaagaaaatatcaaaattccaaaattttaattagttgttgaatattttatttattaatgtgatcttaattttcttataataatacaagatcacattctcaataattaatatgaatttttttgatatttacataaattattcaataataatttaacaattcaaatataataataaatcattgtatttatttattcaaagttaaaataatatatgtacttacatacttttaggacacacttttaataggggctggcaaaaagggttggatacgataacacgactcgaaactcgcacgagagttaacaagtttggatttgccttaaaataggttcagcttgtgttagggttgactcgtttaaaccgtttaataaacaggttttgtttgggttgatacggctaacacgaaattgacccgttagtgatatatttaaagttattttagtactttaacatgtcataaataggttataaacgagttaataaatattttataaacgtgttattggttgatatgtttgaacaaaatatgcttataaacgggttacacgagtcgtgtcgtgttaacccgtttacaaaatagatcgtgttcggattttattttttgacacgattattaaatgggtcgtgttcgggtcgataatatacttgttatacatgagtctcaacatgacacgaacacgacccgcaaacacgaattgtcacccctaactcctaacaaggggtttgtatatacattttaattaattacaacatatatttgtaataaaaaataatatatatttatagacatattattatttttggtgaattggcataatggttaagatagattgcatataatagaagtaaggattcaaatcctacatcctcactttaaatcctaagtctcgactccgaacaattggtgacatgtgtctttgacagaaaattaatatttaaaaatattagcaaatgcaattataaatttagggtaggaacaaattaatcacaactatatatattatcggacaaaactataataatgaccacttttataaactatatatcacgatgaattatatattttaacacataattagaaataagatatgatactataattcttttacttgagatcattatagtcacgactcacatctctaactcatatttatgatacatttagaaattgattgcaaactttatcacataaagggatctaggacaatatgtcgacccagaataaatagggggaaaaaaatgagacaatatgtttgtttagtttagttttttttttttttttggaaagaattgaataatttatcaaaaggaataattacataaggcaccattttttgtaa

SEQ ID NO: 116374 - DNA, 1135 bp, Cannabis sativa
caagaagaaaagtgtgttgatcttattgataccaaaactgttgcccagaaaactcttcatgcaccatgggaaaattcaaatcgtcttagtcgcattgttatgtaaagttatattccagaacatttatttagtggctttccagacactacaaatgtcaaagaattttttaatgttgtagaaaaaccatatgacattggcaaaaacgctgaagtaggacatcttatggatgaaataatagctattaagtatgatgaatcaaaaagagagagacttcaatctaaaaaattatgaatgttcaaatcaagttgaaatatcataatatttctcttcctgactctcacattattcatcgtgttcttcgtgcacttcatgcctcttttagctttatcaaaataacttacaacacttataataaacacatagagtgtcagtaacctaatttctcaatatgtagttgaggaaagcaagttgtaaaaagagaagattgaatctgctcactttgtttctcaactcaagcccaataaaatgggttgcgagtgaatgaaaagaaaaagaagattgaagaaaagattaaaaaaattaattaattagttttcaaaattattatttatttataattatttttaattaaaattatgatttataattataactatcttttcatttgattttttaactaaaagttaagttgacgagttttcactgtcaacaacgtgtaaggtaatcttgatgtaggatttttttatgcacctcgcaagacaaattcatacaataaaaacattactaaaattaaactaaaagaaaccaaattaaatcaactatcttgatattaactaaagcagtccctagtaacaataccaacaacttgttatgaaaaattcaacacctatgtacacattcattttacaagtacacaattacacactacaaaacaggtcattcttgttggtcaacacgacggtcaaccatgtatcattttacattgagaaatttacataaagtactaattttggtaaattttttacacttttatgttcgaatatatgtattttatatccaaacaacataaaaataatataccaaaaagaaaaatcaatataaaaaataacaagaatacaatataaaaataatatga

SEQ ID NO: 116375 - DNA, 1275 bp, Cannabis sativa
tctttcttttgtctttgtaatcactaatcttttacgtcaaaatttatttccctaatatgctggttttaatatttatttttttccccctcacttttttttttttttgaaggcaacactgcttaaaaattgagaaatgccacttaaatatgtcatattacttctggtgtaattaagtattgaatctcatataatttaatttaatggcttatgaaataattattaaccatttatatagtgccacttataaacagtgttagacactattaatggctaataacaatgctctaaaaacttacaactcaacaagcaaaaaacaaaactagctaactcatgagctactctattagttgcacgaaaaggaaagaatgaaacaatctcaaaaagttggaaaattattatacagctctctaatggactcaatcagcacctgccaattagtgtacaactcttctcccaacccgaaggcattcaacacgacagcacagttggaggtaacaaataaagaaggcaattgtgggaaaccatcaagttcgatgccatttgcactgccaaaactttagccatttaaatagagaagagccctgacttgtacttggtttgagcagcaatcacaaccctttgaaaatcatgggcaaccacactcgaatcacaacccaccaaactcgaacaaatgaaagcatcatagttcagcaaaccaataccagcagtaggagggggaagccaattagctttgagcacaaggcgaactaatgtctcacgattacgcccgccaccactattagagagcgccaaatgaataagttgatcattgttattaatgtacaacttgtcagaactcgaaatctgatacctttaacaacagtagaggatacagcttgctatgctttcaaatagtatttttatcactagctttttatgaagttattatttattatatgtgtgtttgtgattagaattgattgtaatttagattaattattgggtttgatttgtttgttaaataataatcatgtaattggatgtaatttaaggattttatttactctaattttgacgactttcatgagatttggatgtaaatataaaatattactatttgtagacaatttattattattattagggtaaatagtgacataagtacccaaagtttaaagtttgtaagcagcataaacccaatgtttatttttagcggcataagtacccaatgtttatttttatgttatatatatgtattttatctcacactcacactctcacttttttttttttttt

SEQ ID NO: 116376 - DNA, 1610 bp, Cannabis sativa
  modified_base (47)..(69): a, c, t, g, unknown or other
ttatattatatatatatatattcaaatttttttacaaacctattatnnnnnnnnnnnnnnnnnnnnnnnttaacttgttgacagatccaatgctctgtggcagtgttacttcttcagcttctcgctagcaagaataggatgtaatggtgatgctggttgtgtactggtgtgtgcgaacgacgttggagctcggcgtagtgcagtggttcgatttgggcgcacggatggttgttggttgctgctaggaggttcgggttgattggaggtggttacgggttgaactggtgatatcatggctgagttgagtgttatgtggttatggtggtgcggtttcagcagctgggtggttcgcacggaggttgctggccgagcttggagagaatgatgactagggatgatgcttcaggttggtgagtgagttcaggtgaagtcgtgggtagtgcgagttaactgaacggagtcggagctgaaggggtcaacaagaatgttgttggtgtttgagggtcgagtgtaggtgcgacggtggtgggtcgactggagttggtgagttcgggttgaatggaggctcggtgtaggacgagaggattgctggggtaggtcgagttgggagactatggtgggtagcttcgggttggtgaaggatgcggttgggttagcagctgggttaggttgataggagatgaagtagttgctggctcgtgatgtgggtgaattgaagctcaacgtggtggcggagtcaactgaacggagtcgaagctgaaggggtcgacgagaatgctactggtggtgatggtgaagcttcgacgactagttgctactgtcgttcgagggtggatcaaattgagatggctcgggttggtgcttcgtgctgttggtgaaggatgcggttgggtggttcgggttggttcgtttgttggcgttgggttgagctgaatgtggcgtgggttgaagatggtgaggacgaactggtcagtggttcgtgtagggatgatttctgggttcgtgttggctttgtgagtggcagtcggctgagacgtgggaagtgaagatgatgatgatgatgatgatagtagtgtagggttgaatgttggtttgagcaacaagtgggcgggtaaacacttgctggggcctagttgaccaaataattgggcccgaaactgatgaaactagtataaaatggggcccttgtatctccacaatcaacttgggctcactcaattcaaaaattaagtacaaccccaagtgatttatctgaacaaaaatagacatatccaatgattgcgtcataaccaacatttccatcacatgtttttccttaacagaccactcactctattttttcaaaccccaattcctttgatcagcctagtaccaaaacacctcttttgctaagccattgatatagcaacaagatagcattctgccaccccaaacttaattcttttgctcaatttaaaattccttcacttccacagccttcttcacgtgattctctgcacaaagaaaggaaacaatttcaccatgacatttatttaaactaattatataatataatatatttttctcctctttttttcttctttttttttttcttggggtgccttcattga

SEQ ID NO: 116377 - DNA, 932 bp, Cannabis sativa
tacacaatatactcttgactggtgccaaaaatagtcttgtatctgttcaatcaaatgtcactacttcagcttaataagcctagtgaatctgtgtttactttgtggcataatcgataaggctattcttgtggaaatttttttaaaattgttctcaattcttgtaatgtttcagtcgacaagaaagattaaattttttcatgtttagcttgttgtttaggaaacattcacaaattttcttttcctaagtcatcacaaacctcttcaacatgttgtcattgatttatggggccctcacatatatacaccatcatttaatggatataagcattatatccatttcttacataccttcaccagattcacttggatcaatttactcaaaaacaattcatatgccttaaaaacctttcaactttttaaagctaaagttgagctccaattaagaaaacaaattaaggtctaccaaagtgattggggaggagaatataggtcttttacataggctttgtggcatcattcatagacacccttgtccaactatacatgaacaaaatggtttaattagcaaaaataaaacataagcatattgttgaaaattgacactttgttggcccaagcttcaatgccgctgaaattttggaatgagccttttagaatagcagtgtgcgtgcacagtaggttacctaactataaagaacaaatctcccatagaatttctgttcaatatcactctagaaacactttagtacactattatttctccacctgttgtgtcaacccaaactctaaacactcatgtaaagtccttttttggcaagttaggtgacaaaataatttttccctttttatggtaagattgctatgcattcattttcgaaatcttacctcttttattagatcggaagagcgtcgtgtagggaaagagtgtagat

SEQ ID NO: 116378 - DNA, 1310 bp, Cannabis sativa
cacacatgaacaatgtgggacaaaacacacaatttagcaattcaaaaaaccacacaatttcacttccaaacaatcaatcaacaaaaaaagggacagaaagagagttgaaaaattcattaatccttcaccatttttgttcatatcccatcattttactaaagttccaaaaaagaaaaaaatcaataactgagtttttagcacagacagtacttcattatgggtcacaaacctataaagttccattttcgaaaaaaaaatcatcaaaatgaataccaaattagacatttacagaattaaaagctaaaatttaccagcattgcagaggcggtctctacagtagtaccatcaacacgacgcatggtactggcatcggagtaaaactggtgaacatactccggctgttgctgaagcacttggtagtattgccccacaaagtacgttccaacctgaaacccataacaaccattagagacccaaagacatattaacaaagatacagagagagagagagagaggaagaagaagaagaagaacctgagcagcggtgaccggaataggaaacgaagtagccatggtgggaattggaaaaaagaaaaaccctactaaaacccttatacagaaattagaaccctagatctgccaatgaaatgaggaaggagataagatgaaattatcaagaaagagaagaaatggggttagcttaaacacaatacggtgcagatatagagatacagctatatatacacatacacaaatagagaacacgcgcgcgtgcgtgtgtgtatgtatatacagagatctgggtaatggtgaggaaagaagataagtgtttgagacaacctttgagaatccctatatatatatatgtgtgtgtatatatatagatatagatatggtggaggctgctcaacccaagttcaacctcttcttcactgtttttttgggcaaaaagaatgggcttttttgcaattcagaatctttgatagtactttttggtaattaaaatggaaaaagatatcttttcgaaattatctatgtaaaatgaattaaaaattgtaaattacaccatttcttaaacccttttctttacaagatgattatacattaagacatttctaagacctctgttaacttttttttttttaatttacttgttaaaatattatttaatttgttgtgaatatttagggtgtgtttggaaagccacaatggaattggatttgtgtgtaattagaggtaattacacaatttgtcatgtttgtctgatcatgtaattacactgtaactgtgtaattagaagtaattgagag

SEQ ID NO: 116379 - DNA, 2399 bp, Cannabis sativa
ttggctttttgatgtctgagtttattcagaagcatcatatctaaaacccaaagcaatgattatccaccctctgatacagaatcagatcatgtcccctccgtcagaccatagtagtgcacatacgtgcctctaaaactccttttttgtctgatatggcttgtctaggcaataacttttcaaggtgaaacttttgaatgatgcatgtcctcatcaacgtggaatccttcactgcactcgtacaccacacgatgggaaagtgtcttaccaacagacggtcagatcttcacgctgttgtacctgcctttatagcatgctctagtacaaaactctaggtgggtaaaaggaaggcccttacccacatatgtgcctataaataccaccattttttaggatgaaggggtgaagcaaatttgatctagctgaagctctaccaaaattcctataagcttttttctttttcaagagaaatattaggaatacaaaacaaagctagggttttattgtacacatatattgtattaatcaaacacttcttgtgaggctaatacaactgacacgtggactaagcataattaacgcatgaaccacgtaaaattatctgtttattatttactgttttattaagttttgagattgtgaatatttattttttaaaaatctcaataaacaaatataaattattatcaaatattcagaatgcactatcttatttattattattattttaggggaataataatgcactattaagctttctgtcttgacatatttaaaaaaaaaaaatagctttctgtctttacatattttttttattaaaaatacattttgctatgaaaagtctctctatatataataatatatgtatattttttgccaaaagagcttctcataatccacacatcatatcgtggacatatttattatatgtttttatcttcattgaattagaaatggcatgcactcgattttgacatatttaacaacatttttcatacctgaccaattgttataaactcataattccatcgtttttcatttttataagagagacgtattgaccaagaatactcattaattatttaaattaaattgacaattagttaattcttttttaaatgtgtttgatttgaaatgagagtgccttagttaaaagggagatagcgatttttttattaaaatttgattctatatttagaatttagaatgaaagttgctaaggtgcatgaggttttatttgatatatgatattttattttcacaaaaacaatattggactaactttaatataattcaaaaaaatttcctttcccataattgaaaattctataaatattggcattgtaaactaatttgattcatccaacaaaatcagcccaagttgattcaaagttttcagagtgaatgtaaatcaaagaaatggaagacaagcaaagtgaggttatacttattgggatatggcggagttcctattgccaaagaattgagctagctcttaaacttaagggcataccctacaagtatgtagaggaagatctatcaaacaagagtgaattactccttcaccataattctatccataagaaagtacctgtccttatccacaatgggaaacccattgcagagtcacttgttattctcgaatatattgacgagcactggaacaactctcctaaactcttccctgatgatccctatctgagagccaaacttcgcttttgggccaacttctacgaccaaaaggtaataaccgtttacgtgtatatatatccttacaaaaaaaaatatttatgtatatatatggtgttagtatatatgttagtaaatcataagaattattaattccattacaatgaactctgcttattcgatgattcattggtagatcatggtggcaatcttacctatcatcatgtccaaaggcaaacaacgagagaaagcaattgaggagatgaacgagttgcttagggtgtttatagaaggaatcatgaaagattttcctgagaaatttccctttgatggtcagaatttaggacttttggaagtgattgcgggcacaaacctttgcaattataaagcgtttaatgaggcagtggcagtggcttggagtcctgagaaaactcccccagagttgttgacatgggtcaatgctttaaaccaacatcctttgatcaagcaaacaattccacctcatcacaaattagtggccgccataatggaaaagttttcccgtttcctaaagcatgatgcatgaatacataatatttttcattaaaataccctctaattttattatgatctaagaattttaatattgtaagattttaatttcgcgtctactaatataatcaatatcaatatttattctatataaagtgtgcctatataactgaaattcttgg

SEQ ID NO: 116380 - DNA, 3403 bp, Cannabis sativa
  modified_base (186)..(188): a, c, t, g, unknown or other
aactgacaactcactcttccaaaactcttaagtggtgactcaacatatacatagcgaaatataattggtttacctcataaattgtaaattagattttttttttttttgaaatgctttttcttttataatgaaatagcaacttcattgtaatattagtatatagagtacataagagattcaagatcnnnccatacattatactcaaaaatactacgatcagagagaaatcgaaagtgtcttgaaacaatatgggcaactcgatttgctaatcgtctattaaaatgtaaactcacagaagacaagaagagagtaagatctggcagtcatgtaaaattaacctgaagagagagcttattgattggtttccacgaatgccttgaacagagatcatgttgtcggactcaatctcgacattttgccagttcatacttttaatccaactgagagcctctttgatgcttaatgcttcaacagtcgaagcatcaagattaccttcataataaccggttttagcttctatgaggtgaccagagctgtcacgggcaacaataccaaagccataagaattttcttgcagaaaaagagcagcatcgacattaatcttgatgtgattattttcgggttttagtccaaagctcagcgccgtctccattgtttgcaaagaacatagaagacaaacaagtgttatcttgaatttttctccaatgatcaagagtggtcttggccgatgcgagaactgcatttaccgtagacattttatccttccaaactgtattgttacgagcattccataatgcccaacacaacatggcaacataactcacttgatcctcttctaacaaacaaaacattttgtcaagccaactgccgaaggaagatagcacatccgagacataatttggaccaagttttgtccaacaagagtgagcaaaagggcaagagatgagagcatgaactactgtttcagcttgcaacttacatacatgacagcttgaagaaatggtcacatgcttgatgaccaaattcaggcatgttagaaggcaatcattagaagcacgccagaggaaatttttaacctttggcgggacctttaattgccccacagtttacgccaaaacccgaagttgttgggactagaatgcgggtgtttatcttcttgaagtaagttgtaggcgcttttaattgaaaaacaccttttgctatcattcgaccatgaccaaaaatcatcagaggcatgatgactcaaaggcagtcccaatatcatgttagcttcccgagggggaaataaatcacgtacaatatcaacatcccaagtacgagaatccatagaaaataaagagcttacattgtttgagattaggcacggatgagttgaggaaacaaatctattgtcactacttggtagccatggatgagaaagaatactagtagatgccccattaccaatagtgtgaatggctcccctcttcaccagattttgagctccccatatgctacgccaaacaaagcttggattattaccaagctccgctgataagaaatcagaatgtgggaagtatttggctttgaaaatctgacccaccaaagtatctggattacatagcatgcgccatccttattttgcgagcatggcaagattgaaatcgtggagatggaaaatcccataccaccatcatctttagaagtcaccatacgattccatgacatccaaatgatgctatttcctttacttgaagaggtcttccaccaaaagctagccattagcttctcgatatcctcgcaaatatcaatagaaatgaggaagacactcatagcatatgtaggcaacgactgtacaacagttttgagaagaatttctttcccggatcttgaaaggaatttgccttctcaactattaatacgagccattaccttgttcttgaggaaaccaaaaatagctgatttgttccttccaatgatattaggcaatcctaagtaaagactaccttcatccgcttcaggcatttgtagagttgagcaaatgagaggctgactttgattatcaatgttggggctgaaaaacacaggattttacaacatttacttgttgtccagaagcatgttcgaaggaatggaggagagacatgacaccttcagcagcttcattagtagcttggaaaaagaggtaactatcgttggcgaataacatgtgagtgattaggggagccccatgagcaatgtgacagccatggatgatccaatttgtttcatattgttgaataagcgatgaaagcccctccgcacatatgataaataaataagttgaaagggggtttccttgtcgaatgcctcttgtgggattgataggcccaatataatgaccatcatgaataacattgtacctagccgtggacacacagtgcatcaccagatcaatccaatgaatgtgaaagcccatatggatcataacttcccaaagataatcccattccacgcggtcataggctttgctcatatcgagtttaatggccatatagccttttcttccttttgttttcctcttaagatagtgcatgacttcaaacggcaccattacattgtcatatataagtctgccagggatgaatgcactccgagtagtggaaattatctgatcaataatgttgcgcattcgattggtaaggacttttgagaccactttgtaaatgacgttgcagagagcaaaggatcggaggtcgctcataaccataaaattcttcttcttgggtatcaatacgaggttggtgagatttaaatcagggggaagggtccctgtcacaaagaactcaatcaccaaggatgtaatgtcgacccctacaatgtcccaatgtttttggaagaaatctgaattcattccgtcaggtccagggactttgtcggagtgcatttgaaacaaggtagtacgtacttcgtcggttgtaataggctttaaaagttcctcattttgatcaccatttattgagaaggagatatcattagtaatggagttttaagcatgcccttgagcaccatacaaatttgtgaaataagcagctatcaccctttcaaacccgaatcccaattcttttgtaagagaattaaacttaattttaatcattttaaaagaattaaaagtaaatataaatgattaaattaaaaaaacatctacgtttcaaaaaaaaaaatctccattaattgttaggtattatgcattatttattgttgttcagatatataatatatagtagatatatatatttaattaaaaatattcccaaatgtagtatcgttcattatgcatcatatttaattaaaaagggaaatttgacattttattctaaaaaaacacacatggtgttattttataccaccctcacaaaagtttgttaactatgctaatctttta

SEQ ID NO: 116381 - DNA, 1594 bp, Cannabis sativa
attggtacgtacaatttcatggtgtttgcattatgtgcagaactatttattatggagaatataaatgctcaggagctggagctgatatgagcatgagggcctcttatgtacagagattaaacgacactgaagcctctaatttccttaatgtgtcttttataagtggaaatcaatggctgcaaccctttaataactgatttcactaatattcaattcattatatacttcttttaagggtagtttattatagttaatggtgaattgttattattcaataccaagagtaatagcaacatatattccataaaaaaaagggctgtaatagcaacatatatatatttacttgtattatttcatttttatcaaaaaaaaaaaaacgaatcatcaaataaattatttcatatataattaaaaaaaaatatattgttttttaattaaaagtaaaggtgttcatccaattcaattcacactattttgctaataatgcatacaatatgcactaactgtgaattttatatgaaaaatttgagtttgtaaactttgtatatatgcatatattaggggaaaactcaatatttaggccaatattgagggctatccaccctcaatggttgcacaggtacattaaaataggtgaatgtaggacttttagatgaaaaagattgaatcttgactttgtttttcactttttagattatgagttttgaaaaatacgaaaaaatcagggtttaaggggtaagtcggtatacattatggtggactacccaaaatatccctacttacactccccaacagattctctctgtttctctcttcactctcatctaattttatctcattctccatatcaaattcacactgaaattttacgttttgtatacattttgcctctcccaagctactacaagatattacaactaagtgaaattagagtgagactccattcttgaggcactgaataaagttgggaaacaatcaatgggtaagtaattttttttgttattgaatcttatatttagtttagaatgttgttttgatgtttgatctgtggattgttgctattgttttgctcttttgtgtgttgaaatgattgttgtctgtgaatactacatttttttgtttatgcaattctttcgtctagtcctatggggcccaataggggtcgatgctagtccgatgttatacttggatctaaggacagggatgatggctcgatgggcctgatgctagtccgatggcatattggacctaaggacatggaagatgggtttgaaagtaggccccatatttgttttataggatgtaaagcatgtttgggtctaatacattgtccgatatagtctgactggtgtctgatggtgggtgagttttggtgctattgtggaggattctattaggtccaatgttggatgatggtgtttgtccgattggaattcaattttgaattctatctgtacgacgatatgggacgatacatgtctgatggtgtctgatattttacagatttatggttttttagagcgtttttatcacttttttgatagttttttgttctacattttttattgtattttttttgtctgtggatgacaag

SEQ ID NO: 116382 - DNA, 1246 bp, Cannabis sativa
gcctctaccttctattgcaggtcgagatagagcttcaccttcttctccagattagtctcattgatgaacttgttttgataatcttagcttgcttatcgcagtcttgagacaaggtggtgatctttgtctccttctcttcaacattgagcttgacctaccacacatcgagcttatcctggtacactttggcttccaattctttgatacgagtaagggccttagagtgcatgtctttgtacttgtctttgtgctgcttctccattttggctaatttcttctctcgggccaaggacttatctagagatttggataccctctgttttatagtggcctcagctaaggctctctcagcttcttctctccttcgctcaacgttgggatgctccgccttcagcacctccaggtcataatccagttggatgatgagagaagagttcctctctgccatcagaccaatctgcaaaggacgaagaatgagcaaatcaaataacaaaaaaaaaaattaaaattcatttgtgccagagaagtgttaaacttatagaattagcctcggtccttacggagtcagctacgtacatcgggtccctaattgccatcatgaaaaatctatcagcaccgagcctacaacttgtggtagcactttgttccaatagatttgcaggtgacaaattggtcccaacgcgatgacggagtctctctaccagttcaaccctattcatgataagaggggcagcctcattccacttgtcatagtcagtgaacccagtgttgcacctagaagagatgctagtggacaatttcttcatcttctcaacctcacaattgtgcctctggtggtaaaattgattcaccgcttccagtcggttttcctccccttctgtcaactacacaggcctggcaggaagcatgaaaggtgccaaaggtaggggaggcaactcagtcctttaccttgacagtttagttgagatggctagaatcaccttaggtgatgggggtggcagaggaaggtcctgattgtctcgagacgtctgaatgcttcaccttgctggccttccgccatcggaagaagttgatcccttctgggatcgagaatcagttgcttgcccccttgaagctgccagttgcagaaccttctctttggtctctaccctaaccttcttgtgttgggttttatgccctaaataaaactcatttcaatttaatcagatttacttattaatatagatcaaaaataacatttgatgtt

SEQ ID NO: 116383 - DNA, 1534 bp, Cannabis sativa
  modified_base (1480)..(1491): a, c, t, g, unknown or other
gtaaaataatatccaacacatacttctcatctgcgaggacaccacacattaatacaatgataaggggctgaagaacgattagacaaagtctaaaagacctatgacatatgaaagttctccatgtgtaaatttcaaaatgcacccaaggtgagctccatgcagctaaggggagctccacgcagctaaggagctccatgcattagctgctctacgcagctaagaggagctccacgcaactaggtcagatccacgcattaaatgctccatgcagctaaggggagctctacgtataagctgctccatgcatctaggaggagctccatgcacgagctactccacgcagcagcgagcggcctccacagctcgaacacctgcagcctcatgttcccatgtatttggtctactcatacaaatagaagcaagaagaagatattgagactagaaatgtttaagccaagaatcgcagacaagatagcaactatgcaatgaatattagtataggagacatggctcatttcatccgaggtacaagcaaaagaggcaactttagtgtaacttaggatgtctgatatatcagactacctgagagactatgttatcaggtgtgaaagcgacttgacatcctatgtttttgggatttgataaagttgtaaagtatgaaaggctcactataaatagagcccttggactcattgtaaagggaattctttggtagaaaaaaggatattgaaactgcagtttttctaaatagtgaagagagtaatatttacttcaagtattctcttattaagatcctaaaaaatcattttaagctcttgttatttcgttgacgagctcttaccgtcaacactttgccttttgttccttttttgctgtagcttgctcacttttttgctaagtcgcatacgattctcgttctcgttcacgattgttttaggcaaactctcaatgcttcttgcagcatcatcatgagtttgagaagggttgttaaatatttattagtgttagtttagtcttttcaattatttgagtgttttatgttattgtccatataaggtttgcttaaaaattatattatttaattttgactttgcaattaaacgaaatcatgacctctctttttcttcttttttattatgttttctgttattgttgaacaattatcacttggaagcttgtgaactaatttactcatgtctttggtcttttaggtgacagttttgttaacagcgtttgttggattccttgtcttgctaatcacgttctgcatgacttggtttcttgtgctgcgtcccacgattaggcttgttctttttcctcaagggaaataatgctccttctttttcctcaagggaagtaccacctcaccctttgttggtactacaaactaggttgctttgttttggattggtttttgtggaaattgatcctccaaatcaacctattatccaactccttaaaccaactaacttaactaacnnnnnnnnnnnntagttagttagttggtgctatccttgtttgagttgggtctata

SEQ ID NO: 116384 - DNA, 3586 bp, Cannabis sativa
cccttctagatcctatataaatgcaacctcgcttaatcgcgtgcccgggaaatatcttaccctaatctcactatttttgttttcaagttctgaggtgaaagtccaaataaaaaaccctaattcatggcagggatgtacggccaagacgccggagacggctatggaggaagtggtggaggtggatatggtggtggcggcggaggcggaggctatggaggcggtggacctggaggatatggaggcgggggtggaggttatggaggaaagggcggtgatagtggttacggcggcggaggcagccgtggaggcggcggtcgaggtggtggaggttatggcggtggcggacgaggtatttatcttcatatcctctgtttttgcagtttatgttgtctaaggttttaaagtttttatactaattgcagggggtggaggaggaggatatcaaggagatcgcggaggtagaggcggtgggggccgaggcggtcgcagtgggagcggccgagatggcgattgggtttgtcctaatcaaaggtaattcctttcttggtgtttatatgtacatgtatatttgctgggtgatcattttctatcttggatggatatcaaaaggttcaggtcgttttctattttcacgtacactttgtactaaaactgattttatttgaatgtagttgtgcaaatgtaaactttgctagaagagttgagtgtaacaagtgtggtgctccctcccctgctggagctggtggtgaccgtgggggcggtggtggtggtgatcgtgggggtggtgatcgtgggagtggtggttacagtagaggagggagtggtggcggatatggtggaagtcgtggtggcagaggtgggggttacgatgggggtagaaatgctaattacgatggaggtagaagtggtagttacgaagggggtaaagggagtagttatgatggtagtagaggtggaggcagtagagggggttcctatggtggtagccaaggcagagaagatagtggatttaaccaggctcctcctgccgcgcccccatcttatggtggaagtggggcaggtgggaattatcctccatcctataatagttatgggggaaatgccaattatggaactgatgctgttcctcctccaacaagctatactggtggacctgcctcatatcctccatcttatggtggtagtgccggtggttatggtggtgatagtttaggcgatgcaaggggtggtggccgtggtccttcaggtggtcacaatggtggtggtgggtatggtggtgctggtaatcgtggtggttacggctctgctcctgcagaaaccccggccaaggtgaaacagtgtgatgacaactgtggggatacttgtgacaattctagaatatacatctcaaatttgccgcccgatgttacaattgaagaactcagagaactttttgggggcattggacaagtaatatacttcacacttctcttatttgatttttaagtgttgagaacttttcacattgttattttattcaatgtaaaagttattgttttgaacctgtgttgcatatctgatcccaaaaagaattcatgctatccgcttcaatgtgcatttttatggttactgcgtgatgattttattatcatgttactgtagatgacagtagagaggacttggagatatctaagaaactctcttatcttatgtgaaaacacaataagggattttggcataggtgtcttttggcatcctctttcctccgggctgaataaaaatgaagctttttattttcttattttttgtaaaaaattaaagccaaatcatattgttcaaaagaaaaaaaaaaaattaaagccaaaccaactttaataatttaatttggttttcacttctatacatatcaggtgggaaggatcaagcaaaaacgtggttacaaggatcagtggccttggaacatcaaaatctacacagatgatgcgggaaacaacaaaggagatgcttgtttggcttacgaggatccatctgccgcacattctgctggaggcttctacaacagtatttactgagcatcatctgttctttattttgttattacaaagtttctggtatactcacatttgatttttctttcagattatgatctgagaggatttaaaatcagtgttgcaatggcagagaggtcggcgccaaagcctgcatttgagcatgggtatcaacctttaaattatgcatttaatatctctctcactgtttattagacctctatatcaagtgccccctgttagcttgccccttcattcttttttttcacatgtgaacattgagtcagtctaagctattcatctgatcctggtttgagttcttattttattatcccatatgtaattaagagcttagcatgcatactttgacttgaaaacattattattgttacttcttttagtgtataagatcttgatctttcttcactctcctcttgtatttactcagtatgtttattgatttaaagtttttgtactttctcttccactggaacaatcacccacccaggtcgtggtttcagaaatttattgatttgaacctctgttaatatgtttttcaaaggaccttttcaatattttattttttgagagggttctgtttttcttaacttcattagtatcgcgcactttagaagacgtggtatttttgaagaattcatttattatggtagcaatgactttcaatgattttatcattgaaaaatatgaaaagcctcatcttcagtcaaacattttaaagaaaaatgacttaaataattcataacccatgtgaatctacctttggaaacctctaccttcctttgaggaaataaaacagaatggcctttatcagctgttatggaatagtgggtggacttatgatttgttgatgtctctttgtatttgatttcactttaattgttatctggtttgctggattgaattagtttctatcattttattatgtgactagttgcatatttacacattgttgacatgcctgcagtggtggtggtggtagaggtggatatgggggcggagacaggcgcagggataattacagagatggtggaggttctgggccagataggcatcagcatgggggaaatcgctcgcggccttactaaggattaatccatccagcattttatgtaatgagaattatggtctgagggtttttataatatttcattggaggggtgcttgagctggagattaagaggtaggttgttcacttgcctcttagtaacctgatgctcctctcttactttatctgccgctacttggagggattccaatactagtcatgggattgatttaattgtgtgaatgtttttatagaggcaagtggataatctccaaaatgcttgctgctaaggtaggttgatattttcaggtgagtgcagctcctcctttatcactattattcatactgttatgttttaagtcttcctaggaaattgttctacttctgcaccatatggatttattagagacagacacaagcatgactgtttacaaattttcattcatctgaacattgttacatgtgttgctgagacagaaacaagcatgtagac

SEQ ID NO: 116385 - DNA, 3790 bp, Cannabis sativa
  modified_base (332)..(350): a, c, t, g, unknown or other
taattaaattttaaaatataattaattttaattaaagttttataaagaaataaataattaagttactttcaggttacaagttaaattcaacagagtaagaacgttaaatttagcagaataacaaaaaaaaaaatacattaaaccaacaattaaccttaaataatcacttttaatatatacacctacgttctttaactaattttcattacttatagagttccaatatggaacaatttgtttaatcaattaccatgcagctgaggagcttgacactaatcgagtttgacgtgtaagagaaagaccaaaatcttgatattattattattattatnnnnnnnnnnnnnnnnnnnattattattattattataaacaaacatttttaataatcagaccaaacacaataataatatgatgaaatatatattctcatttgtattaattggacttgaatctcatcattttattaacaaaaaagtgaaaatatactgaaatccatgaaaaaggggacaaaattaaacagtgttctacataatataaatataatcacactaaatttgaaaaatggtgtactagaaaggaggacggattgtaggtattgcaatgacaccatagtgttgcggcggacgaaatggcggctcagctccacctccaacaccctcaattggccacctagctacttcaaacggcggcggcggtgggggcatcattagtcctgcaaggaccattggttcagcattgcctggcagcagcggacgaaatggttcgggcggagcagcctcatctggccccggaggcagtggcgggatgaaaaaatttggccctgcagcaaacgggggagggaaaaagggtggtggcgggagaaaatgtggagcaatctgtggcagcgggagaaaatgtggcgcaagtggatgaagttgaagaccaatgtgaggctgcagtgggatctgtggctgtagatggggctgcggaggcctggcccggggtcgggactggcgattgggttgtgaagtactcctctgaggtggtgtagtctggtttggagtacttagttcagccatgatggagccaattggatttggtacgaattgaaattcaggggaatttgaaataattaatgaaaatgagtaatatcaagacagtaaatcattaatttcaaactaattgaaagaagaaccaaaaactaaactaactgttaaagaactcaatgccaagaactcataaatttattatcttacatagttatttcaaactaataattgtaataatagtttattaaattaatcaagatccttatgctgttaaaatgcataagaaatggatgacgattatgatcagaacaagatgattaattcattgtcaaagaaacgaaaattacttgctcaagaactcaatccgaaattcaaatatgattaattaaaagaagaaaagaaactattgggtttatttttaaattttaatgaaaaaaaaatataatgattagctgtatggtttctatattatataaataatacaaaatttaaaaaatataacaaaaaaaatatcaaaaaaatatcaaaaattggggaattatgagagatatgggaaaaaagatggtttaattttttggtttaattattcggtttatttttaaattttttgaaatttgaaatcttacacgattaacattttgaaattttgaaattaaaatgtataagttaattgtaaacttaaagcgtgtaattataattcatcaaaagaatagtgtaaatttaaaaaaaaaaaacaaaaaaaaaatatcaaaatggggatatacggtttgttagagagatatgtggctaagatttgtttaattttttggtttaattattgggtttatttaacgtttaacattaaacgtttgttaaaaatcgttaaaccaacaaataacgttagatagacactttttctatataaagataaaaatattgtgtacattattacattacaaaaataactatacatttatagtctgatgtcaaaccaccatatatttatatatataaacatcaccaattttatttaaaatcatctttaggggtgattgtattttattattcatgaaaattatacatgagcttcaactattttttattgtaagtgtgttttacttatattaaattattataattaatatttttcattaacaaatccaaattaaattatatatataacttataaaatatataataaaaacttattaaatttcctaaataaaattgaacatacttatggccaagtatagcacatatggtacgtactaaagaatattgatagctaataattaaggttgatatttttgataatatattcgtaggatttggtattttttataattaagagaaacaccggtacaaagatagagatggaaaagagacaattttctcaacaaaattaaataaataaatgaaagagatagacaataaattttcagctagccttaatttgacaaccactttttaaaatttaaaatttaaatattattagttaataagaaaaacgatacattcggccacttttgagaaaaagaagaactacatccacaaaaatctatgatttaaattgatattttgattatttaaattcaaagtaaaataaaattagtaatctatatatatggtttgctttctacatagttatagttttgagtaatattataattgcgattgaatatgggagtagtgaatatgggtagaggtacgtaaataattttgttagtactatttgtattagtttaattaattagtagatctgaacttaattttggataatcaggtattagcgaagattatgaagaaatttatggtgagattagcagtcctgtgaccactagtaccaccaccactattgccaccgcagccgccacttgtcctacgactacgactgcaaccaccacggaggccactagtgctcccactcaaaatctgaataatcatacctataatatcacctataatgtgtatatttatatccgtgatggtaatattaagccctacagtaataattattatcacctattacaattattattacctcaacaacaacattttccccaaccaaaatcaccagtgcagcctcaacaacagccttttccccagtcacaaccaccagagcagcctcaagaacagccaccaaagcctcaagaacagccgccaccaaagcctcaagaacagccaccagcgaagcctcaagaacagtcaccaaagcctcaacagccaccagagcagtattacaattcttattataataattattataataaatattataataaatattataataattattaccagaaatattacatgaattattacaggaattattacatgaattattataataattattacaataattattacagtaagatgctgactaatttctatacagtttgatcttcaagtttttttttcctttcagcaatgaataagagtattattggatattttattaaataaaagttttattttattttttcataagttatatgatcttttatattttttttacattacaatgtatttgcttcataatctacaccatataaactcatactatttttttttcttgaacaataaattcatacaataaactcataatctaactattaataatcaaatattctaaaatatatacatatacataaacaatattctaaaatatatacatatacataaactcataatgtattgctagtttcatttaagattttgatctttttaagattttgaatttattttatttttaaagattacaaattttttgtttgaaa

SEQ ID NO: 116386 - DNA, 859 bp, Cannabis sativa
  modified_base (777)..(777): a, c, t, g, unknown or other
ccggcgagcagcggctgctgcggctgctttactgacgccttttcgtcgactgggcgccatcgaagacccacccgattaaaactagagcagtgctattgagtataaattaaataaccgagttccgcgatttttcgaaatcgcccaagaaattgaacaatttcgcactgtttgtaaaaaagaaaagcaggcattgaagctcaaagatcagatagagagagaaagagagataggaagaggatagaaagtaagtgagaccggtggtctatggaagaaggggagaaaaccctaattgcacaaccgaagagaggggttagagttagagagagaaagtggggaagagtctaatagagcgtttttacgtggaagaacggcattcaaactgagatatgagttggttggattggagtgatgataaaatgcgccgctgcagtataacctaattcactctctaacgtgcgctgcaacggcgtatgcttagtgagttcaactaaacatgcgcatgttggtgaaggggcctgaactgaactatgtgcatttgcacgtgacccaccaactcattcatggccatttgatttgatttcgtagtagtttcgtaatccaaaccaaaccaaaggcccactgtttctcaatttggctcatactgtcgtaatcacccattcatcatttggacttctaactaaaaatatttatgttttgggctaggcccataccacctacactcctttcaggtctagcgttctatttttaaaatatttttatgggataatttcacaaatncacaaaaacaacaaaaaaaataacaaaaatacggtttcacagaattttaaacattttcacgattttttttattttatttaca

SEQ ID NO: 116387 - DNA, 4450 bp, Cannabis sativa
ttttttttttttttttataattcaaacaattgattaatatattaactcataaatatgttagactttataatttgtgtggtgatcgtgaattcaatataggggatgtctctactgattttttgttgtatttggtagcaaaaatttatagttaataaaatgttgtatatccatttaggaaaaaaaaagctttcattgtcttcgcatttgaccaccatttgggtccttttgtcaatggttttaagaaaattcacaaaatttttgacgtgtacagacccacaaatttcttcatttggcttgtgagattctttcaaatgtcgcattcaatcgtgtggtctcttaaaagtcattcattatatccatactttacaagccgaaacccaagaaggtgtattagaaatagtgtcatagtgtagaaatataatactatatatacaatgtataacctacttctatcgtaactaatttgtatttattataaaatgttagatggataaatgatatttattatggatatatgaaacattgccctagtggcttaatttgagtttaaatatttatcaataattgttaattctatataataattaatgtgtcattttataattaattagtaattttctatattatttattaaaataaaatgtatatgattcagtaccttttagaatagttgagttaaaagtcttttaattgtaaaggtagttaaagattactgtcagtgtaactgaaatagcaacttgtagattgttcttgcaacttgtgtaactagtataaatgcaacacctgtaaccaccgtctttcaactcgatcaatacaaaataaatttttcattttaaattcttcttcttgcttcttagcatattcttttattgtttttcttttacgatattaggtcataaggttattttcttcttctataattttttttttcgatctttgattctctctcaccatgcttcgaataagaagtggaggaggtgttcttacaggttgacatttaattgatacctctagtaatggaaaaaatccaagtcttggttttgatcaatctgattggaactacaaaggcaaactattaatttgtagtctttagtcatgacgatcatcccgacgctagcttaattggttcccaaaatcttgatgggaggcaaaaattacagtttttggaaagattatatgattgtggcactccttgttaaaaattagatgaaatttgttgatggttagcttcttcatccaacttcagatcatgaagaccacgatttctagtggagatgcaatacccttgtgatctcctagatattacatgttgtgtcaagtgaaatttcagacagctaatgtattgtaatgatgcttcaatcatataagctccatgaaaaatttcaccaaaataatggtcatcaaatttttgagtttaaacaggctctgcaggtgttggttcaagaaaacaccaacatccaaagctacctcaccaatcgcaaaatcctttaggatctaatcagagaattcagacctctacctttttgcactggtggtaaaatgaatattatggctcattaggaacaatattgagttcttgagtttctttgggggttaaatgagtcatgctcaattgctcgatctaaaatcttgatgtacgatccaatcctcaacatctaaaagtatatgccacattgatttaagtagaaagatagagaaattaatttgcatcatgctcctactgaatctttggaaaaatatctcaaacctcttaggcaaaattcctggtaattcaaattttgggagacttatagttaaatgttcacattttgggatgacatgggcctcacaattgcaaagtgttacaagatctatgaatatcctccaagtatttatataattagaaacaagttactaataatgttggtgttcttgattataaaggtcacaataagttattatgtcaatctagtattcagatgctaggctacaaattcaagaaaatttatcaaacaatgttcaagggccatctgatcagcctttggtgtgacacttctctggtataaatcataaactgttggtttttatggtccaaatcagagtagaaagcataattaatttttttaaattaattttagattattataatctaaaccataggccccaagatctcaatatattttcatagattaaatctagctatgagttaataatattatgcctcttgaaggctattaaaatattcttgatcttttttgtatattcaaatgatcatccaatctaatgcaattctatttggcaaccatctacaccatagatcttgcatatcagtctcaacactttaggataagtgtgagcttataggattaattttagaatgaatattttattattacattgtttacttaactcatgagatactatgatgatgagagagagagagagtttcactcataggtgtagaatagagagatagagcgagagagagagagatgagagttcagctatggatccttttattttgaaaatatatatcgatcgtatcacaataggtatcactcaggtcaaacttgtaatgatctatatctgcgttatatctaacctaataaaatgataaaataataatttatttaagcataaattcaaataataacatcgtaattgaatcagacgtatctttgcttatttaattatttaataataaatattttatcctataagatatttaatttattttgaattatttttatgataaaataatcaaaacaactcccatgacacttatatatcacctacatgcttatgactataaagccatatgcatatgacatatatttaatgcccgaattgatttctcaattttgtcttacataagatttattatttgttttccaataaactgttgatgttgtctttcgtcaattaatctaagaagatcgtaaaaaataaaaggactgttgataacccagaaacttttcctggagacgtgaacatcatgtttgacacgtggcatgaaggaggacgtgacaaagttaagttgacctgtgtacgtcatagcagttgacctaggaggggacctacccttacgcccaggttgactttaggatcttcgggatgaaagttcagactttaataacctaaatttaactcacaatattttaatattctataccatgaaggcatggagcaacctaatccaaccttcgagagttgaaattacacgaacatgcaacctggaagcgaacctgggtacctagggtatcaccaaacacccaagctgatgtatccaagtagggtttcaatttttgggaccgtcttagtgcaaaagggtcaaaacatgcattgagatatcaactagactcaccacagacatatttgaggcatctaaattagaatcaaagcaagttcatttttgagcacttggggccctggggccctaagcaccctgcgccaagggacaatctgtcaatctagccgcctttcaagtatcatattggagatatgacttttgcatattctttgtgttcgtcaaagggaaatagatcttttaaaataagaaacaacacttcatgggtacaaaaattagggcccaatgccccaggttgacacctagggctgaccctgcgccgaggttgacattttttcaacccgagcaattttaaacaaagttttttgagatcacttctgatcacctactattttttcttttagaaaatattgagattcaactatttttggggaccaaaaaaaattttgaagggcaaaactcggaccgagagcctaggtagatgtattgtcaacctgggttgttttcgatacaatttatcaaaaagtgttctgggcatttttttggtcataaaaaataatgaagattcaagaaaactaagggataaaaccacaaacctgcacctctggaaacagggcctagtgcccaggttgagcttgtactgggttgggcgcccaagttgacaatcaacttgggacattgccttaaattgctcaaatgccaaatctgatgtgatcattaatctagaatcatcaaaacggggtaggagacctcgtcttcaagtgcaaaagaattggaagtatgaaaaaggaatcctaggagcttaacagtaagtacccagcgcccatgttgacaaaagggctggtgcgctgggttttgcttatctgattctaataccgtgttgactgtctgtttagttttttcacaataacaaagatcaatgtagtcagagaattcaaattttaaactttgcatttgttatttccatcaaaaatgaagagttttgggtctcttgtttttgcgaaatagcaacatctctgagaactggtgacagctttgctagaacacgataactgactaagtgatgtaaaactatcacttaggtaccttaaagtacatcccttgtgttggaaatattttaccaagatctaaatttactaccaagtatgtttgattaacatccta

SEQ ID NO: 116388 - DNA, 2090 bp, Cannabis sativa
tatagaactggatctatttttatttatatttgagacatctatttcttgtaacttttccaatgattttttcggcgatggtgactttttcggtgactttttcgatgatgataacttttctagtgacaatcattttttcggtgacttttttggcaccgaggactttttcggcgctagtgacttttccagtgaaacttaatattacaagttttatcaaatatatatttattgtttttttctcatattttgaactttaattattctttaatcccatatttttttccactatttatttatgccatataaaagtaaactctctactatattgttccataaaaaaaaaaaattatttaccaaaataccacttacacatacatgcatagcaacttaaattgcatcaacttttcccctttttttttcttatcacatttctttttattttcagtttggatttatgcttcaacttctctttccatttcatttttagttttacattcagaaatcacactctcatcacactctcatgatcaaaacccacgaaatatatacacgatcaaaacccacttccagccataaccatcttcaactttttcatccaattgccaccattctcattcaattttttatatctttcatttggtatatgcaatggtgattacccgtgcctatgcttctccatccttattgccaaaaaagcttccgaaatgggtcgtaaatcagttgctaataattcaaaagggaaacgcccagtgattgacgatgatgactctgattttgctctcccatggctaaaggtgatcttcaactagtgaagaagaagttgaaggtttctttgcctgaatttttttttaactctaactgtcagaagggaaagaggaaaccagatgactttcctaaggtttgttcgtagtttcgttttaattttgccctagctctaaaatgtcatttatttttgtttttggttggttttattattctaatttcactttagggtttagttttttgttgttattttaattttatgggtttttatatatgtaaacaaatccatacattagtttgtgttttgggtagtttgttctaattttgagtttattgttttatgcaaatttgttcacatttcttatttttttatgttatttatttttacttttatatttttatgttcatcgttggtattaggcctaacttctaacaaatatttatagttcgatactcagtggtttgtttgtagtttcgtaatattgtagttgtattctcattgttgtttggatatattttttacatttccctgttatcattatattttttgtttgtttttaggaatggaaatgtaaattccctatttctgatcattaaaagtcgaaagttgtgtgtacttgtaattatgaagtgattaggaagctcaatgagaatcttcactagataatgaagatctgtgcagacaatcacgtacatgttctgtttggatgattcctattgaaggcataaacttaccacttttaaatatagaattctctagccaggccatagagagaaaataatccgtccagacttctcaatgttctccatgtgtcaccatgttggatgccacatcattctgtgtagaatttgagataacaagccacaaacaatccttggtaagcaaaaggaatttgtggaaaattttcaaagttgagaggactttttgaaaatcttgaacatatgaaataaaagggaaaataaaaccctcatttttagtatttggggcttttttagaaatcacgacccactgttgcgattgtgacatgttgcattggaaaaccaacagttgcctcattgaacggttatcacgagacaagcctgtacagaccttgaagggtttcgatgatgtggcaccttagaaagataaaccataattaccaaccaatatttcataagccttgagaagatattcaaacgtcacccacgatgtgaaaactcaactcaactatccctcgagatagctttttcatgtgacatgcaactgtgatcgtgcaactaagaacatgtgttatagtgcaaatcataactaattcaaataaaatcgaaatcgagttttgtaaaaaagtaaa

SEQ ID NO: 116389 - DNA, 2197 bp, Cannabis sativa
accgctgtaagatataactcctctttgtaacccaccattttgagcttataatgaattagttgcctctcttccaacaaaatatccaccttgacaagattatcaatctaaacaagcagcattctgtaggaagtaacctggctggagtgaaacttccagttcggattattggtaacaagatcactaactctatcgtggtgaatcttagtctcaaaaagagccctaaaacccactttatttatcttacaaagttcaaacacctcatgctgtttctttacattattcagcccccttacattccaaccaagaatattgagactatccattagattggattaaaagatcagtgaccaatcctccctcaacatccaccaaagcatcatatccattgctacatactactctcggttttaccattcaatctcatccaaacagggactgattttaccatacgagcagtgtccatgtttccgaccaaggcctaagaataactggtttcttgtcaaattgaattacctcagtttctatcatgacattcctagtgacttcattcttaaaactaataagggtaaacccagaatgcatcctcacaatcctgtctactcccaagtttccccaaatccttttaataaagccctcagaaaccttgaatggagggttaggccccaacacaatacaaacaatcgaagacctccagaacgaagcttcaatttcagcttcttcgacatcaatcttagccaccacctgatccccaatttttaaaggttctgtaaaagacagttgagaagatggagttctctcttgattcacattcaattttctccacgcaatattggctgactcctggaagtccatcacctccgattcatctggccagttcatcgatttgggggtcgacgtcgaaggacctgcaatcagctccttttcttgttccagttcttcacacgggtccaagaaaatttcaggttgagcttcatcttcttggattgatggtagctctggattcactcccagcctcttcgcaccagctgcaccaagcttcgaaacaccctttctcctcttcgccatggaaggaggaacggagcttcacacgcttattaattagaatatgaagcaaatagtctcttttacaactactgatcctaaaggaaatattaaaattttatatatataaatattttgattcatatattatctcaaaacaattcccagccaataaagaaaaaaaaaaccattgtgagattgttattcccagtgtcacacgttgttacattgaataatttcctctacttttgcctgacttatattcgcccacctaatccttttcaatttttttcctatattcacagtaattttgtaaataatgaattttaaaaatagtgttttttttgttaatatgaagtagtgtaaatgtttattttaaatagttgtagcctaaaataagaaaacatcctaatgataattaaataaattaaaataaagccttacatttctactaacccctataataaaattaaggcgtcattactttattgaaaatataaaataatcatgatgataatgcaaggataataaatatcaaatttaataatcaaataataattatgtattttatttaatacaaatgagtatgttaactaaaatttaataataaaatatttaaaaataacatcatgatataaatataaaaacatattatttattgtgatgcaaattttacattatgctatattatgatcaaatttagattaatttttattatgtgacaaatttgcaatacaatttagtacaatattaattggagtacattttttacaaagtgagttatatttaacatttgtatgcattatagtttgttctaaaatagctaatgtaacgggtgtatataacgtattcattttgctgatatctaaacctttataaatttaatttgcatataaatatggaacttttctttcacattcatttttctaaggataaatggcagcaaaacccccaaaacttttattttggtttaactttaacccccaaaactcaaatttggccggtaaaacccccaatactcgtattctgttagcaatttaccctttccgtccattttaggtattaagtgtcatgttgtactggacacagtatatacgtggcacaattttattagtccacgtaaaaaattatttaaaaaaattaaaaaaataaaata

SEQ ID NO: 116390 - DNA, 2413 bp, Cannabis sativa
ttaatataaaagtttaaattctacgctattttgatcagtaatcccgattaggggattagggtttcataaacattttgggtagcgtgcctaattatttagggcattacaaatggcctactgcattgggttctgcttatccaattttgattctgttttgactgcttgtctagttttttataataacggagagccatgaagttagaacaatcaaattcacaacttcatattttcacttttatgacaaagtgacttacacggaaattagaattttgagttgcgttttcgaagaataacaatatttctgaaaactggtgaccaactttgccagaatacaaaaacaaactagatgatgtcaaaatttaggcatcttaaaggacattccttggacattttttttacttacccaacgtctaggttgacgtcagatgttagcctgggcgctgggatgtcaacctgggggttagatgtcaacctaggcgttgggacctgaattgccttcaatgaaatggccataatttactcaatattgattcgattgatgcgatacaacttgcattttgaagctatttaaatactctataaagttatctctcacaccccaaatgtaattctggtgttatcattgtcaaaattcacccccaatggagttacaaaaataagctttcggttacccgcagcgggacccaccaagcaccaaaaattggccatcaccaccatcagctaattttcaccgtttgatcatcatcaatggtggaaaatatcttatttgtatttttctcctatttttgtgggcctccttcacctataaaaagataactcccttagcttatttttcacatttaaaaaactacacacaaggtcaaagcttctctctctagagtttagagtttctaatacttagtctatttttgtaattaccatctcatgaaaaataaaaactcaaaatagacgtagtcccattactatcgcgatataaggggtgaactactataaattctgtgtgtctctctaaattatttacataaacttattaatcatctcgacaatctattgagctgatgttggtcacttttcagcgtcaacaatgtgattaggggtgatgtattttttaagagtctaattatcaaaggtttttaatgaaaatactaaactgttaactcagaatttcgttaatattaaatgaggctcaagtaatcaatactttgaatgttaaattaatataaataatatatacaaaaaaataaagatagggaattttttaatgtggttttgcaattaattctacatactccacgagtctattttatttatgagaatattgagaaaattttagaatcaagatataagattggcagtattttttttagtaaggaatttttgttgtcccttttacattggttttccctctatttataggctcaacaaatggtagttatttaattctatccttataacggttagtgaaacgtgagcaactcccacacttcatttatcttgtcttataggcagaaaaatttatgcataactgcatatattcaaattataagataatttcagttatatttgatcttatcgggaacgtgctacgtctgacctgttctttaggtgatggctttttagttcttgggttgaactattctatctgtgacttccttcgaaggatggctgggctcgaaaaatgaactatcctttatccttacaatgaggtttggataattttgtacaatcttactcaaattgtatcccatgtgttttatgaatgttgaagcccttcaatctcgcaactcgcttagctttcctctcctcatcaattatatacttattcaatagtacgagttggatcatattgccaaactttaatatacatgtcgaatattggcatcccatattaactgctcaaaatatgggggatgacataaactatttagaatttttttaaaattttacaagtagtcctaaataactataacttacacgatcatgaaaaaataattaaaaaactttactcgacgttgaaacagataagggggtctacgagaacacctattttggtctacaatggtcttaaattaatgcagtgtactcgatcaatagataaatataataattataaaaatattctatatttaaataatataataataaagaatatttattttgtgtaacttttaatgttttagtgctgtggttggaatggaagagtctacgacatcatatttagtgttaatttagtatggaaggttggagatggctaaggtcttctatttcacttttattaaataggcataaaatagataaatgtatataggatattctatgggaaatttaaaaaaatatgcataaaatactctaatattttatgcttaaactaatacttttcaacattgaaaacatatgaccacttttccaaaac

SEQ ID NO: 116391 - DNA, 1725 bp, Cannabis sativa
  modified_base (1690)..(1692): a, c, t, g, unknown or other
ggccggcccaaagtatttttgtaatttttttttcttttttgtatttttctgttttttccctttcttttatttataaaaacttttgctattaaaatataatgttatgattttctttttcatagattatttttaataataacctacataaaaaaatataatgattatattatattatttttcatgtaattataaaataatgacccttatctatgtgtatagcaaactatataggaatattattattattattatcattattattattatatatctatataaaaataatttatcaatatggctttctgtattttatttaaaaagaaatatctacctacttttagtcaaaataaaaatcctataataaagattttaaaaaagaaaaaccctaaattattgtttacaaataaaaaaaattcaaaattaaaacactaaatagtttccaaactatattgatttggaaactatttcacttttaacaacattatttactattccccagtatacatatattattatttataaatataaatctatacacgtacatgcttgtgacatgacaaacagtgtcattagaaaatgaacaatcgcacgtattagtggaaaaatagagagagaaagaaaactcttttcattattctcgattgggaaatacaatggctagctcacgtccttatatagatgaggagttgatacaacagtgtaacaaaaataacaaccaaacaaataacagaattaacggtctaagagcttacttcaagatgaagtgtaaagatttttgacactcatcttggcaatgagtacttcatgacactgagcagggaagagtggcttggtgagaatgtctacaatgttggatttcgatggaacgtgattagttttgatgaattgttaattttttgtcgaataaggtgacaatcaattttcacatgtttagtgcgttcatggtatactggattctctaatatgtggagggaagcattgttgtcacaaaacagagtcaatggaagtctgatgttgatgctgaaatcttgaatgagggaatggtgccaagttaactcacaagttgcattggccatggctctgtattcagcttcgactaatgatcatgacactgtttgctgctttttgaatttctagaagatgagtgattgtccaaggaagatgcagtatccttatattgatcatcttgtgtctaaacacgctccccaattcgcatctgcgaaggcttaaagatgaagtggttcagaacatgtggcatagaaatataacccctatcatagaatgccttttaagtgttggaagatgcagttggctggtttaggttagtttcccttggtgcttgtaggtactggctagtttgttgacaacaaatgaaatgttaggtctctagtgttggtgagatagatgagcttccttataaggctatgatattgagtaggattagtgagtagggatccaatctcactattgattttagcattgggctccattggtgtggaaactggttttattctaatgtgtccaatttcttacaaaagttgtagagtgaataatctttgagtgactaagattcttttgttgcaacatgcaatgtgaagacctaagaaaaaacgcagagggccaagatctttaagcttgaagtggtcattaagtgttgattgatgtaaattattgtaaagcccgcttagtnnntttggaaattagcagttgtttatgattaattat

SEQ ID NO: 116392 - DNA, 4174 bp, Cannabis sativa
aaccttcataactattctaatttacaaaactcctatacgaaaccaattgttttaaacttaaaacagaattaatccttaccttaagcttttcttttaccaagaattgttgttctgctagcattggagcttagatcgctaggttttgggttaaaaattgaagaaaatagatataaagagaagagggttttgtcgaagggggaggacgagagttcgttcgttactttttactgtcataaacttatgagatattatatattatatactgatacattaataataatataataataatattaataatttaatataatattattaataatttaatataaattttattattcataattatcttatcgtttcttagccactacgaaatctatacttctagggcattaagtcaaatcccacatactcttaattaccccaatacttatatttttaacatatcacaatattcacacaaaatctatcaattaaatccattatgacatttatggcccctgatcgactctccaatgtcgccaaacctgaagatatttttattccacctatagctcatattacattcacacatgctatgtaaatctccccaagtcttctttggatgttgaacatgtttttccatcatcatcaaaggcttatgaatatgtcactcgtattgactacgaggatttgaggaaagatttgtcccttgatattagccagcagcagattcttatgtctgttgtggctggattgaacaaaaaaatggacattcttatccaagtaatttttttttgtaggttttttagttgttttagatatttttaggttattattcaaattttaattctttattcagtgctcgcatgttgcttctacacaacctgggacccaattagatgatgtgattcacacatctgaaaatgatgaggatgtggatattgatgttgataatgaagatgatgttggtgatgaagaagctagtttccaggaagatgatgatgggcaagaagatgatgatggtgatgaggattgtggggatgatagtaaagatgatgaggaggatggcgatgatggagatggtcgtggacaaggtgagtctggtgctgaaaatatcaaaaatgatgaggtgaatgttattgttgaaataggtgcaaaggatgatgaaggtgcaaaagatgcatctattgctaacaaaggcaccaataatgatgctaaaattattgattatttaggcacacttccagatctcaatgaggtttgttttttatatggttatcaattttttattgtttgttatgtgtttatctttatgtgattgttttatagttttttaactgttgtttttctattttttaacgtttaattcaaaaattagtcaagaagggtgatgatgatattgttgatgttggtgctaccattacgtctggtgttgaggttgtgcagaagatgataaatttttgttttgaatgtaattcttttttcttgattttattttagtgttgttttgccaagctttgattttttaaacaactttatttattttgtttgtaaaaagatagtatcctctaccccctgttgttggtggttctgccaatgaggatgtgtgccaaaaacatgatcttcaaaatggttattttttaagagactcctatattacgtcatgagaaggggaaaagaaaggactaactttgaagtctccattcatggagcttacttctggtaatactaaatcaagttcaacaactatttggcctgatgtgtcccaatttaagatgtttaaatatgttgattgcttgcgcccgttagacgataaaattggtgaacatgttgatccctaattggagtctgagtttaacttttggcctggtgaaggtccaagaaaaaagaaatcaacatatgttcttttgttgtttattattatatttcattttctattaattggatttattgttatgtaatatagtctttattttttttccagcattacaactaatgtatgttgcaagggtaaggacaaaatatctccaccatttcgttttggtgttgagaacgttaacagcaagatatggttccacgaccttagttaccctaatagcttcctaactccaattgtaagttttttaccgttgttttgtagttgtttttatttcaaaatttacattgtattatttaagctaccctttttattgttcttatctcagcacatagacatcattttctattttctgtgtaagaaaaataagtatgtcaaggagctaaaactcaaagttacaacaatcgatttcctatttaacgctagtataagaatttgtaagatatgtttgttgccaacaagaatgatatctctattttgtcccttgaccattctattgcgtagtatacctgaggtagaaagatgtcatgtagcactccttggcacttgttcgatcacgttgttatgcctattaatgtgcaattgcaggatcactggtgttattctaatttattctcacctgacataacacctccacatgaccaaaagaaaaatacacatgggagacaagtcaacactaaccgaccagggtagtgtcgtgagctccctgacccttaagatctcagggttgaaagatggactcaaacaagaagagtatagagacttacaagatccacatcttcaaggttgtgaaacaagttcatcatgatattgaaatctctagtagagatgcatggatcatgaatagtttcatcaacaaagaaagagaataatacatataaccaagaccctggctagacctctagctggctagcaaagaatgatagctcatatgccgggtagcctccatatatggctgatcgaccaaaacgtttattacaccctaacaacctaaatgagatgaatattttctcatggactttctagaagactccaaatcatccccatcactcctacaacttcagaacaaatcaaaccacccataaaaatagggattcttcaccaacaagtgacaaccatatttcttagggatagtttgttatcctttttatatttcaaattataagttgcaaaatcctaacactatataaagggccttaacattatgtgaaaataacatctctccattcatttactcttcatatacactcatgatacactaagatcctaagtgttcaatgtttctgcattctctcataacgtcatactcttctcatacttctcatattacttttcatttgtaatccgcattctcatcattgtaacaactaaagaaagccatagctagaaattacaaggttttagcctgtaatctgcatggtattatctcaatagtaaatacaataatggagagtaggtcattacctaatcaaaggggcgaaacctctagaaattcttgtgtcattgatatttattatcattccgcatgtgacagtcataaatgaaatattatcctagtcagactctgcgtcaattggctaaattcatagtcaacatttttgtgctttcattgagagtccaaagttctcattcaaaagactatcattgtaactccctaatgattaggcacactacaatgactttctaattacagtgcacacgttttctaatcaaagggttttcttgaaaatcatgataatatcaaatttttataaatatatacatatattcataaacaaaactgggatctcatttttaaaccttacacaaaacgaagcccaagttgttggagactgaactctctaggtcgcactgtctcgacatgtacaatcatccccaacctctgaactcaatgctattcagctttggccttccctttacctacacacgaaagcagtatttatgagtcaacaaactcagtaagaaaagcatataatatacaatattttaccaacatatatttaggcgcccacacacctatccacatggcttatcaaatgagtaagaatgttcttaatagaagtatgacctctgtaccacatgcactaagtaccgctactatactaatttggtagagttaaaccatacctcgagtactactgagtgttttaccacatgtactatgtacttgaccgtactagtgttggtaacactagattgtaccctttaaacatcatatgttgtaccaatgcactcaataccgctagcaaattagtgttggtagcatatgaatcacataattagcatgcatatattacacatacacatattcat

SEQ ID NO: 116393 - DNA, 2127 bp, Cannabis sativa
tccatatagtgttaattctgagagtggtaacagttagaaccaaatgtataatcagattaaaaattaactattcacattgaattattaatagtacatacaaagagataattagaagggtaaaacaatattttgaccaactctaagtatgaactaataattggagggaactacttatattgattatatcaatggactataagtaagaattctataaatataattatatattgtcaaagagtacaattctgtatttatagtggagtaataatagaattaataaattggattattctattgatgagttcaataataatcaagtatttattgaagcttcaaatataaattcatggtcctcaagtcacctttataaaacaatgtacaggggaggtttaatttgatgaacaaatttgagaaacattaatttctatgagagataattcttaagggcaaaataataattctgtaaaaattattattttgaataattatatcaattatcaatcatgaattgagtaattagtatttaattatttagttttatttgattaaactatattaattagttaaatataattgttattccaatttttctcacctgacgtggcaccagacacgtggcaagaaccattataattggacaggtacatttcgtgcatcttccaagtcaagagcaaaaaaaaaagagatacacaagtattgataagaccctggcaggatgaccagcaggctagacaggctacaacatacagaaggtcgggcaccttgcctgccgaaggctggacaggtagctagtagaaggtcaggcagcttgcttgtagaaggccgaataacttgcctgtagagggctggatagcctacagcctacaaaaggtcgagcatcctgcctgcagaaggtcggatagcctacagcttgcagaaggtcagacaacttgtctacagaaggccagacagccaacagcctgcaaaaggctagacagcttacaaccttcagatacactggataacttccagaacaaagttggctagccaactcgtaaattttatcctaacagcctaaatggactgtggttttttccatgggccttttacaacactccaaattgtcctcagcgctcctacaacttcagaatagttcaaaccacccacaaaagtaggaaagcttcatcagagtaaaactgtcatactttcaatggatattttccatctattatggattttgaataacaacttgtaaaaaccctaacactatataaagggtcttaaccctacgtgaaagggagccgattttttccattctacacacgcacttaagagcttagaagcattaaggcattaaactctatctttccttctcactacaagtcttctcatacttgctctcataattgtaatactaaagtgagccatagctagaaatgacacggtttcggcctgtaatctgcatggtgttatctcaaaagtgaatacaaaacaaaaggagtaggtcattacctgatcaaaggggtcaaacctctataaattcttatgtcttttatatttattatcattttgcaagtgacagtcataaatgaaattagatcatattcaaactccgcgtcagttggctaaattcacagtcaacattttagtacttttattgagggcctagaattcttcttcacaaagctctcacttttttcttagtttccattttgtgtggctgttacgagatgtggaaattctactgaaccaagatatactatatccacggatccccctatccaggtgccagtcactacgaccgacccaaacttagctgcccgaccaccacattttgaccagccaattggaaccttcaccacaaaggttcggccagaagaccaagctcctactaaacatactgtccagccaactactaaagttcttcacacaggggttggacctcttgtttatgctggtgagactgaacctagtgtttacaaccctagcatccatgaaccccatgttaaccttaaggatgactctgaacttgccaagttgagagaggccatagggcaagtacagggtgacacaaatttccttcagcattaccaaaaagaaacacatgttgttatgggcgatgctttctgtaaagaccgcttagcttta

SEQ ID NO: 116394 - DNA, 2236 bp, Cannabis sativa
acgtcagttcacttggtatgggagaaccaatgtacccgaatatgaaaagttctactggagttgattttgtcgataataatggtaggtatgatttgctcaatcatagaaaagataccatgagtaatgttggcaatcagggtattaatgggcacaacaataatacaataaggaatgttgaaggtaatcagtgcaagaatctgggaaagaagattatttgtggtcaaggtgacaacttggctatttatgataataaaaaaaggaaagtgggagaagagagcaacaggggtcacgtggatatggaccaagggattagtggacttccataaaacttaactttggcgggccttgacaatggggctcgccaacaattatgaaaatgttgagttggaactatcgtgggcttgggccgacacggaatgttcagttcctcaaagagcttgttgctaaaaaaaggcccagtgtaatatcttgtgtgaaactttaagtaataaggtgaaaattgattcaatatgtagaaatttaaaatttgagaggtcttttgttgttgaggcccaaggacatagtgggggtattgcattgctttggaagaattaagatgaagtaactatcgattctttctcaaagaatcatattgacagtttgatatcttttgagggacaagatcattttcatttcactgccatttatggagaacctaatcgaagcttacgaaagcaaacatggactcttcttagtatccttcatgatccttggcttgttgatgatgtgcacccttttgttgaatcccaacactcggggcttgttggtaaaatggtgcaatcgctgatgaagacatatgtgttggattgggatgatgaggttattttatatgtgcttactgcaagggatcaggaattagtttggaaaattccacttgctactgatttggaaggtgatgattggtattggaggaaggattcgactggtttgtttactgtaagaaatgcctattctttgttgcaataagcgaataccagcgatgctcaaccagataattctagtttttggatgaaattgtggcaactaaagcttcctccaaaggtcaaagattttttatagagagtgtgcaccaacagtcttcctactagatttcaattgtcaaccaagcatgtgcctataaattcttcatgtccattgtgtatggctgcaccagaaactgctctccatatcttggtttggtgtgattttgctcaacaatgttggagacaaactcaggcacctgctgtgggtgctgctgttatgtctttttgcaactggtgggaagaaggcttgaagacttgggacatgacagaaagtttggaagtggccatggttttatggtcaatgtggaaggtcagaaatgacatggtttggaatgctaaacaacttgcatcagatgaagtgctgctattagcaaaacttaactttgttgactggtataatgctcaaaaacaagacctaggtactgctaatgaaccgaattgggttcaggttgagcattggacctctctagattttcctttaaccaaaattaatgttgatggagcactttttacttacgagaagtgctttggtattggtttggttgctcggtctatagttggtatggttattcaagctaagactttgaaaaaggttggtgcatttcagcctcatgaggttgaagccattggagtaaaagaggttttgagttggatcaaagacaacgaatggacgagcgtgattgtagagtcggattgtctaagagttatttcggatttacaaaataataaaattatggcttctccttaaggctatattatttcagattgtaaggctttgtttgccgatgtgataatatttcttttaattttgtcaaacaatctgttaatatggttgtgcctgcgttggcgcgatcttctcttatgaaggctaatcgtatctttagtagtatttctttacctcctgtaattacttcgtttgttttgaaagatttgaattaacgaagtttcattattattaaaaaaaataataaaataatattagttgttattttataatattaaataaaatagtaattattctaaaaaaaaatagtaattaattggtggttattttatttttatattaagttaatattcgtgaataaagtgtgtaattaaatttaaataatagaatataaacgtgttatatatgaaataaaacctctctctctttctctctctctatacatatatat

SEQ ID NO: 116395 - DNA, 1332 bp, Cannabis sativa
aaaaaaaaaaagaaaagaaaattcgtgcgtgatgacttttctatttccaatactaatgataaatattacattttgttttttctttttgataaaataatatgatatttgtattaggggtgtttattggatcacatcgaatagttttaagcctatctaaataattatatactaaatgtttaattttaacatatgatcagatctaattaatttcaatcatataaatttgtctaatctaaaagtgttatatttaaataaactatttttaaaatttatttttattaaaaaatatttttaatttcgttttaatactaatataaaagtttttatattttttcaaaaaaaaaagtaagattatatgcggtgatatagctaaaactgaaaagtataaaatggtttataacaaccaaaattttacaaatgttaataataataaaaaaaaaaaattacatacttttactttttcttttgccacatgataagtaccatctctcacaaaattcttttttctttttccttaaatctatttttcctattaattctgaaactccctttaggatatttttgctttatatattttccactactttattatagtttctgatcttttacttttctttagtgtgaatacatagaaatttaaatattctttcaatcacgcacatttaggcaagctccaattaaacgagttcaactcttgacttgcatgcacatgcaaataaaaaatctacacgtgattatgaatgtctgtcttctatgtctctctgttcaactaagacatcactaacttgttgggagaaaaatgtcactatacataaaatatcttataaaaattagaaaaaaaaatttacaacgactagatgtaatcacagaattatatgactatattaaaaaatttaagaaatctgactaaaaattttagtagaaacaatagaaatgcattatgtggattggtagtattagtcaaacatactaatactaattaaaaacttgtccttgaatatttgtttactagatgacgacaaataatatttaaaaataaaaagcacaaagaataacactaaagtttttgcgatcgttggtattacgtaggttatttttaggctttataattgtcacgccattcaatttcgtatactaatgttagatttgaatcattaaacttggggtgatatcttttattaatttttttaaaggtaaacaaaaatgtccaataaatcgaacaaagtcaattatatatagtagaacctctatttaagaatactctattcaagaataacctttaatttgttataaaaaaaatctgtaaaggccgcctatgattaatgctttgta

SEQ ID NO: 116396 - DNA, 2593 bp, Cannabis sativa
  modified_base (2519)..(2538): a, c, t, g, unknown or other
atttttttgtcagaacatatttactgttacaaactaaatttaatatatattctatttaaattataattaattgatttcaaaaaaaaaattataattaattatattaattttgtaatgcgattacatatttataaactagtatggttttacttttgaaatgataaaaaataggagaattacctatatactattttttttaatttttttttttgaaatttacgatttgggtttctaaaatggttgcagcgctagttgcaataaaagtttttatacgattttttgttacaatttaggttgcagtgctagttgcaataggggtttctacgtagaattttgtaaaaataaataaaaaaataaataaaaaaaaaactgtttttaagtgtaaatatgaaaaagcccctaaaaaataacatctttttcattgccaaaaaaattatcttttttttttatcatgaaagagataattcattgatcacgcgaaaccattacaaacaaagttcaaaacagaacctagccaatcaggctctctcaaatcctacaatcacataacaaaagatcaacaaactcaataactctcctatttctattttctagcaaaacatttccttggtgctaatcaaagataacctccctttaatatacatctacgaatcatcttctctatgcagacaattgtagaacactttttctcaaaagtaataaaggttcctattgtaccatatacaataaacagctccagccaatgctaaagaagctatctccgtcaccaagctcttcactctagcttgattcgcccaagcaatccaatcttcaaactatgatggccaaattgctcctctaagccaacttttaaccgattccataactctctttgagaaagaacaatcaaaaaataaatatgagtgattctcctcagccttctcacaaacagggcaaaatagagatttaacaggaacatgcctcctagcaagcaaatccctagtcaaaagacgagaatggagggtctattatagaataaaatgatattttgaaatgccattctattctaaaccacctttgtatattgcacttttgaatcactagttaaaaagcattcatacattagcatactcttaaatttcccactcttacatgcattgagtagttctgccatgaagaaattgtctcgaagtttcatcagcttcctctaataccagcttacatttggttgaagctcgtgaaaccatacatgttgaccctttaaatagatactattgatctatttgacccataaaatgtcttgtttttgtattagagcccacaaatattttgccaatgaagccttattccacttcacactatcttaaaaccctaacccttcgtactgtttgggcttacaaaccagattccatgaagtcacaaggaatctacttgtattccctttctatctccaaagaaaattcctacatagcttatccactttttttttaccactttttaggtaaaataaaaatacttatccaataactcgaattctaatgaggaccaagttaataagttgagttttacccgcataagataagtgcttacttccccaacaattcagcatcagtcgaatcttactaacaattgcttcacagtcttcatatctccatttagtaggcctcatctaaacctccaggtacctaagtggaaaagttccctccctaaactgaataaggtcctattttttaatctttttatcactgtttacccccacgaagtaaatatgagatttggccttattatcattcaatcctgaacaagcactgaattccctatatgaatcaaaaatacacttaatggactccacagaacccttacaaaagacattaaggtcatccacaaagtataaaattatcaacttaagttgtttgcatggatgaaacttaaacttcttgactttagtcttcaacatcagtaatcttgtgagatactccatcaccgatacaaaaagtagcaaagacatcggatccccttgtcgtaatcctttagcaccttggaatttcttttgaacttttccattcaaaaccaaagaataagatgttcccctcacatagcccatgatccatttaatgaattgagagggaaagctaaaggctttcgaaagcttttgaagaaactctcaatcaattcataagctttacaaagatcaatcttcattaagcatcttggagaaactatcgttcgggtataacctttgagaagatcttgcaaaattagaacattgtgagccaaaactctgttcttcacaaacgcaccttgattgctatgaataatgaaggaagaatcacaaccattattttacataacaactcggggatgcacttgtaaattgtgttgcaataagctattgggagataatccactgctcgagaaggggtgtaaaactttaggtatgtttttcttattttttgcactataacgtggcatctagctggatgacacatgtcctacattcctcaacctagatggatggttttgttgggttttgtgccctnnnnnnnnnnnnnnnnnnnntaatcagatttacttactaataaagatcagaaataacattttatattgcatggtt

SEQ ID NO: 116397 - DNA, 1731 bp, Cannabis sativa
taacttttacaaaacacatggtctaaaatggtatttactttttaaattattcattttttttttgaaaaattttcaagtgatcctaaataattattgttatcatatttccgacaagggacacgtatcgtagaattcccataataaatacagctcaaatacttaacgccaaatagtaggcccaattgagataactaggctgaatctataaatcatcagtccttctagatgaataaggaacaacttgtctagtcgagattccatccaggatggtcagtagctggaagacataacaccgcgtaactgaatgaagctttcagcgtgtaactggaagcccaatatggtcttccatttactattagatcgcgcaagatcagaaattaccttccaaaaatctcaaacagaagatgatatctttctaaataaagaaagatagtaattgacaatcaagtaattaacgtgtcattaattttcacgaagatagaacacgattttaacaaccaacatcgtgatttggcatccacatcgacatacactacacaaggtgtctcatggactgggcttcaccaaataagcccaaaattaatattttatttataaactccccataaaaggaaatactggtaactaatatgacttcaatgctctataaatattttcacaaactctacatgcaaagttcgaaatcctttactcacatgcccaagaaaagagagagtgctcatatcttcttgtaatccctaaggtttctagcctctcttaataatattgactcgtggactaagattagttaacaccctaattatgtaaaaatcttaagtgttcttatttattttatttttaattattattctttggctcttacatttaaattttattagttttcgaaaaactcagtaaacaacaatatacacgatcatgaaaaaaataaattaaaaaaatttcctgccgaaacatataaaaaatatactaaaacattcttttagagagataccacatattttttccaataatacttaatacttgtgtaaattatattattattagtataatttgatcttacataatttaattaattattataaaatattattaactatttccaaagcatattatagatacctaataagactactaaatgttagattttaagtacttttgcacatggattctaattaatcaacaagtatatattttatttattcacaatggaagattataattaaaactttaaataatcaaattttcttgttttttcctcaaccgttgtactttatagttgtacacactacacaccaatggatctaaattggaattggtcaaacacttaggtttgtccttggaccatgcaacaattgataaacccctattttatttgattggttcaccaaaaattagttttgaaattattaatttaaatttagtattcaaactagaataaccatagacatagcttagtatcccaagttcgaatttctcttctttaatttaaaaagaaaattgttagaataaaacaaatattaaatgagattcatagtattttaaatttgaatttaatattaatttaactaaattactctcatttaaatataattaaataattaaattaatttttttgagagaataattaagaaatttttacattaaaaatacaaaatattaattttattaccaaaaaatcactacacggttacccaaacatttatacccttttcttttaattttttacatttg

SEQ ID NO: 116398 - DNA, 1471 bp, Cannabis sativa
  modified_base (1425)..(1432): a, c, t, g, unknown or other
taaagtttccttggttcctttgtactgatacttttctgcattaggttacatggaattagctttgttacttgtagctcctctaaataacttccagctataataatgtaccattctacataaatgtgttgatctaccattaataacattagttgaaaagtgtatatttaaaatctttgtttagatttacagcataagttggctagaacttttggaagacttattgtgaaacagcttgtgtcaatctagcttggtgttatagtcaagaaaggcttctatcttggtgttacagttaaggaaggcttctctagcttagtgttttagtcaaggagagttctacttgcaaaagtaaaatgtcatttttcagtgggaccaaaattatgctttcttgtttaaattagtattttaatttattagttataattgtttgttgttgtctattatttttaggattcgatattgtcattactcaaagaatgtggttactttattattgtttaattttttcactgtcaattttttttttttcctataggtgatggagatagtaacaggatgaagagaaaatggagagacatgagtctgtgcaaataataaattgatgataaatgttacaaatagacttttgactcattagacattacatgctcatgagctttgaccattgttattttgtaaaatacatgtattggatgttttgataatatacaaaatatatcaaattttattaaattgtaattacattatttggacaaagaatagacattataaactttaatgatttcactataagaaaatacaaaaaataacattaattgttatccgcattttcataagtatgacatgtgtattctaatcaaggaatgccaaaaagtcattagctgccctaatcccttcattgatgcttcgggaagataaaggcatcaacctcgcggaaagagtctctgtgaaagggcgttccccaactgctagtcatatgaaaggtatctgtgaaacaaaatctccgtccattgcaggagctaaggctatcaacccctgcgaggagcatggattgcccagaggggccaaggcattctgaaatacaatgaaccgagttatgcttttaacccgcaaaagcttcacccatacgtgtcagactacggacctagggactagactttttcgagtacaacatcagaggttgtctcccacgacacgccatcatacagagaatgcatgtccttgtgtactagactatatgatccaacggctaggaatgaggaaaattcaaaagggagaatccctgaggtgacaagtgtccgaggctcagctcgtacgatctgacacccttaaatgccatatcgaaaatatgctacctaccaatctgacggtggaattttttcccaacgacgatccatctaagtcatccatgttggaatttattttacnnnnnnnntagatctactcacaagtatgttcattaacaccctaaata

SEQ ID NO: 116399 - DNA, 2653 bp, Cannabis sativa
  modified_base (1674)..(1674): a, c, t, g, unknown or other
agtttgttgttgggctgcagcttgggtttgttggtaggtttggaaacgttgtggttgggctgcagcttgtgtttgttggtggttttgagcccatggaactacatagctgttgtacggtgtctgactttgagttgggtaaggttgagaggcatggggatatccagcatgtacaccggcagaaacaggtacctgatgcatgttttggttggacggtggagtatagggctgggggttgtaggagggtgaggtttctgtcgttgataaagtgatactcagtaaatcaattatgtcttgttctttagtcttcaccggtgctggtggatcagggagagctaatgcagtgcacgtggcagaggtggatgcctcttgcgatggagctgttgagctgcttatgctcacaattgccagaccttccgctgtatcattagaagtgctttgggaaactgttgatggtgctttagaatgcctgcatttatcaaacaaattgaatattaacaagcaaggtaaatagagaaaaccgctaaatgtatcatctcagctcaaacgtaatattttacgaaaaaaaaaattaattagaattatagcaatcaatagaaagtaaccttcgtgctagctgtgcaaattcatcttcctcttcttcctcttcatatgcgtggccctttgtcatggtagcaggaacaggagaagaagagttaacatttggtctaggactaacatctctaggactaaagtctctaacttcagactgtctgacacttgaagcacttgtttccgtgcgttgtggactaaaattagtaagttgagccggaattggggaaccagtagctatagcgtcatgtttagcaagcaaactttggaggctatcatttaattcaagaccccgagcaagaagttcctcgtcactgccaaacagtagaagacaatggtgtgaaattttttcgatcatgtgcaagtgttggccacagccttgtgaaggtgctttggcctaatattcttcattaaatatcctgattatatagatgaaactaacccagttgaagtgagcatctgcatcagctttttctggttggtgcggcacctattaacaagctcaactatcacttcatcttttacagcctggaaacagaagcaaaagaaacacattaaatttcagagataggaagctcataggaacagatcatagaagttaaaaaaaacaggaaaagtaactcataagagaggaaaaaagtcatagctcataccgcagaatcaccgggatttactgcttgtagcatgtcactaaggagttccagaacattctgcatagcatccatgcttgacaagctttacgaaaaaataaataaatcagaagcctagcaattttcaaaacctaacatctagagcatggactgcattcaaattgtcacctcaaactctcaatttctgtagccatagtttcatcaagccttcttgaagcattgctaggcattccatatccaggttgaggacgacctacggtctgatgtgaaacagggggtgtaaagataggaacggcatctgatgaacgcttgggaaattctacgccagaacgctgtcattcattcaattcactgttagtgaataacaattcatttgatttgtacaaaaacaaaaataaaaagaaaagaaaaaagagagagaaactttaatataatnggatgctaagctaaatgcatacccttaattcatcatatgcccaataatactgagaatgctttcctccgggcccaccaaaagcttcctgccaagagtctagcaggaccaagattttctccctcacttgcatatctgtctgaatgttacaatccatataaatccttaattagagtcagaaaataatatagatgcatagagaactagaagagagcacaattgcaccaataacggtttggataacacttaataaacaaaagacaaaaaaaacctatgcaacgttgtttgccaaaagtattatccttaattgggccaactgaaacatctaatgaaggagaatcgctgacgaactatgcaaaaccagtatgagaagcatgtgtacttatatacatatattagattagtattctaataacttagcatggagaaagaaaaaaaggttagtattctattattaaattataatttttcggaaaaggattcaatatgaccatagagcaatgagaataatgctctctctttctcactatcttttacaatttacactcctctcattacataacaagagtaataaagagttaatattctaataataataatatttcatatgtcgagcaataagaggtcacataaaatagggtgagaatagagtgctgctagtacttcattacacacacaaacaaagcatatccataaatgaaacttgagagcctatacttcaattaattaccaatttcctcgaacaaccaaactcagagaggaaaggaacatcaaaaagtctccaaaagatccatttcatagtattgcactttaaataaaggcacctttaacaaaaaaataattatgcaatgtaaacctagttgaatatttccttaaataaaataaaaaatagtgtctcaagaaacagaggtcactgtatgtctcaccaatggcgatagagcaacactatgtgggagtccatcacccattgccacataataaa

SEQ ID NO: 116400 - DNA, 1316 bp, Cannabis sativa
tgagactttattatcaattaaatcaacattattacaataacaacagatgtgtaattgaaagtaaaaataacaaaagctttttttctctcttaaatttgagaactgtaaacgaaatattacaattaaaaatcaacggtaataagccatgtgtcttgatgaaaaaaaaggagaggtcttttggatttgaggtttttttttatcgagcttgacttcagaacgaagccaagactcgacaacagaaaggagattagccgagttatttaactcggctatctcggttaacttctcagatctcttaagcttaccatcttgaatataagccaaatgagttgcccatgtctccaacccatcaaagatatgggttgcatatactatagttgctcctctctataattaatgaacaaacattgttatacattgccagaccagacaactaaacaatcacattatactaagtttactttgtctggaaataattcaatgcagaagaatcaccaaattaagtttttcagatccaaatagcacatgtactgtctcccccttttatatatatataaatatatgtttgtatgcatgtgtttggatgttataaataaatagaaataagtagtcaaattacctgttcacattcttctttgaagaaatcgagtaagtctagtctagcaacaacgtctaagtcgactgttacctcatcaagcaacagaacctgttaagtcattgaaaatgttttatagattatagttagaagtaaacaatgttggtattctgtttttgattttttttatagcaatgataactttattgaaaataatataattcagtacaatttagaaaatctaaatatttttaagaaattgagagatttattgtaaccaaattataagttgtttatttattctaagagcatacacagaaccgaaaaactgacattgattagaaacaccctgaaaatctggtggataacataacagatacaacaaatatacaatctatttcaacaaccagaaaatccaatctaatgcataatatgtatgactagactgccaaggccttggactctaccattaaatttgtttagacttttactagacctcggaatgagtcccggcctatggtcttgctcttgtatctattataccgaaaaatattttttgtaacgatcatgaggtctaattttaattaatagtaacacgttactttctttttttttaaaaaaaaaaagaaaaaagaaacggtttactcggttcttgggaggtggattcatacacactagtaccaattcagttcttgaaagaattaaagtttagctgttcatt

SEQ ID NO: 116401 - DNA, 802 bp, Cannabis sativa
ttaataaccatattttacatttaaataaatacgtgtgagataagtgcatttaacagcctataatcaaaatagtatagcaggctttgactcgtttaaatcatgttgattgcaaccatattgatcttttgatcccttcattttatgcttttaatgaaattttccttctattttttttttaaaaaaaaaagtaataataataataaaattagaagaaatattttcttttgctgaaaaaattagaagaaatattgttaccatatccacctccataatgacagtaagtaatagtttatatagtgctatacttggctgaaaagtttggtcaaggcagaaactcgtaataaagacgtggtccacaaatcaaattattatctattattacaaagtaaaagaatactatgcatacatatatcatgattcatatatggatcatctatgtaatactttttctttggcagaaatctattcaatatttatttactatataaagtccacaaatttgttcgtttataatttatattatattaaatcatggacactataactattatgtgtttattatatagttgaatattcatggaatgtacttccttgtgctttaattatccatatataaatttaatttttagtcagttgtatacgttttattagtacatgcagtagtacgcataattaagtgtttatgtatatatatacatatatagtaccactattaatgagtagtgacatatgtatggtcagtggtcctggaaaaaaaaacgtccgtaattaataattaagtttttttttttttttggctttg

SEQ ID NO: 116402 - DNA, 1276 bp, Cannabis sativa
tgaaactcaaaatttgcttctccaagcttcacttgaaacccaatttgatcatcacttttctgatcaaacaaaacccaatactttgcacatatagtaggttctttaggatcaaaatccaaattctcacaaatactggtcttctttttcgtgttcatactaaaaagccatcccgaaaccatcaaaactggaaattgggtatctttctcgagctggaatcttgaatacccagatgaaaaattatgatcttgacccgataaacatagaaattcctcaaatcgattgatcagctggatattttgtacggtctggtgattacacaccaagtgaacatcagtatcttttataagaaaagatcccctgctttcttcaacctctgtatccaccattgctgcagagacaaaagctcgacctgggatggtcgaccaaatgggcttcgtgggctgaaaatgatggagaatcgagaaagacccgccattgttggagttccaacggagctgaaaatccttcccgattgagtaaacatgatcagaaggtagagatgaggatgtgaagaataaggtaccgtggatgaaagggagagaaggtaaggaagaagtgaagggattgttcaagtgtttgtggtgccttttggtgattttgaatgtactcggcatcgttggaattctcagagaacgatgatagtatttagtgcatgcaaatgaagaaaaaagagagcaagttattttttaaaaaagtaattattattttcttttaaagaaaatatttcaagaatttaagctttggtttttatagaacgtgattggtcagaagagcaagaaagttgaagattttgctttgacgtttcgtgtagacacatgtttatgttatttcaaccattttcacctttgaccaaaatataaaaaaaaaaaagtaattaaaggttgtgtttaattttattttattttttttctaagaaaaattgttttattgtctatttttatacaaggagcaagtagtagattactagattcttatataaaaagaaataaagaaagaccatagcttttgtgtaaattgttcttcatgtcaattcatatatttaatcatcatagtgtttctattttggcacttgatgaaattattatctgtctttcaataataatatacagtctagctattcagtcttaccttgtagttagtgtttaataaatgagtaatttgtgacataaatgtttaagttttatgctgagtagcatataagtacttaagtcgtattttttgcggtaaaaatatattc

SEQ ID NO: 116403 - DNA, 2177 bp, Cannabis sativa
atccattacttgtttaaactaacttggattttaatcacaagtatcttccaagtcataacagggtgagttccttgaaaccatcccactacgacaaggtaccctgaatagagacaatagagacagtgggaccatcttatatagaataagatgatagaacactgtggaattagattatcttctctactttgctattttatttttagatttagtcatattcttagaagagtagtatttgttgaaacaaacactttttatcttaatgacattaggatagtccactcctaatcactttagaatagctatcaaacatgcaaaccttagttaacaattctagcttttcttaagttcatgatcaggacatccatgaatctagtaatggtatacactaagtacacaactcttacatcattctaaaattttcctatcactagggtatttccctagaaggactcaagcaacttctagtaactaataatataccttttactttcattattatgcaatttgaatttttagggaggtaagtttggatacaattcaaagttcaacttattgatctttgaactgcatatccaccaaatatttcttcacccgtatcagttcgtaaaatctttaaccacttactttaatatttttcaacattgctagaaattcatgaaattctcaaacatttcaaatttctttacataaggtaaaatctagagtgatcgtataagaatttaacgataactcatatccacccctaaatgtacatgtatatgtgcaaatatagatgatcctactttgaagtgaatataagcatatttctctttacaaagaatgatcttgtcaaaactactatgaacgagatgaaaacgccatagatatatgattacgtggttgtagtcttttgatgacataggtctagttacaacaaagagttcttagaatagtccaaatgggttctggtcacagaatacaaaactcataatccatacattgacatacagtttggatccattgacacaaaataaatattaacaactataaggaagagttattacactattggttgtctcattagccaacagtataagaaagagtcatcactctaatctaaaatcattgttaagtttattacttatcaattgtctcattaagcaacaatagtgacattagattatcacgttagacaatcgtaagtaatggttactttattaagtagcgacttatatttttatcttattagacaaatatttaatattaatgattgtttttgttaattggtgtgatttcctattttatggattaaatatatgatacctggatttgattatacgagcacatgtgattatgtctgtatgttgttatgtattgtttatgcttctacttttcttgtcgagtctttgtgactcacgggttctctgtggtgcaggtaagaaaaagattgagctaagttaactatgagttagaggtcttcctcagcaaatgtatatatatcagcttatttgactagtagtgtcgagtagtcagggttttgagttatgacgacttttattagtataattaccttattataaaattgtaatattatcttttgtaaaattttaaaaggggatctccaacactaaatattttgtagtaccaacattaattttatatctcaattaattattaaaatttaagtaaagcacatttttctgttaaattattagtttattattataaactaatttataaaagcacacacatgtgtcattctactagataggatgttacatttgagaatgagaaagaaagagagagaataagagattttaaattttcaaattatttttatataaactttaaatatgtaaattatttgaatcaatttaaattacgtgtacatttagaaagttgttaccacataacaattaatgtagatgatattttaaattttccataatgaaaattgtgagattttatcaaagaaaaagtaaaaaaaaaaattaaatgttaccaaatataaagaataaaaactttacaaaaaaaaaaaaggaataatattttgggtgcttttgtaatgcatcttaaatagggtgcagtgatgtattaatgttttagtatgggaaatttgaattaatatacttactaatacctataattttttccctgaatccaaagttattaaaattggttatgtatgaccacttttc

SEQ ID NO: 116404 - DNA, 1408 bp, Cannabis sativa
  modified_base (864)..(873): a, c, t, g, unknown or other
  modified_base (1220)..(1221): a, c, t, g, unknown or other
taactataatattataaaaaaaaaaaaaaatagactaaaaaattctcgtgaatactgaaataaacatgtggtctattgaaacacacacatttaagggagtgtgctgcaaattttctatacctaatatttttaaggtgctgtgtttttatacctacttttttttgggtaaatgtactcatctttaaaatgtttcacttttatgctcatgcttttgaaatattagatcctagtagtgactacattcacattttttaagatcttttgaaaaaaaaaattaagtataaaaatttaacatttttaaaagacctagtataaaagtgtaacacttcaattatatttgctacacgaaaaaattggatataaaaatgcaacattttcaaaacattcaattcttttcaggcccaattcctcaaaataagagcaaaaaaaaaaatgatgtgtttcagtataaaatttaatacaatacacagtgtaaaatttacatattattttttaaaaaaaattcacttacagtgaaaaaataaaaaaagttaaaaatttaatttcagtatgtggtgtaaataatctaaagaaaatcaatgtgttgcttctttattttcagcggtatggacatatcaggctttttttttaaaaaaaaaaaaaaaaaaaaccattggagaataagaatatttagatcctttcaaaataaataaataaataagtaaatgagaatatttagattgtagcgttagattattttcctcatacataggataggataggatatccccactccacacgtttgtccagatagtgataaccatttcaacatattttacctaatactaaaccaaatcttcttatctcataataataataataatnnnnnnnnnnataataataataataatgctaaaaaaaaatataataattaaatgtactctttaattaaaaaaagatagggtataatatatcactttgacatgtttacttaaaggtaataaaaattattatacataacacgaggtcgagactagggacaagtccaagtctcggactgggttcgggtttggttttcaaggtctaagttaaagtcggaattcaaaaaattgactaaaaaactgtttaataaaatattgaagtgattttttttatttttaaaatttagatttttaattaaaaaattgaaaaaattaaaagcaattttatagaacataattttaaaaaatatttttattttnntaattttaaaaataaaaaattgataaaaaaaaaaaaaccaaagcactattgtaaacgacttggtatgtctattattattgttgatgaattatatttgggtaaattgtggcataaatacctaatgtttccgattttatacacttaaatatctaatgtttatttttagtggcaaaaatactcaatgtta

SEQ ID NO: 116405 - DNA, 1495 bp, Cannabis sativa
agttgtgatgaatgtgatttttatatggatgttgagtgcacccaaatgtcaacaaattccatatcaacatgtcctaatgaaggccaacattgcattcaacattctacccatcctcatttgctactgctttttgacacatcaacaactgatatgaatgttagttgctttgcatgtcagtcatcagatgatattggagtttattatgggtgcattgtgtgtaagtatttccttcataaacaatgcattgaccaatcaccgcaacaaatccaattcttccaccatccaaataatcacactcatctctccctacatatgaaatggcacaatagtaaatgcaatgtttgtggatactccaaaccagccttatattatgattgtcctcacaattgtaattttcaattgtgttttaaatgtggtttgagaagacaaagaaccattagttatgaatatcatccacacattctttgctttctagataaaatacacactacatatgatcaatgcaatgtctatgacaattgtttgaagcaattagtcacgaagtctgattccaatgaattccataaaactgattcctcaatatttggttgtttggactgtgattttaaactccatttactatgtggtccattgccttcagtcataaagcacgagagtcatatgcatagtctaaatcttgttgattcatgcatcgatgatacttttggtgactattactgtgacatttgtgaagaagaaagaaatccacgactacgcgtttactattgtgccaggtgcaaatatgtggctcacgtacattgtgtaatatctgaggtatgtcacgattcatgttattaattcagatatttaatataatattttaggctaattaagatatttgcttttgaatttttcaagcagttaggtctaattttaatcttatatgtattatatagtttttcaataattttaagaatttttataatataagagatatatttattaattttccaaaattatttgggtagtttaaattatttaaactatcattagggcgggcttcccaaaatattttatatcatctgctaggattttacattcttattaaatccttagttatcggatgttgtcttttttcctggcccattggccctcctggcttaggcgtggattggtcaatatcgtggtttcactattgtaattggatataggtttttactactacgattagtcttgtctctttgacatgatttttgtttcgttgctgatacgtcttcttagtttttcgatggctcaacatcaaatcattgttagttgttgaaaataacaagttctccgcggttgaagagagttatgagtagtgcagttacgtaacttgcacattagttgagtattcaagttaaggtgttgaatgaacctactacaatagtttctactggtttgtcttttgagaagtggaagaaattgaataggttttcttaagggaatttttcatgggccaccttattttggcaat

SEQ ID NO: 116406 - DNA, 1940 bp, Cannabis sativa
ggtgtaaggacccaatggaggcttgaagcagggacgttacactggggattctgtgtatccaaggccgattcctcactctttgtttttggttctggtcaaaatttgattattttaatggtctatgccgatgacattcttattacaggcccaaagaacaatctcatcaccaaactaatcactgatctcaatcactcttttgtgttaaaagacctgggtaccattcactattttcttggagttgaagttcacagaaccacagtaggcctttacttgtctcaaagcaaatacataacagatttgcttgtaaaagtccatcttgagggagctaaaccttgttccaatactgccagcactatttacaagctttcactgcatgaagggacaccatttgaagataaaactctatatagaagtaccttatgtgcattacaatatctcacacttacaaggtcagatattgcctacattataaataaactttctcattttattcatgctcccacaagtgtgcattgggatgcctgcaagcgactcctaaggtacttgaaaggcactttacatgaagggttattgctcaaaccagttcctaggttatctcttcaagtctcttccaatgctgattgggcaagttgccttgatggtagacgatcaacaggtggatatacagttttccttggcccaaacctcatttcttggtcagctaaaaagcaacaagttgttgctcgatcctctaccgaatctgaatttagagccctggccaatgcagctgcagaaatcaagtggattctctcactcctttatgagcttcactttcaactccaagacactccaattatttgggtagataatcaaggtgcagctgctctagctgctaacccaattttccacgcacactacaaacacattgagatagacttacactttgtaagagaacaaatcctgagaaataaaatctcagttagacatgttcccagcattgaccaggtggctaacatccttacaaaacctctaccaaaggaacattttcattatctcaaaagcaaactcaaagtgacttgtaccctttttcatttgaggggggatgataaccaataaaagattagttagtttgttggttaaaagttttcttttgtgtcagaatgtaacaaattctattataacagaattcttgattgtattttgtttgttcatacactatataataaaatgttctctgctaagaatgattaatcaagcattcttagtctgaggcttttattctttctctattttcattttctaaatactctgttttgagttttgttgttacatatatcaatgattattaagttattgagttgttctagaaagtttaagctaatttggttgagattagaacatgttgtagaagaagataacttaattttttttttttttttttgagttttaggttacatatcagaaccagcagaccggttgctagaacagatgaaccagtcaaccggtggactggttggtcaatcctagagatacccaaatttttctattttgttgctgcaaatttgtgttctgcagcaacatgctttcaatctgcaattgcaggaacttacaattatttttttctttatagttattaaagaaacattttagtatatgcaaaaacacgatttttttagaaatataccacaaaatatttatgggctaacattatataaaattatttttattaaacataggttgatgaataattagaattctgtaattagattctctcttttaattctataattatatatatatatatattcattgtgtcataaaaaattaagtatgcactacaaaaaattgtcatttttagtgataacctttgagtcacaacaaatattttttgtgattaaatgtggtttttagttacaacaaaaaaattatttgtgactaaacataatatttagatacaaatt

SEQ ID NO: 116407 - DNA, 2790 bp, Cannabis sativa
  modified_base (39)..(60): a, c, t, g, unknown or other
tagaaagttcatatttatggtgtttaaacaacatacttnnnnnnnnnnnnnnnnnnnnnntaaaataatttccaacaatacctgtccagacttatggggaaaattggtgagaaagaagattttgtttatcatgacagatgtttggaacttaaattgaatcactggcatggtgataccaagagtgtctcttataaaacttttctcgctcacttttggattgcatcccaatgcaagtaagactacaatttattacagcaacatgcatgaagcaagtgtgaaacagattatgcacgtatttggtttctcgggcaaacattacctttcacttatctgaggatccctatatgtgcaaagaaaatttctggtaaagaatgtgatttgctggctgaaagaatgccaactaggatcaagagttggagctcaaggaacctatcctttgcaggtagaattactttgatcaatttggttctaattactattcagccatagtggagtcagatgatgattatgccaaagaaggtgcttaattccatagaagctatttttagagcttttttttatggaaaggccaagctttattccatgggtctggtgctgttgcttgggagaacatttgccagccaaaaaatgcaggtgatttgggtataaaaaagcttgaggtgtggaataaggctgctatctataagtatatttgggtcatttctaataaacaagagagtctttggctaagatgggtacatagtgtgtatattaaaagacaggaatggtgaagctactcaacttctattcatgccagttggtattggaagaagatggtagctcttaaagaccaactcaaaagtgtaactgatatagcaaattttcagaggcaaaaatactctattgctgctggttataagctgctctcacccccttcaaacaggttatttttgtgtcaagaagtttgggctagattgaataccccaaagcatagtttgatactatggctggcaatgctaaacaggttaaaaactaaagataaattggtgaaatttgggatgcaagtgaatgagaggtgttgtttatgtgatgttcagaatgaaaccagactgcatttattttttgaatgtagtattgctcttcaatgtctcttggagatgaaaaaatggctaacctggaatgcaggaccaatcaatctcccacagctggtaagatggattggtaaggctaaaatttcaaagtttcgaaagcaagtttttactgctgcattggcagccctagtacacaacatttggagacctagaaatgctattttttggcaagctactgccttaaaaccaacagaataatcaaggaaattaaggggtgtgtaaagatacgaattgctttatttttgcctaaaaagatcaaagatgtagatagagattggttcaacactttatagatgtggaatgtatagaaagattaattgtgtatagattgtttaggccctggatggggtgctaacaagttgtaaatgttgatttgtgcaatttaattctctgatttatcaaaaaaaaaatatagatatgttatgattatacattatttcaatataaatatcatcaatcctctatggatggtttacatcgagtaggaacaaaatttaccattttatccttcaatgtattttatctttaaaatacttagctacttataaatgatatttcaacaaactagtataattacttaaagaagagctttctatttatttcgttaagccaaatgctaaggaaactgtcgtttcacttctaaatagttataaaaactatagattctatatttatgatgaacactcccactcaatcgcaccaccaaattctaaagatataagtatgggttatttctacgggtaagttggtaacgaacaagtcaaagaaatcatatagtacaataaagttagaacctaatcatctcaagattgaaataatttgtcgtaagatcaactaagtgatattgacttataaaagatataacaataagtttataatatctttccactgttaatatcggtcaagtccaatttgccaatgccagcctggaaaagacatttcacttatccaagtgtaaacaaaccacgtcgctgattatcatatcagtgtaaatccaatatactgatatatcattggactaaatagtatgaagcatattatcatgattattttcaatgtgcagataacactataatcatgaataacaatatgttccagatttaatagaatttatatattaaaaaatatataatcatgaaattgacatgtgaactaagtaacatgattttcgatctttattaattagtaaataatatcatattaaaatggattttatttagaccataaaatcctaacatggaaaatccttctcagatcaatctctatcgcaacacactaggggctctacaatatttcactttaactaggccagatgtggctttcatatagtcaacaaattgagtcaatttattcatgccccaactacaacacattgggaagcctgcaagagactatttagctatctcaaatgtaataccctggaattaaggaaatggattagaaagccctaactagttaattgagtattattgtagaattatattatattataatttattatatgtgaattaatatgagaaatgacatgttaagaccccgttggtgagctaataaagtgtgactatgttatccttggaatgcttttatgtgttatttggccctagggggtattttggtaaattggccttttggattaattgcaacaaaaaggaattatttt

SEQ ID NO: 116408 - DNA, 1177 bp, Cannabis sativa
ttcagtttgaagtcaaataaatttgatggaagtataccattgagtctttgtcacctgactcatatacaaatattagatatctcatcaaatgatttacgtggagccattccttcttgtattaaaaatttcactacaatggttcgagtagattattcagatgtaactatttcttaacgacttcttaaaggagaatgaattcttatgtatgagaataacacatccatcacatattgaaaaggggtacaacatgagtatgtgaagatcttgggattactaagaattattgaccttttaagtaacaaattgaatggagagatttctattgaagtgacccatctctctcagttggctctattaaatctatcaatgaataatttgtttgaagaaattcctagaaaaattagaaaattggccaaacttgaagtgcttgatttgtcccacaacaaaataaatggtgaaatttccataagcttggctgaagtatctgctttaagtcttttggatctatcaaataatcgattttcaagaaaaattcctaccggtactcaattacaaacattcaatgcttctgcatttaccaagaatcttagacttaatttgtggatcttctctatctagttcatgctccgaagatgacgatggtgagtcttcgcatgtttccgcttctaatttagctcaggatgacaatggtggagaatggtttgacttgtcgtggttttacaagagaattggaggtggattcttcattgaattttgtagtgtttgtggaaacttgttaatcaataattcttggagagcttcctattttgtattgatgcaaaatattggagactggtttgatgtgatgatcgttaaatggaatatcttgaggagaaaacttattgagcactagtgagtaagtattaatttctttagtaagaatatatagttttaaagatgaaaattatcaatataacttacctaatgtagaatttttatattgtattcttttcagatagatcctagtgtgaagataagaattaagaaggtaaatatattgtactaattattctactttgtaattttttttttttgaaagaacctcagttcaattttagattaaatattctctatagccgaaatcaccttctctcttcttttcttctctaaatttcgaattccttgagtgaatgagtga

SEQ ID NO: 116409 - DNA, 2546 bp, Cannabis sativa
acagctgtagtttgttacagctttctgttatttcctttgtactctttctctatatatattgaataagatccttaagcctctgcattgattcaagctcacttttcatctcttcttcttctcaagtagttttttacatttgtgtctgattaattgttttgttcttccactgttattggtttgttaattgtgttatatatttgtagttttgttgattcaatttaaggttgttgaaaacacaataattaatttttatatatataaatactaaatagaacacctttcagtaattattactcttattgatgattactaaagaaataattataaatataaatttaaaaatattaaaaatatataacttaacatcaacttttttaccatatataaaaaaatataaaagatatatttatgttaaaaatatctaatttaacatcaactttttttatatgcctctcaaccaatggaacaactgtaatgcatataatataaaaataaaatatattttttcaattagatagcaacatcaagcattggaattcatatttctcttataatatttattcataagtaataccatttaaaatgcagtgatatatctatcagtttattattattacgcaccatccaatttgggtggccacggtttcttgaggtgcattattcaacagtacagttgtcactttatattttcttttatctgttttccattagtaactaaatgggtatataatattgtcgatcgatggagtaactagattattgtggttgagagtacgtagtaataattcaatgcaattgaatgaacaccaacgacttatattgattatatatatatacataaatagttcccatgtcctcgtacgcaatacatatatacacaaaagaagaaaagaagagtattgtcttttagggcatgtggctgtgtgggtctccaaaaccaccttcaacaatccacgggtcttctctaaacttcttaatggctttttttggctttggacaaccataagtgagtagtactgtgagtgacccacctttacttttttttttcctttttccctcgttggctatacaaactataaaaacttgaaactagctacttcttctatttataattttcattccatctgagtttgatgatactgacatctcactcattccacacatatatcttttatatattcttttctttcttctgtcttataaagaaaagcattagctgacatcagtgcaaaccccacacctgttcgaaccttctccatcaatatatagatacacatatatatagtagaacccatgtaaaattaatatatgtatatttacatgcatgtggccaagtgattttttaaatgataatttggtcaaaaaaatcactatttttctatcaaaattacgatttgtagttattaaactaaaaagcaaatttagttgagcaaataatgtcaaaagtccaaatccaaccggagcattgaaacacatcgctcacgttgttcacctaaacattaaatagacgttaccactatgaaagttccacttcaacagtactcccaaatatatttcatagttatttgcaccatacatatttatagatgagtgttgttattaggcaatgatgtctaataccatttagagataatattttgtgattaattagtaatattttataaaaattattatatcaaattatatatatgagacacaatactcaattatactaataataatataacaccataaaaaagtactatcttttagcatatagtttggataattatcaataaaataaataacatttgacattaaaactatctttttattttaaaataagactttgcaagtgccatttcactaataacataatttataaaataaatttataaattacaagacaataacatatcttttttggttaatatctctaaaagttatttttagttaagaaaaattagatgttttctggaagggtgttcacagaagtctaactctcccatttggaagaagtatcgcggaatgataggtgtctttcggaagggcattcccagatgcctatcatgtccacctggaagaacactactacaaaaagggctttttgcttcggtttataagtgacatataaagaatttactttggttggagtaatttacgttatagccgtagatgcaaatagtgatattcggttatgaaccgacactaattgaaccgaagcaaaaaaaagtttttttgtcggttcataaccgaagtaaaaaaccagtgtatcgatgctatttgttttttgcttcggtaaaataaaaaaaatttggaccgccgcaccaccgcctccatcaccaccatatttatactagttacggattcctgtgccatcacaacatcataaatcataaaaaaaccaaaatcaccatagccctttttcgaattacaccatagtttcgtctgaaccaccgtgcacgtttccttgcaacaagaaaaagaaagttagatttaaaactatttagaattgagaccaccaaagagaaagagaaagtgtgtgtgtgtagagagagagagagaga

SEQ ID NO: 116410 - DNA, 783 bp, Cannabis sativa
ggtatttcttatggaatagggccacctactaataattttctatcttcaattttcctaattagtgacatttggcattatcctttaatgacaatggttatactgatcatacaaattatgcaattaatttccatcacgagtgctattactgcagtgatggtgttaagagaatttgatggtaagtataaccagtttggcttcaagattttttctgtagaaccaggcataatgattgcctatgtacacagtcgtttcatagttctcaactggagggtcattgaggctgttgattctctttttcagcaacggggtaagcttaatttggcttatgaagattatcttgcaagaggcagggagacatttactattgtcaaaaacgaattcaaaatgaacccaaaagaattgttagcatttttagtaagggagaaaagtggagttcaacttgatgaattccatttgggaggaagctacgataacatacgggttccagcaagcaatatttttaacattcaagaacatgacaagacattgcagcacgcattgcatttactggactggttttttgataggggtcggttggacaaatggattgggggccacttgctgaaacgtggcatttttctcataactcaaacaccatgcatttattggcttggttcttcgatagagtacgtccaagagcagcagttgaagacttgatgtttttcaccatgaggacaaggtgaatttcgggcggccggtattgttaggcctgttgggttttgtgccctaaataaaacccattac

SEQ ID NO: 116411 - DNA, 2456 bp, Cannabis sativa
ccttagccttgcccttacctacgcatgcaaataatatttatgagtcgacagactcagtaagaaaagcataatcataaacataaacatataaccaggttgtaaccaagcgcccatacacttgatcacgatctgttaactaggtcaggaacattctcgacaaagtatgactgactatgaatccagcctatactcagtactctagtcgtactgatgtgggtagcagttaattaaataactatctgaaagcctagcatatatatattggcatctccgtgtaactttatgtacacctcactgataccctgaaattcgatggccattggtttacataacatatatttgttggtaccaactctatgtacacctcactggtaccctgagatgttattctgatggcaactaacatgcacactaaatatgtatacataaatatatatatatatatttatgcaatcattatactaatcttaccttgattccaaatgcaagtatgtcggtaaccctaagtggaaactgctgctcgatgttttataggcctctaaatcacaacatacgtaaaattgataagcgatatgctaaatcattttcggggacttaaaattgaaactaaaagtttccctatcgatagataacacagcaataccctaagcatagctaaaacatgaaaatctagggtgccaaaatttctacaactagtaaattggatccccaaccggtaaattgatttctaaaggtgctgcctgggggaatcagtggactagttctgcagtgcaaaactaaactggtcgactggttcagtgtaggaatcccgaaaaacccaataaataactcaattcaaccccaaattgaataaaactctctagagtacctaaataagccacaataaacatatttcaaccaaaaaccatagccataactctctgaattcaaacctgccaataaagacgtaagtttgagctttttgatatttcaccaaattaacacccaaatcaatacaaaaataactcaattcatcatcaaataccagcagaaaactcaagaaaccaactcaactcgcacagaagcataaacctaaaaattcaagcatgaactctaacttttctctcaaaaactcaaagacaaaggaagcataaaccttaccttaaccagttgagaatactaactcaaaatcaaccaagaaaatcctagaatttcctgcctcttgctgctgccgacccaaagagtgagagaaaaaagattggtgtgattttcttatctgtaagattttatcttcacagggcttttctaacaataccactaaataattagcatatactaataattaaataacttagttttaattacaatccattcaaagatccactaataaaatctaaggtaaaaggacttaattacccttactaacttatgaagtaagcaacacacacttataaaaattcacatataatatatatataatgcatctggcattcaaatatatctccgtaattgagataatattttcctaaaacttaattttgacaataagtcctaatttctactaagaattacataatcataaatcaataattaaactcttaattatctactatttctcatgatttaattatgcgatcattagaaactatattatctgacaaaagcttgtagttatgatgaacaaaggtgttgtgcttatgccaaatgcgccaactaagagcaataaactcctccaattcctatttactcaagagattcaatccaacattagctcatagaagctagacgcatcttttaaagaatcaagacccttaataaccattcagaacgaattgacttaagcgtgtagcataactaaagtgcatgaatagtagtctcaattattacaaaaataaatgagacataccttagaagcattcagaagatgatgagtcaaatttgcataagacggtaaaaaattcaagcttgctttccaaacaaaattttttatctttagggagagattaaggtcccaaagaagctttcacgatcgagaagatccagaagaagctgattcttcgccctaacccgagctcgaaatagtgctcaataatcacttttaacagtacataccaatatcagaaaagtatcaaataagcttatcttatttatcaaactaagagcaaggaatagacaaagagcccagttggcacaacttttgaaaaaactaaaagatgctttttaaaaaagttgtgataaaaatgtgtttggtaagcagtcaaaaaaataactttttgaagaatttatggaaaagttacaactaaaagctaaagttgacacaacccaacttttagaaaaaattattttaattaaaagactataataaatttatttatactaaaactatatatacttaattattatactaggttgatgttacgtgcaatgcacgtaaaattaattttttttttttttaattaggttcaataaggtgatgt

SEQ ID NO: 116412 - DNA, 2295 bp, Cannabis sativa
  modified_base (184)..(184): a, c, t, g, unknown or other
  modified_base (1092)..(1115): a, c, t, g, unknown or other
agagagagagagagagaggtcagataagatgaacagaaaaagaaagaaaagaaaaaaaaaagaaagaacaagaaaaagaaagaaaggaagaaaagaaagaaagaaaaaattattttttaatttcaaattaattttattttaatttttttaattttttatataattttttacgtggaccaataanattgtgccacgtgtacactgtgtccagtccaacatggcacttaacacttaaaatggacagaaatgttaaattgctaacaaaatacgagtattagcagttttactacccaaatttgagtattgagagttaagtgaaaccaaaatagaagtaaaataaataaaaattcatcaaaaaaaaaaaaaaggtaataagctttggtattttattttcaaaaagagtacaaatcaaatgagtcataactataatgcaaattaattcttatttcaactttgaaattatcagaaaagagcaaaagaaagaaatattttgattatttgtactgatgatgaaacgagctaattaaaaatttaaatgatttgaactttgatttgtggttgacctataaacttggtagttgataaaaaaaaaaaaacacgcgcatgtttctttcatttgaaactttccaaattttcagtgtgttaatcttgctaagtttgattaatgttgtttgactttatatttataaaataataataataataatttgacctaattatagagaatgttttgttttaaaaaggattgatcaaaagaaagctactaattttcaaacaatttccacattttttttttactttccaaaatagtcaataaaaaatatacgagtgtatattacataaccaaatttaatctcaaaataacaataatcacttttaacaccactacactaattacataagacaaaaaataagacaaaaacggtaatgtgggtgacaagcatgcttaagttaacttagctttcatgttaagatataaataatgtgaatttgattttacttttctctaatttcaatatgcaatatctgattcatctttgtttgttttttcttttttctttaattccagcctattattattattattattannnnnnnnnnnnnnnnnnnnnnnnttattattattattattatcccttaaactttgatataaactaaattatgttttctggacttttaaaacagttaaaaatttcccctgaatcattgagattgatagatttgaggatttttgtccaatttagtaagaaaagtctaatatagatgaaagttcaaggggcttgatttgttatatgtcaaaattcaagagacatgatttggtagatatcaaagtctctggagcatgatttagtacatgaacaatcacaaaattagtaaaattgaatgaaattagataaatgtccttgaatccaacaatctcaatagtcattaggaatttttaacagctaaaacagtttaggagacatgatttggtacatttcaaaatttaagaagcaaaaatcctaattattattattattattgttgtttttgttattggtttagttccaatcaacttgacttttagtcatcctggaaaaaaattttgacttttaagtggcgtttggtaatatttttatttttaaaagttttaatcacaaaaagtaaaatttttatttttataattttattattgaaaaaaaaaatatgttctataaccacttttatttttaaattttaatagcagaaaacaaaagttctttttttttttataaattttatttttatttttatctttttatttcatttaagtcgggttcaggtccggagcaggggcaggagtcggagctaggtccgagttcgagtacagggttggggctggggtccaagtctgggtccggagtcgagtgcaggtttgggatgcagggcaggggcaggggacgaggacggggtccgggtctggggtcggggtcggggtgtgggtccgggtaatagtttgggtctagggtcgaggtccggttcgactcaaggtctgagtttggggtcggggttcgactccagggtccgaggtcggggttcgactctaggttcgggctgaggacagggtttgggtccaagtttgggcggggttgaggttcgggtttggtgtttgaatctatggccgggtctagggtacgggtccagggttggggtcggggtctgggttcggggtacggggtaggggcaagggtacttgtaacgtccctgcttcaagcctccattgggttacacccacggaatgaatgactcttatacatgagtacatcactctggctg

SEQ ID NO: 116413 - DNA, 1335 bp, Cannabis sativa
catttttattttttaaaaacaaagttttaaaaatacaaattttacttttattttttgtttttaaaattaaaaaacaaaagtattatcaaatgacgacttaatttttgaatcaaattccttggaaaccaacagtacattgtttccaaataaaaataaaaattaattagagtaagagataaggtatttctgtaattattgacaaaatcatgggcatttctgtcacttgaagaacttcacttttgtttaaaaagatggctggttgttatagttgattttatggtctttatcggatcggtcgagttctccgcgctctattcctatatttcctaatacaaagtccttttattcgatttctcaaaaaaaaaaaaagtccttttattcgaatttctttttcaggctaaccttttcatttgcagactttccaaaaccctactcacctcttccctcttaccacaggtagcttcttttctcgattcgatcacaatttcaaaaccctagtttcaaactcgatctgttcttctgaaggtaatgtacctatattttgtaatttgcagaatatgggcgaaactaaggacgccgatgtttatgacgaagagctcgttgactacgaagaagaagaagacaaggccatcgactctgttggagctaaagtcaatggcgaagcccccaagaagtgagtgttattatttttttttttatcaatataattcctcgttctcttttttgtttcttataaataaccgccactttaatttttaatttaaacaatttttggtgtaatttttttgtatctgtgctgttaatcatgataaatatagtgattgattgtcatttatacaaatagttcgtttattgactgttgattctgcctagtgctgagcttatttgttatcgttgtttttttgtaggggatatgtaggcatacacagctcagggttcagagacttccttttgaagccagagcttttacgagctattgttgactctgggtttgagcatccttctgaaggtaaactgcttagatcctttttttttattgttgcaattaatgctgcaagcttgtgtgtgtgtgctggccggcccatatttttcagtgcttttcaaaaaacggaacgtgtcttgctgtgccacagccgtagcgtgccaaagggtaggcactgctcgtttttgctcgtgagggccggtatagctatattttatagatttaattatatttatataatttttcaactgtattttacggataattatataaaaaaataaagctaattagtaattttttcccttaaactttgacatgtaccaaatcgtgtccctgaatttttttggccgtta

SEQ ID NO: 116414 - DNA, 873 bp, Cannabis sativa
gagtccacaacatcaattttacattctaaaaaaaatatctcttctggtcccaaaacccaactgtaactttcttagatgagatcaattcactgagcatcataatcaaatttctaaccactaatctatatatgtacttgtttggaccattttcacaatgcaaattgcatatatatcaaaacctctttcaaaagaaattttttttccttttcattttctcaatataagaatgacattaattaatccatacagcaaatttgtccaaacaataacgtgaaaaagaaaattggtgacatagttttatccttatccgaagattttcatgaacactcacactctaaaagtcattctcacataagaaaaaagaaaactacttattcttttggaagggtcacacaaaagtgggggaaaaaaaaaaaagaagaagaaaaaactctatacaatggatgagatcacttagagaagagaaaaaaaattctctgattatttgacatatcatcttcttcttatatagttatagcctcatgacatgatatgatatgatatgatcatcaattcatttcaagtgtttgatatttttagccattgaatttctgttcagttgtggttgttgttgggacctgcatacatataagaccaaacatcactcaatatcttataaccaaacattaatgagtattccttatttgtcccctaaattattaccattaacaaaatatatttctttgattcaaagaaagtgtgatgtgcttagatattgatatgttttaagtaaatattattttgaactttatattttataaatatattaattgcatatcttttgacaattcgaaccctttgtttttttaaaattgtacaaaatattattattag

SEQ ID NO: 116415 - DNA, 2675 bp, Cannabis sativa
aggacacaaaaaccacaaattacaactaattacgttcagatccatacaatacaacaaaaaacaacattatttactaagaaaaatacttacccatatgtttgttgagtatggtggatgttgagggtggagagggccattttggggttaagattaaaagattagcatagttaacaaatttttgtgagggtggcataaaataacaccatgtgtgttttttaagcataaaatgtcaaatttccctttataaattccatgttcatatatacattcctagcactagcttaagtaaaagtcaatatgtttccatccagggcaaattagggagttcatcatggatattcaataagtctatagaaccactctacatcacattctaattatttatttttataattgttatatttaaaatcttataaatttttttaaaaaaaattaaataatttaccatattaagaataatatttaaatattttattacacccaatttatgtttttttttcttataatagcatgtagaacatatatagcacagattagaatgtggacttttaagtatctttcttatgcaagtagagcaacggccttaatccaatccgtgttgatactcttcatgctttgggctcatattaattatgattcttcccaaaagaatcatgaagaaattaatgtaatatatctttggaaagggtggtgataagccgatttttgatctctgatttatattattagcatgaaagagattgtgctactatgtcctgggatttttttcctttcttttcatgtgcaagagcaggacgatgtaacatctcaattcatagagcgctacgtatgtgcttttataaactagtttagataaaatgtgatttaataaaattttgctaactaatctgaattacaaaaatcattgcattatcacttttacaattggagatttttttaaaaaaaatattacacaagacctgccattaggaaaatgaatacataattaagtttagaacaattaaaaatacaatttttggcaactcaacaccacttgccagataagttgatatgtacatttgttagagaagactccttactcatggttgtccaaacatttcttcctattacctgcaccacaaagcacccatgagtaacaaagactccaagatttgctacttttagcatgtgtagctattttgagagttgttgataagattcatcttgtcttcctcttgctaactccaaagctttttctcttgctctccaaaatttttgataacccattaacactctaaaatcatcaataatgtctatcataatgttatttattctatgatctctcttgattgataaaaatttctttgtttatcattttttcaatcatgttgcagtttcttgcctgttgtctcccattataatatccaatgagatattggatatattttcttaatgttgatgttttgttcgaactttgaaggtcttaaaaactagttacagtattcatccacacaagtaaccacatactctcttggttcaaatctttttgttctaaattggaaattgtttaccaaagcaaaaaaatacaatccacactttgacattttcttgtccttataaatttctcctttttcaataatgaaaactttatgatttgttataatttctttttcttcttcctctgttttacttttgttttgttgtattttctcaatgatacaattaaaaacactatcaactacttgaaagatattttgtaatactagtacctggtttatttctaaagtttcatcatcgtaatgcctatcctcgtatgatggctgattgattatctgtaaaactagtttctaaacatctgtattttgtgttactgcttcattctcaggtattttcaggctcgactctgggctaaggcaggctaggcccgtgcctagggcccatcgaaacccagaccccgaaaacccagcacacatatatatgactcatgtatttaaaagaaaataattacactacaaaaaaaataatacatataaaagggcccatttttttaattttactaaagtagtcatgggtctatttttttcaagggtcgaccctggatatttgttgagcaatcagttggaattttgtctcatctatagttgtgatggaaagtgaagactcactaactgtattatgtttatttttgagttcaaagtagaacaacagtgagttatcacttattattttcatcggtggtaaccccgagcatagctggtaatgcatttctattagagtgttgcatttgatttcattctttactaatttcaacaaattatttagactatagtttgtttatattagtagtccagttattatatagtctttatattttgtctcctcttttcattgctctacatattaaaccacatacataattgaatctattactgcaatatattgtagacaaatagttataaataatgattaattaggaaactatttttttttttttggaaaaaacatgtttatttcatgaaatatgtaccagcttgtagatatatgtttattttgcatgttatactaagtctttacttagtttatttttaatacatatataatagtaactggttttttattgttagactttttatttgggcttacattaacttttattggttttattaaaacttgggttgattggatagttctttgct

SEQ ID NO: 116416 - DNA, 1813 bp, Cannabis sativa
  modified_base (1444)..(1446): a, c, t, g, unknown or other
attgcataaaatacaattcaatataatataatacaatacaataaggcgttccaaacgagcccttagaagttgttgctcaacaacctttcttttgttctctactaactctcgttagcttctctctatatataaaaccttgtattaatttttgagattaatgaaaatcacaattcaatttctttcaaaatctttttcttaatatggtttcagagctctttcttttttgagagctatggagcaagcttcaggggttgtcaatggcggctctcttcgtcccaatttgtccacatttactccaaaaattcctcctaaactctctccgatttctttctctcattctttatctgtaagacttgacgaacacaattatctttccctagaagcatcaagtttttactgtcattaaaggcagtcagttacaaagattcttgatcctcgtctcaccccaccgatgtatctctctgatgaggatcgtgcacctcaaaaatttagtcatgagtatgacgattgggatcaacaagataagcattctcatcccctattgtaaattgcttctactgttgctgagacgtctgttggaaatcatcctactctgcttccttagcccatgacttcttgtcactttcgaattgctccaagcagaagatctcatctatttgagggtcttcctcgtgatctaaacagtcaatgaattgctcactcaaattctcaccttccacaccttcttagattgaaggggaatccaaaatctgcactctaatggctggctttcgaccaactcgcttcttcttcaccatggaagctggagagagctacaaatttgttgtttaggtgtttttctgttatttttatgtgttttttcagttgttgtttaatttatgtgaattttttatagtatatatttttagtttattctagataatttttttgttgtatatatgtgtatttattttgttatttttatgttgttttttggttgttttaaagtagtttctagatttttcttgataaacagttattttttagttttttttattcatgtgtattctttatggtgtatatttttaatttattcttgatatttttttatcgcatgtgtgttgctttgtagatgtagatacatatatttagtttatttttttgacacattttttttaaaatacaataattttttttattgcacaacgtgcagtagtagatattaacatattaattatatgttacatattatattatattatattcccattttgaaatcataagattttattatttctattattaatgtaattatttatttaacttctaagaaataaattatcattttaattgttactaactcaaaaaggaagagagaacaaaagttgaagttatgaagttgtaataataaattccatgaaaaaaaatattatattattattaaataatataatatatagattannnatgtgtaataaactaataatatgtaacataagataatttatattatttgtcattattttgtaacatatatgagagttacttgttactataagtaacatccaccattatcaccaacattaagagtgtaaaaggtgttacacatcttaatttgaaattcttaactctataggagttatggtgtgtatgagttacatctctttattgagtccataacatctttggaggttatgacttatgaatttgaatttcaaatgatgatatcctaaacactatataaaggaggtctatggtgctcatttgagagtaagtgagaacatgttttctatcaaaaaaaagcactttgctagaaaatcctaaggcttgataa

SEQ ID NO: 116417 - DNA, 3572 bp, Cannabis sativa
  modified_base (3245)..(3252): a, c, t, g, unknown or other
tttttttttttttgaaataggggcctaagcggtagggggcctaaggcgaccgccttcttcgtctcacctcagggctggctctgtactacaggtgtctaataataatgctctttaaaaaaacataataagataaatagaaaagataaagaatttattgtatggtgcaatataaaagttagatgtaaattaagaaaattaaattttagtagatatattttaaaagatagagttgagaaatattaagcgtcactcttattttattcattatttatttgtaaaatgatattatgtatttatatattgctattagacatagtaatataagatttaataattaattatattaatagtaaaataatacgtcggatgatgaaagacattcctatgctgtcttaaatttattgttgaattctgtaaatgaaagaatagtgtaaagttggtagtgactttgatgacggcagttgaatttagcaatgctatgggaaagtagatgaatgtgcttattaattattgagcttgcaagtgtgtggtgtggttacgtagttcaaatcaactctatgattatcaaatttggtggctcacataaaaaccaatctatactatatttatttatttattcaatatttggatttgagaatgattaattcactgtgaatattaaacccaaacaattaaacaatattcttttaaataaaactatcctttattaatcgtgtaagacttcaaatttcaaaatttaaaatatcaaataattctttttttaaatttgaaaaaattctcttagctgcatatctctttaacaaaccgcatattttcaaattttgacatttttttgttatttttttaaaaattttgtattatttatataatcatgcagctaatcattatattttttttttattaaaatttaaaaaataattaaacctaaaaaatatctatctcttctttactatcgactaaatcatagcatacataatatatatatatattttgaaaccgaagccgtttattaaaacaagagtaaaaaaaatttcatgggatgttttcaaattattattccacactttctaatttaatttaatagttttttttttttaaatcatgattttatacacaattagcttaaataaaaatcagaaaagaacaataaaacaaaacgtgcattgcatgtaggttgcctcctaatatgacaaatgaaagattagttagtttaggaactttcaatgtaaatatttgagtttaactttcaataataaataaatatttaagtttaatttttaacgattatactacttaaattatattttgaaacttttgtaagtaactgaccgttaagtgtcaaattattattttcttattgatatctttaaattaatttttaaataaaaaataaatacttaatgacatgaaacaattagagactgccacgagataatttacttaataattaatggccagatacttacagaagttttaaaattataacttatatattattaccattaaaaattaaacttaaatatttatttacaccaaaaatcaaacttaaatatatatgccgcaaattactctataactcgtactatttgaccccaacttattatttcatatcccaaattatgacttaatttaggttactaattagttttttaaacaactattaataaaatctttttttttttttaaagaaaaagtgtttatcaataaataaaattaaatctcgcggccattacaaaataagtttgctggaatggaggaaacaaacaaacaaccaaactgcttgtgagtagacccactttgtcatattatgggctagaagttacaaattctactggtactagaaaataaataaccgaaaaaataaggagaagtcatattacaaaaagaaaaatagttctcaagcttctaacaagaaacattgccattaagagtattgatcactaccttagagtcgttctccactataataaacttgcaacatttatcctttgccatttctatagctaagcaacaagtagtcgcttcgccacaaagagcatccgagaatgcaaactaaccgtgctaacccaaaccacctcaccattgtggtttctagcaacaaccgcaatacacatgctttccaccaacctcacttttacatcacaattcagctttagccaatcttgaggaggagagcgccaatcctctaacaagatcggagtaggagtagggaaacgagaagctctaaaatctgcataagagtaatgaataacgtcaatacaatgttttgcattattcagattatgattgtgtaccttatcattttggacccgccaaatggtgtcaacaactattaaaacataaagaaagacctcatcaatattaatgcccttattttttaagctccatatgaatttgatctagtcccgcatacaaatacttgtatcatattatcaattcatgccacaaaaaataaccaaatcactcaacattaagatttaaaatgattaattaatatatttaaatcaataatctaatttagaataattaataattgagttgaattaataacattattttaacatgattaggtttgcatggtattataattagtctcacattgttaagaagtaaaatactatatataagatgaataaattatttattttattgtcaattaattttaagatgaaatccctccacaatatactcctcttaaaataatttatataataaataattttatatataatcacctcttctttctaattattacttaagtagtcatattgaatgtagtattaagataaaaaaaacaaattacccttaaaacaataaatatttttctttttattcggtaataacactaaaataatacatattttttaaatataatatttataaaccttttcataacaattaagctttcataaagtaaaaattcaatgtttaccgtatatataaaattaagggatattagcggctaaatcacttaaactttacagtttataatagttaaccacaaaaattgaaattttggcggctaaactatctaaactatagttccgttttgctgtctaaaatcacagttaagtgtcatgctagactgtccacgtgtacacatgtgtacacgtgacaaatttatagtgttccacgtaatattagtttttaaaaataattataaatatttaaaaaaaaagtgaaaaagaaaaaaaattaaaaaatcaatttttttttctttttcttcttctccttcttcttcttcnnnnnnnncttctttcttcttctttttctgcagaaaccctcccagcccactttctctctctcgtctcaccactagatcccgaagcaccgtctcaccatcggatcccgaaccctcccagccctctttctctctcttgtctcaccaccggatcccgaaccctcccatccctcttcttctttcttcttctttttttgcagaaaccctcccatccctctttctctctctcgtctcactaccggatcccgaaccttctcaaccctcttcttctgctgggaggatttctgcaaaaaaagaagaagaaagatgaaagaagaagaagaaagaagaa

SEQ ID NO: 116418 - DNA, 2247 bp, Cannabis sativa
  modified_base (2214)..(2219): a, c, t, g, unknown or other
tcacaactgacgcaaaaaatcctacgtaaaaaaattaaatcaacagatgggccaagcccatttcacaaaccctaaatatatataaccttctactttcagccgccccgtataccattttcacaaaccctaaatccatatcaatctctcactttatttctctttctctctatccatctcggtgaccaagcctagtaaccggccacaccccacggcgtcgaaccaagcctagcagtagccacacccaggtacgtttctcacatctctttctcttttgctccattttgaagtaaaaattaatttggacctatgggttagagatgccaaatttgattgacaacctgaaaattggagaataaattgttgtttgaaataactatattagaagtaaagcctgcctaagtcaaatactgttaacttgatcatagataaattgtatttaaagaattttataggagagtttagaacttgatgctacttagacactcaaaagacttttatttcactttgaactcaattatgtgtgactgagacttgactatttttaccattatcgttttttctaacaagagtatgggatatgaaatttgattcttgtgttaatttgatgtggataattggaactattttttgatggctgttatgaggaaggagttggaattattttcacgatacaagaagaatagggttttattagttattataccatacttattttataatctatttatttgtgtccaattttcttaaatagacatatataatactctcaataaaatttattatgggcatgattatgctgttgcaaataatactgaaaattgacttttacttaattaatatctttattgaatctaaagttgtgtccttaagaacatgtaggagtgagtagttagtgacaaagttccaaaattctagttgtcatggatctattttgctcactttttcttgacatgtatgcttatcttttaataagagttcagagctttataagctattgtaaatacatgtatgaggatgataactattttaacgttcacatgaccaaagtttgtttgcctcttcattataaaaatcatatatggttaaactacacacaagaaaataaatagccaaaagaaaaggtaataaagaaatacagagacaaaattatacattttctcactcaataggtaaaaatggcaaattttatttctattagatgtatagagttaatatgtatatatagcatactattaagagaagaacaaaatctgctggaattattaaaccaaaactaattatatatactaatttatagaacatatccaatatactcaatctaaaataattttattgacaataaagattgtacttcttgaaagattattttgtttaagcatttgatttaccatttggtgctaagtttgtttgggtgttcaattgtgatagtatctttcgaagaatttgtttgaacgctagcttggagtttgtaagctacttatgacattcaaaattttatatatagatagtttgttccctcttttgacattcgacttcgcttctttaattttcatattaacaaataaatatttactatttgtgagttagactctgttttttcttttatatttcttagctaactaacctttagctgattctgtttggccgccaaaaagacaaaatacataatagcctctttttttcatcaacagaaaatagacattaactttgtaacaataaaactaaggaacaatgttgtgtgtgacttactatagctttaaaagttcatgtgctttttgttgtttcatttatgtataacttgtttggtactattttttattttatctctttttcttttattttagaaggtagctaaaaggtgacctaaaatggagaagaataatctcatgtctaagcgagaacgtcgcatcaatacaaaggttgatactttgtttctttggtgttggttttagttgtattgctgatactggaatatgtatctaactccatgatagaattgaatgtgatactttggttttttaatcaatattttgtgttgggtccctgtatttataattgttttgaacatttaggcttcgaatgtggcatgaagaaaagtttggcttgtgggtcttgttggaggatctttctgagggaaggaagaagaagaggaaggcttattacactttagaacaagtatttttgttagctttggtgtaaagcccgcttagttannnnnnaaattatcagttaattatgattatttat

SEQ ID NO: 116419 - DNA, 716 bp, Cannabis sativa
tacagggtcagagtacacaaaacgtaatctgatttttagaaacattaatactttcaaattcaaagccctctttccaagctaaaattaatccccccgcacatcccacagctggcacaacaatattatgataagagttgaactttatatcttgctccactttttttttaaaaaaaaaataaaaataaaatgttaatatgggttgttgaaattaatttagtataagatgattataattatttttttttatctcgtgaatttacgatgtacatattcacaaacaaacaacatagaaaccttctcgaatcaagataacttatcggattaaccgaaagagatgttttgttaaatcataaacagctaaaataaataagaaaaatataggataaaattacccttaaaaatttagacaataaaattataactttttaaaacaatacactagaaaagctagaacattagcttgtaacactaaaaaaaatatagaaacatatgagataagatgaaaaaaaaacataactaagccaattacaactctatacaaaaagttataaggactaaaaatgattaaataaagtgttacaatccaaaacacaaaaataaaataaagagaagaaaagagatgagtactagagttacaattcaaaacatgaacatacaaataaatgtaaagcaatatgacaacatggaagaggtttcaatggttacatttttattgt

SEQ ID NO: 116420 - DNA, 920 bp, Cannabis sativa
gccactcatcttaatacgaaatgttttcctattgatatcccgtgaagatacgaccctagcgtaaaggacatggctcgactgagaagaactgccattgtgaaacccagcaggaagtgtatgcacttccctttcagattcagtgagaattaaagaatgattcatatcgtgcaagaggtggtccatgaaagagatcagagaaattgcatgagtacaggaaatggaagtgcagaaattcaaagggacaagaggagggaacggttaatattcaaattaagaggtgatagtaaacgatggagggaaatattagggataatgatcaaaggagaggtagttaaaacagttaaaatgaaaaaagggaaactaactaccacagagctttttaagggcatacatgctcacaatttgaatatttaaaaactcttaaaagatttgaattagtgttatgaacataaatatttactaaagataaaaaaatagaataaaatagagaataaatgctataaatttctatttgaaaaatacacacaacaagtgttgaacacaagacctgttgcatgaatgaacgcaatctaaccatttaaactatttttaatatattgacaaatattgctttgtaaaattaatatattttcttcttttgttattgtatgtataatatgtcattttcttttaattttgggcccccaaaattacgaggcctaaggccaaggccctgattgtcccactcttgggccgactatggtgccagtaattatataaaaacaaaattgtacaagatttttgagttctatgatctgtacaactgtaagaattttattcttttgaatatatgtatagggcaagactatggtaggacctagcaaaagttctctaccggtagggaactttttttgaccattgattttagatcatgtagttat

SEQ ID NO: 116421 - DNA, 1041 bp, Cannabis sativa
  modified_base (984)..(1011): a, c, t, g, unknown or other
aatattcaataatttatatcagtaatcaacaattatgattaagaatatcatgttagtgtatgtcttgggtcttgcaatttcgatcttttagttttattgtcctttcctcgtccattatactcaactcagcttatattttgaaaagtctccaaaattattgattgtattatgatgaaagtctttctcttgtctataattttaagttaaatattgaatgaaatgaaatcacaaattaaaggatgtaaagaataattttgaagaaaagaaaaaaaaaagaaatagaagaaaaagagtattacaggttcaagagagtatgtatgggtcatgcccttcattgcggacaattttataaggtaggtctagttcaaaaatgagccaaattagaaaagttagataataaattaggtagaagaacttaaagtcactaattaaaaattacatcaattttctcaagaaaatttatatcaacttaaaattaaatggggctactttgctccatggcccattatataacctatgatagttcactgatagactattttcagtttatatgttataattaagaataataatcacgataatttaagattaaattgataatttatgttccaaatataaagaagataagaattattgcatgtgtctcaccgctagtatatatgaagatttctttacaatacccctaatttaataatagaatgagaaaataagatatgagatgttctacctccttctaaaaaagaaaaagtgaaagagctaaccaaatacaattaaaagagtgaagaatatcccaacttaggggctttgtcttaccttattgctaaattttggaattggtacttttcaaattaaaaaagaaaaacaaatcccatatgatggcccaccacgtaagcccaagtcgtaacacccaagctcagccatctgagagtccagtggacttcttgtggattggggatattttttaaattagggaaatttacatgnnnnnnnnnnnnnnnnnnnnnnnnnnnnaaaatactgccaggcggtattttttacttt

SEQ ID NO: 116422 - DNA, 2369 bp, Cannabis sativa
aaaatggagctggttcttgagatacatgccacggccagcctgaagctttgtttccataacaaagaacaaaatgggtcggtgttgcttgacaatcagggagaggttacggaatgctcgagggctccctaaaccttgagcatttcagctaagaagacttatttttctcgacggggtcgcgaagcaatacctgccgttttatcatcatcagacataaaagggaccaccacatcctcactcggcacagcccttgcccttttaagcaagcttcggactgaaccaccaatttgggtagtcagtcgagtaaaaggacgcttaggaagtggaaatgaggcacggttcattgattgtgagacttttgtttcgggtaggattgttgacagttgggggaggaggggaaggatcaggcatagcaatgcctttgcctttgttgatgtgtgttatggcagaagttaccatgatgggtggtggaatagttgattggctgaactggtggacgttagatggttgggaaaaaggatgaaaagattgagtagggtggctggtggtgaaaacaggggtagaaagctctagttccatgtggagaaattgatcaattgcctgttgtaggccttaatcgttgttggtactgggagggatatactcttcaatgggggtggaatttgagatttcaaactattttttcttgaaatttgttttggtggaggctcgaaggtgctctttgtatcccaattcaggaggaattgggaagttatcaccgcgaaggagatatttcccacacttgttgtaagtgtgatccaggagtccacgaaaatagcagaaattttggagaccttcaaacttaaagctaatccatttagggcgatcaatggtgcgaaaatggatgttcataccccttctcaggggcttagtgacatccagaaggacctaaatacggagatatggaccaaaactttcaagaagggacaacagatgaatttcgataagatcaccaaattcatcagcgatgaactgagcttggctggataaaacaacatcaatcatataagaggtaaaataaattatttcttaaataacaaaattaaatataagaagttaaatttaatatgcattcatatgtaatacccagagaacttgtatctatatatatatatttatagtttaaatggtttgactagttgtagttggtaaatgaaaaggaaggtgagggagcgagacttaaatacaaaagggcaagaaaataatggccaccattggaaacattaaaactaaaacgatgggtagcattgtagcaatgtgaaatatttttttactcttttattcatatttagggttaattgatggctccctttaatttttatattttataacaattattaactccaatttaatattttggtagcaatatcattttgcatattatttttttattttacaaatttagtaagttatacattattaggagaagaatatttttagtgaaattttatttgtacctcaaaaatatacaaatatactctattttactatttttattttgcataaaatacatatacttttaatttatacttattttactaatgtacatattacttatgtcaaaaaaaaagtaatgtattatttgttatagagaatttttcttatttgtgtatcagtgaataatttttcaataaaattatgtcattataaaaataaaaaaaaactatgttacaaaaattaatcaagttgcccaaatttatctagggtaccttttgtttttttgttttttttttaatttatagctaattatttatcgagatttttggaaaccgattaaaaagagcttaagaaaatataaaatattaaataaaagacaaatagattttttacctggttcaggcgttgatgatccctagtccatgattcaacagtattagccttctttggcgagtattacaagtgtttacaatgataatctatgtattcctttcgtttctctttaagaagaaagctctctaggaattttagcagaggttttgtaagtaaaatttgttcactctctgtacataagaaaataaaagtatttatagagacataagcaggtaagggcataccattaacctcactagagtttcttactcagtacgcaagtaagaccgaaaaacactttaagactatctaatcgttggtttagtaggtactccatcgtgtggtgcttaattgatgtaggctatcacgtatagatataaacatgtgtcgttcaaatgtttctcctttgaaagtaatatcccaaacaagtcgttggacaataagcactacataggcacatacgcacacaaccatggtctgatgttaggttatatttagcctatgtttcgggtctgtaaagttag

SEQ ID NO: 116423 - DNA, 5370 bp, Cannabis sativa
  modified_base (5246)..(5247): a, c, t, g, unknown or other
aaatgtttaatgggccggcccaaagtatttttgtaattttttttccttttttgtatttttttgtttttttccctattttattccctacttagatctatttattttgctccattttttataaagaagaaaaaaaaaactataataaagcaaatttcattttcttcttcttttttctttctttttaaagatacaaaaagatagagagaaaggtactgtaattgtaccaaacatagattggaaattgaaactgttcaaaagataataagagaagctatgtgttttcattttcatcttcttcattatcactcaaaagttcaaaaaatgagtttagatatgtgtttgttgatttgatgaaaatagttttgtgggactcacaaacacacaacacaaacacctctatttcattctgacactctaaaactttttctattgccatctgatccagtgggacctttttcaaattttgggtcatttgtcttcttctacctcgaaaaacatttgggtttggcatacgttgccacgtggcggcccaaaacttgattccaaagcccaattgactcctcagatgaaaatcacaaaaaacaataacaaaaacaaaaaatttaaaaaataaaaaaccctcttttttttatatataatttggatcttagacaaaaatccaagaggttaacggctacatttttatgaatattttttttgggcacattaaaaaaaaaaccaaaatgcagactgaagccacgtgaaaaaatcagaatagtccttcggatttggcgggaatcagttacgtggggcccaattttgtccaattcgggctatttataaacagcgatagtctatgtagttgactgagacacttggacttttatgcttcgaatccacgtggaccccactcaaaaccaatttttttttaaaaaaagaaaatgggaaaaatgatgacaagaaataacagccaaaaactacagttaaccaaaaaaaagaaaaagaaaaatgaaaataataataaaagggttggttaagggtattttgggaaacggaaagtttcagtttcaggttaagccggagaaggttgagaagtcgggtcagctgaagatggtatatcgggtccgacccgacaaccttcgagcatgaatacgatatcggacatggtaggtcggtcaagaggatccggagctgtgcagagcaacccgactttgactccgagcaaaaactcttcccattctgaagattcagggtcaagttcaagcaaccccggttccaaaagttcagtaatttgacctttttgaagttgtttcttaacccatttgacaatatcttcttcgtcttgattgaacatgactggtctttttccggtgagtagttcgagcaagacaataccaaagctgtaaacatcggattctttgcttaactccccagttaacacggcttcaggtgaaacgtagcctaaagttccgacattggtggaagtcgaggcttcagatggggtggggagtgtgagacgttccaagccgaaatctgataaatgggcttcgaaatctgcgtcgaataggacgttttggggtttaacgtcgccgtggactattgacgatgtgtggagaaaagctaaccctcttgcgattcctagtgctattaggtggcgcattggccaattcaagacgtgaccgtcttggtgtgatgcttcttggaggagtgtagcgaggtttccatttggcatgtagtcgtagaccaagagtcttaagtctggtggtccggcgtagtagccgcggagaacggtgaggttgcggtggcgaattcggcctattgaatccgcttcttttcggaagatgttttcgtctagtgctccgtcgggtagacgcctaattgtgagtaccattccgtcgttgtaacaggctttgaatgctaatccgtaacgtgttctgcttagtacgttttcttcgtcgaattgtctagttgcttcgactgtttcggctagggtgatcttggtgttgaacatggttagtttcgggccgccattgtctgtgcttcctctgcctccactggcacccgaacttgctcgggctggactccttttcttttcccctgaagccttttgtttcagcctttttcgccatcttaagaggctgaaaatgtagaagcaacaacataatgctagtaagcaagctccactggctgccacaacaactaacaaaattagtctcttctttctgtctttgtctgttacttcttcgcatttcttatctaatggctttccacacaagcgttggttatcagcaaatgcagatgggttattgattctagaccccagagtacccggaatctcgccttcaagattgttttttgatacattgaagcttactaaaccagtaagtaatgacagattatctggaatctttccactcaagttgttagaagaaagatccaatgttgttagattcgataactgagccaatgatgcaggaatgtcacccgaaagcctattcgagtttagtctcaaagcttttagggatgagcattttgagatttcctctgggatttcacctgttaagttgttggtacccaaattgagctcaagcaaatgtgtaagccgagaaagatcagccggaatgtgtccggtgaataaattcgaatcgagctgtaaaacttcaaggccagagcaattaccaagctctggagtaatcaatccagaaatgtggttatttgacaatgagagaacaactaaagaccgaagaaaaccatagtttgatggaatatgaccagagaagtcattggagctgagattcaagtatcttagactcatcaagctactgaaaccttcaggaacatccccagacaacttgttctcctgcaatgcaataacttgcagattaggcaaaccagagagctcaaatggcaattcaccagagagattttgtttgctcaaatccaaagtagtaagcctgaaaagatttcccacactagccggaaccctgcccgaaaagctattcccactcagattcagaacctttaaccggctaagattcccaatactctcaacaacatcacctgagaacttgttcccactaagatccaaactagtcaaattgctcaaacccaccagctcaacctccggcattgctccagtcaacaaattgcttctcaaactcaaagtctccaaccccgaaaggttggtaaaactcccgggaatcgaaccggaaaactgattctccccaagagctaagattctcaaacccactaaagaacccaaaaacacaggtaaatcaccagttaagcgattcccttcgagatcaagaacccgcaatgagctacatttctcgatatcaaccggaacatcgccgctaaaagaattattggtcagtttcagctcttccaatttcgacatgttaccaatcccaagcggaatcaaaccagagaaagagttacccgaaaaatctaacctcgttaaggttacgacttgtcctaaaaaggaaggaaactctccttgtattttattgtgttgaagatcgagaacttgaagagtactgtagcattccccatttttgggaccaataatatccgtgaacgcattaaaccctaattgaacgatccgaagcgacgccgtatagacagaaacattacaaaacatcgaagaaggaactgaaccagagagattattaagcgacagagaaagcacctgaagcttcggtagagctccaatggcggccgggatcactcctccgagaccattcccttccacactcaaatgcatgagtgaagaacaattagctaacgcagaaggtaaagtacctaccaagagattataatccagccatagatactgaagctcttgaagctcaccaaaactcgccggaatctctccggcgaactgattgtaagagaggttgacaagctgaacctccgtcatgttcgaaatacttctcggaatgtcgccggagaaactgtttgaggaaagatccaagtacttaagcgccggagggaggttaccgggaatgttaccggagagatggttctgtgcgacgttgaggatttgtagactggtaagattcccgatctccgacggtatattaccggaaaatgagttgtactgcaagaacaaagaccggagaagcgtgcatttggagatagacgaaggaatcgagccattgaacgagtttgaacgaagactgagtttctgaagcattcgaaggtttccgatatggtcactgagtcgaccagcgagttggagactcggcaacctgagctcagtgactctgctattagtacactcaactcctcgccagtcacacggagccgacggcgtaccagcgtcccagccgccgagcgagccgagcgggtcgtgaaggttgatcttaaaagaaatgagtgcgtctatctcggcttgagtctcggcggcgccggcgcaggataagaagggtgcgcagagcaccacgaagaagaaaaaagcaatgaaagccatttaaaaaagaggttcagaataagaaaatgggttgcttattattatgagctttgtagtggttaatgatgggggttcaggttaaggggggaagaagaggagtgcgcataggtggcgtatgttagaacagagtgccggagaagagtgcattggaagagagtgatggccattttttttttggtccgaagaaaaaaaaaagtgagtgagtgaatggggaaggagtttagctctttatttcttttctttcttttttgtattgagcttataacataatgttttttttaaaaaaaaaaattatactatttatatatatatatattttttatatatattttacataacaaacctatcaaaatttatataacaattcacttaaaaattatcaaaacaattattcactatttgcctactgtaattacatcttcagttttagatgatttgatttaatgaaattttcataattattcaaaaaaaattatcaaaacaattattaaaacaaatctaaacaaaaattaaaaaaaataaattaatatatgagataattccttaaaataaattctatattttctaaaataataaaaataatactttaagtttaatttgtaacaattttttttttaaaataactaatttaaaaatgattcttagtaaaaataaatacaaaacatataaccagttttattataagatatctaaattaaattatattcaagttttattttggtaaaaaaatttgctatactattcagtactattttaaaaattacatcatctattgtgtgtttggaagtaactgtgnnattactaggtagggtaattactagagtggtaattacatagtttagtaattacactatattttaaaatacaatgtgtgtttgaatatgaagtggtcattacatatgaattcctaatatcttgtt

SEQ ID NO: 116424 - DNA, 1510 bp, Cannabis sativa
  modified_base (50)..(63): a, c, t, g, unknown or other
  modified_base (1451)..(1476): a, c, t, g, unknown or other
acccataaatttctcaaaaaacaagaattttagttatataggcacacttnnnnnnnnnnnnnnatatatatatatataataatatattattattaattacttgtgtgttttttatgaagtaatgagctttcttaagcattgaagtgtattcgtcctccaaatgggttgccatgatggcttgaacagccaaagcacaatcccaaagctgagacccattaaaatactgaaatatatacataaaaagactccagtcacaaacattaattatattctttatataaagcaaatatatcttgatagaaaatgatccaatctaataaataattaggttagacttaatcattaagtcaaattaatgggcttcttataactacataagaaattattattagtaagtaataaacataatcgatcaaataaagaatatttgttaaagttaccataattcatgaagcattcgacattactaggtaggcttataaaataaagagaatgacctgcattttcaaaccatcttcagcaagccaaagataatctttaattggggaaagatgaaacatgtaagcatcagaatttggattctcaacccaacaacaaatcatgttgagtacctgcgcacattatcgtatttgttattgatacaatttaatattaaattttataaatttatttagctaaataaaatatataatatttaatattattaatttgcgcctgtcaccttattgacagggccagcacagacatagttggtgtcttcgtcttcgtggtggatatgttgcatgagagtatgaagagccctttgtgttagcttagacaatggccaactcttcaaaagaggttctcctaccttatttaggaaaccccatagcatgtcttgtatttttggatgtggataatacaaatcctcctaataaaaatcacaatcacatattgtgagtatattatttaattaattaaaattattagaaatagaattggaatttgtgtctaaataaatcctctctaattatacaaactattgcaaatgtcctccttacactataaaacataattatatttaattagtgacatctttttaaattggtgtaattggtgctggtgatcaattcactttattatctcttgttattcaagctaagttttttggtttatttagttttgttattactggttttaattctagttatgtttgtttgaattgcttgtgttcttgctcactgaattgagtttaacaatgaggattaagcggtgacagtccactacaataattagtgctacattaataaattatttaaaaaaataaaaatttgttttgatagatagctttttaatgtgattctttttaaagcaaaattaagtttaaaaaataaaaaactctacacaaataattattcaagggaaaataatcatatttattcttaaaattcactacaaaaaactgttacttnnnnnnnnnnnnnnnnnnnnnnnnnntaatttttttgtgactaaatgtggcttttagtca

SEQ ID NO: 116425 - DNA, 1012 bp, Cannabis sativa
ccatgggtttccaagcccatggcaattccatgttattagactcataatgataggtgggcttgggaaccaagacccacctttgttaagtttttaattgtggttatttttttttccaaatatatttttaagcatagcaagccaaggaatgaaactatccttaggagaattaagacgactccaaacaatagagctccatgtaactttgttgattggaggtgaagagcttgataaccatgcaacattttaacctgtcatttgtaaattgatttgtattaaatagattccttgctttttctttgatggcaaccagtttgtgccaatactaattccaccaatcttcctccttcacgtacacattatgtacctacttcacccacaagttatcttttttttttggcaatggcccaaacatatttaaacatggctagctgttatattccaatcaaaaatgcttctgaaccccattcctcccgaaaatttagaaagacaaagggtgttccaagcaacatctgctgcccgtgtaagaaaatgattaccattccacaagaaatcacgacaaatagattcaatttcacacaactttttgggcagcaccataaattggcaccagtaagcgtgaatggccatcaacactgtgttgatgagaacaactcttccaacaaaggacaagttttgagaactccaagctcttatcctggacaccatcttctcagctagtgcatctttaaatgtgttttttggggcgtatagtgtcagttttggcaaaatttggtaccgacactgttccaagcgacgtcgcagagggggagaaataaccgacgacataggaatcctatgactatggttattattaaataaccgacgtcatggggacttcctataattttttatttcaactttagaattttgttgaataacataatttttttctaatttttatttaaaatttaattttttcacatatatatattattttattattaatatgtttaaattaagtataaattatata

SEQ ID NO: 116426 - DNA, 2835 bp, Cannabis sativa
  modified_base (2752)..(2753): a, c, t, g, unknown or other
catatataactttaaatttaaataaatgccatataagggtggtaaacttaaaaaagccatatttttcaaacttttttgtagaatcccatatttggtgtaattttcacaaaggaaaaagggtccatgtgggcctctaaacacttgtgaaatcttgagcattgacacctaccttggaatgtaaattctaacattggatcattattgatagctttgtaaacaaattaatttgactaagtcattttttaagaaaaactctaccatattcttttcaaataagagtttataatttgaatgtttattcataaaaataacaaagacaatttagataaaacattcttaaatttcaaaagggctatgtatcgaggtactgtactttaatgttataaatactacacacttaaattatgaaatacaaattagacaaaccactatattacacaagctaataatataaagtattaaattaaggttattctcaacctttgactacttgcactacatccaagaacaaccttgaaagatgtgagcttttggataccacttccaccagatgggacaccaataccaccgtcaagggagaagacaagcacatgtgaacactattacaaaaattaatcaatttttttttcgaagattaacgctattaaaattgactatcggtttaaaatcgttggcaattctaaccctctaaaactgtcggcaattctatagatttgccaatagtttttaaccgatactcgattttcctctttttctctctttcaaatggtaattatatataaccctaaacacgatttggattatttcttaacagatgaaatatttttcttaagattttagtattattgttgttgttgttgatatagtgtggatttgagactgtttgcattattgtcgtttgttggtatggatctaagatatatcttgtatctatatgatttttttaatgtgtccgtcgacaattgtggcttactatagtcgatgtttcggcaaaggaattgtcgactgttataaattgttggctatagtgccagatattgctgatagttttaaacattcgagacataggcattctctactatcttttactgatgcctattccacttgcgacagtcgaataggcatcggtcatagagaccgatggtaataccatacttggctacttttaacaatcgaaaaatcctttttttagtagtgaaaattccatattgtataaataccaacttattaattaattaataaattaataaaatgtagaacaataaagttaatactgaaacaaatattctgtaattataggctgagattttgtaactacataccagaaaatacaaataaagagcaatagtgcagaaaaataaaaacatacaagattttttatatgtagtgtcaacaatcattggagaatgttaatagtctatgataccacacttagagataagattcattagtccaatttcaataaatataaagtaattgacttaaacaaaatttagactccctctaatgattttgtcacaattgatgtactcctatttgttgaattaatatcattaagccaccaaagtttgactcccttcaaattacctgctgataaatgtttgatttcctccaatataagacttatagaaatcttctctcgcagaaaataatacttgcttcttccaaatgcaagagttgaatgaacattctcaaggtttgcactttattcttctctttgttaaattgtttcaatcactaaaacaattacagagattcagtattactgaggtatagttgaaccactatcctccacacgagaaagactctttactatactagccaaattcatcttgcttcttgggatcttgtttgtactaagtgttatggaggcttcgggtttcgtgatagattaagtggaataaaatctcgattgctcggtttaatttgtgtgggctctaaccacgaagcaagatgttctttgggttaaatagattattccatctacttaaagcaccaagattaattcttggatgtgagagagaaaatgggatatgagttggtattagcgcaactttctcaatctcaggaacctgttctctcaggatgcaattttggaggttagaaaagggggaagattttgggtacgttagtaaactctataatattttgctcactctttatgcaaaggtggataattgtaaagtgatttggtgtaaattatccacattaaagcatagattttttctctgacaagcctctcataattattattaactagagaccacttcatgacaagaggtattcttattacgtgacaaagtgcgcgatataggtgatgactgtcatgccatgcatcttttctttgagtgtgatcatttctccaaaaaaaattatggagatggttcagtcttggcttggtgtggccatttggccaaataattactcagattggttggcgtagatttccacaaagagacagcatagtttactttttgatgttgcaacggctacttatgcggcaacagtttactttgtctggtggaatcaaaatacttttattttttaagagaaaatatttatgctttcctatattgatcgtttgattagaatgatcttaaaatctagattgttgcttgtttatagaaggaaaatctctaaaagagatcaatagttttataattttgtttgtaatatgtaagtgttcttagctttaattagtagtgtgtcgggtgtcggttgttgcaacatatgtgttgaccgagattttcgnnaactattaaaatatgattatagtagtgagctgtaagaaagcgagatgaggatttttacgtggttggggtgttaatgagcctt

SEQ ID NO: 116427 - DNA, 1843 bp, Cannabis sativa
aaccatgcaacataaaatgatttgtgatctttattaattagtaaatctgattatattgaaatcagttttatttagggcacaaaacccaacacgcaggtggtaaagtaaacttgccttccaaatggagatgtcattcagatttagtccatactgttctgacattatattttcctatgaatactaattaacgcctaatccttgtattgtcccatcagccgcatacaagataggtcttttcttgccaaactcctacttcgaagcttaccatatgtacacacaacaaacattatttcctacacctattaaaaaggccatgtagagcctagaggtaaagggaagatgtaccaatcacttaaagaatatcctatttctcagcctataaatacaaaatgaatgtaagaggacagggattcaaaaaatgaaggagaaagagaactctgaagctgtaagagagaatatactctcaattaataacgatattactcatttataaaagtgacttgttcaatcaaaaaaaaaaataataaaataaaaatgacttgtggactatggttaataaacaccggaaccatgtaaaagtactcttctctactcataattaatttctttaatacaagatttacaagttactaaaaatctcggtcaacaattaaaaatataactaattttcgtaaaatgttgctacaatggtgttctaaaagtttatctaagtttgtcacattgcaaaagttaatctaaattttgcaaactttacatcataataaatgtattgcttttatatttatttttattattttattattaaatttagttgttgcattaaactataaaatttttattgttatttgttatttttttacataataaaataatgaaaaatttaataataaatgtatggggctttttcatttttacacttcaaaacagtttttttttgttgcattttttcagaattttacatagaaacccctagtgcaactaacggagtaacctaaatcgcaactaaaatctgtatagcaacccacttagaaattatcgcagaaacaaacccaaaccgtaaatttgaaaaagaaaaaaaaagttaaaaaaaatagtatatgggataatttccttaaatttattagtttttatatttttaatgaaaacataattaaatattgaatttcattatcaagttttgtagttatgtattagattacaatattataaattgatacaaatatattacaaaattatttttttgccaaatataatataatttttacacttttcgtgaagatggactaagattgttaaataacttttgcaacatcattaaaatatagggttactaacttaatatgtctagtcagccattaaccttttgaaaaaagaaataaagaaattaaattaaatattaaggatataaaagtgtctgaaaaaaatatatacaattgtaaagactatttaagatttttactctcgaattttgactgtattattgtgttttatttgaagttttgagccctttataaatggttcttgaattattcaaagtattataaattgatcattttgtcaagttttgtcacaaacaaaatgatgatatggttacttaaccaattaccacatcaacgccacgtctataatttgatattaaaaaaataaaaattatcattttttcaataaattattaaatataaaatcaattaatggttaagaaaattaagtaagattaagtttaatttttttcttttgaaattaattacacacgtagcgttgacatagaattaatgttacaattggctaaataaccatgttattattttgtttgttacatatgataaaactgttgggttttatg

SEQ ID NO: 116428 - DNA, 2352 bp, Cannabis sativa
tctaggtacggttatcatttagtaattttttttaaaaaaaataattagtaattttttaataattattaaattaaactatatataaaaactaatatttaaatacattaataataatatagtaaataaaaggagaattatggttcagaaaattttggataaaagtcattatcaattgctgtagcatttcctacataagttcataacataaatatatagacacaccaaatatttatgatttgagagaagtaagaaaaagaagaagaaaagcattatttgacaatgttgctgaaatttccacaaagaatacctacctaccgtaccaaacatacccctatcccaaaacaccatatatctctctctctgtgtcttctttctcaagcaatcaaacccctaatcttattgattatttaccaaaataccctcacacgtgtgacccggcacgtgtgtcaagttagcccaaaaagcggagcggagtggggtggaataataacagagagtgtgtgaagtcaggttaggcagcgagtcacgctcttcatacaataacgaactaaatgtgttacaacttcaaatcttatctccacgcgatcaattcgcgcgtgcttccacgctcatttcgtgaattgtgacagctgtacaattttatagtcgagatataagtaagtggccatatgggtcagaaatggatccatgaatggatccgatccgaactccattatcttatttttataccttacttgttcaaaatcatgctttctagagccacgttgaccttaaaacatcattattgtaatgttttttttttctttgttaacacaacactttcatttttaaacattcaaatgctactacgtagaaaaggaagaaaaaaaaaaagtgttagatacttatttagctttttaaaaagtcctcaactttgtttttcccaaaaagaaaaacgacaagaatgtttacaatagaaaaattagagatgtacatagaagaagagcatgggcttgcatttagtacagttgattccccatttgatagtgtttcattaattgtaccatatatataactgatatatataaaaataaaaataataaacgctcataaatttaattgattaattttacctaacaagttttaactacatttctatatatgcataaaaagcatcatattgacaagtggtaaaaaaaaatatatatattaagaaacgaaacttacaactcacaaagtcacaaagtacaaagcataccatatttgggtgaccgtttaaaataaatatgaagatccaatccattactatttagtacctaaccaaaggtttaaactatcactgattaaatttatttatttatttacactgatatcttgtatgttactcaatatataaaaccaaaaagtttatttgtttttctcaagaaaaaaaaaaataataaaaattagcacttgaaaatttctaattttaaataaaataaaataattttattattatataactgaaagcatctccattccatacttttaacacaaacataaacatgccacatcattaactgacaatatcaacattttagtctctctttgttaccttctttcccattctttccccaggttcaaacaaagcgcgtgtaaataaccttccttaaaccaatccagacctaaacaacaaaaaaaaaaaaaaccctatcttctaaatatacaagcattaagcttagccaaggtatataataggtcagtcagcattgccacgtggagcttaactgagggccccacacttagtgaaatacgcaaaaggaaggaagcttaagagagggacacatttttaattctaatttttaattttaattatttattttttttgtgttgaaaaaaggaagaaagggttgtgaatgagcatctactcccccaccagacacaaaaaacagtgatacagagacccacatataaaaacccaccatttatattcttccatatatatatttcaattacaatacaatacatatatacataaatacaaactctctctcaattttttacattttcttttccaatcttcacaaaacctcatctttttctttctctctcttcaaatttgaaagtcgacatgagtgacgacgattgggtgaagcttgccatgaacgacgacgtcaccgtcgccgaccttcttttccgtttaagaaaagctggatacgaacgccgtcgccgacctccaccaccgagacaaccctctcctcctttgaagctttattggagcgtgagacagagacggtcttcgaagcctattgtgaagaagaaaagtgattcaaccagagctagccctaccacaccgctttcgtggagcggtgccacctctgtcagcggcggcgg

SEQ ID NO: 116429 - DNA, 1676 bp, Cannabis sativa
  modified_base (1649)..(1650): a, c, t, g, unknown or other
tattatattaaattatatgagactcgatactaagttggaccaatagcgatattgacacataagagggtgtcaggcaccactagtgccctttagcatttctctatatatggtgctcccattatatcatattgaaacaataaatagctttcaaaaataccagaatgttaacatttgaagaaatatcatatcactaacctaatacatttgtgaaattattaatattcctaaaaaaaaaattaatagtattaaatttttttaatatgaaaaagactatagtatctcaccggggcatcctaatggagtcctctcaatggggtctcacctcctcatggcatctcaaggagacatcttagtaccacctcatgtgttcttagtacctcctcacattggactataaggagggggtcctcatgctcccatcacctcggcccaatagaggagcctcacgctcccatcacctcggtccaagagaggggtcttaccttagcggtatacgtgcctctcacaactcatcaacatgacttggaagacatatccatcttttatcattttttagatatttattttgaaatgtaattttgtattttaaatttaacctgattatagttacaggaaggtgctcttatggttaagagattttaaatcctagatgaaaacctatataaagagagtgaagtcacttgtacagggaccttgaatttgatactcacgagctctcattctaaaaactcacttaataattgaactcttggagaacataactctcgagaactctcctcaagtattgagataaataacactccaagtggattagtctattaccgccgaaagggggtgcaccactataaaattctcgtgttcatctttatcgaatttacttttacaaattgggttactttgattaactattgcttacattcatcttgctcatttacaatcttcttagatctattgacgaaaaatctcatcaatagtttggtactttcattaagagcagtgaacacaagtgctgattacaacttaccatcatggtgagtacgagacggacaaactatgaggaagaagaccatggtgaccccatgaaagaaaaaaatacaacggaaaactatgaagagtatcaacccactaaacccactagtaaagggacctctcaacgcccaagaaaacaacccatgcctgatgacgaaagtcaagtccgagatactagaagttcgtcatcaccatcccatggtgtacgacaaactaccaatgtctatgaggtgttcatggaagatgaggtattactctaatgcctagatggaactcttagactcaatagagagtggcaagagaggtatggtgctcaagaggccacaaggccacaatgacgaggaacccacgaacgttctaatacgataagaaggggcgaccctgtgggagtcattctacgtcctaccctatcgaaggccaagagatgtctaggtcacaaacaacccggcgccgagatactaatcgtaattccatatcacaatgaccttcttatgagaacgacacccatggcaagaggagtgagtgtcctccattacaacaacgacaacgggtaacaaccctgggttgtgaggataggaggaacaatacaccccctcctgtcgggttttatgccctaaatnnaactccatttcaatgtaatctatttt

SEQ ID NO: 116430 - DNA, 2346 bp, Cannabis sativa
atgatatggttggttacataatatttatttaattaatataaataactattaaaacctcctccataaatataatacactaaaatcgaaaatttaaggaatgaaatccaaaatattttcgtcaaaattaagttgcaaaatagaatttacaataataatttgcgtatttgtagatttgaaatggtcgtttgtttttttaatagttaaaattgttcttctgatttagtttgttttataaatagttttttttttggtaaaataattgaatcatgttcacatgtaatgcattaaaaatcttttttttttagcaagctacacacacctttagttgcttaattgtgaataagtttcatataaattaagctcaaatcaagttggatcctcactaatagatagcattttttttttccaatgcgtgctaaagattttttctaagtgagaaggattttatgtcactttttcacaaaaagaccttattgatgtatacatggtgtaaggatggagtttcttgtcttcttcttctccctaacacttgccgtgactcatttccatgtgccctttttgataaggatcttattttgtgtgacaaagacatacgaccccatatttgcttttggggttttcttgttagtttttagcattaaattagttccatcactcacttcttcaatcttcattcttaggatctttttcttgcactttaatttttttcccatttgttctttcaattcatacactagtcttagtaacttacaatgcaataggaactaggaagatctcaaaacccatttcatttcctctactcaatcctagctacttcccaagaagaatttcccacacactatatgatgtctcgaaaagcttttttgttacaattccccaaagagttaatgatgcacataacacgctttggaaggagttggggggacactattattgtatatttgtcttatgtatgtggtaaaattttgggttggtttggtgtggtgatacttttttttttctttttcttttgtgtgtgtattgatgaggaaattagatcatctttccctgtcaaaatatattttaaaagaagaaggaaaaaaaatagaaaaataaaaagaaagaaagagggttttaaaaatttgattagctttattcatacgagctctttcccatccttatgataatctatctttaatgaagtggtcctctatgttacccaattgggattttaatgctttggtgctagaaagcatcaataagctgttttattcattttttttaaaaaaatggtatttatataaataaaagatccaaaagatgcttaagaaaagaataaatgagtgtcaaaactcaaagttagttgacaaagttgactaggagcttcattttttgatgtactaataaagattttatatagctgtcaccaacctaagctcaccttggtaggtctgcactcttcactttcctagtaagtgcctaactaatcaaagagttttattagagaagaaaataatagttaacaattaatatggtacttatgaagcttaagtattattagtgtatgaaggtttattattattttctttatagaaagagttaagtagtaagatggtgtcgttttcatattgtggttgtggggtctatgtgtgtcgtttaacttcttcattaattaatgggagcaatgcatttatgtgaggagcggctattattttcaatttgagcatttctattaggattcagtggtgtctagcactttcttgacatatcgcgttgtgattggctagcgatactctataaaaactattatattaaactatatgggactcgatacttagtttgaccaatagcgatactgacacataaaaaggtgctacacaccactagtgccctttagtatttctcattcaattttgatttgatttcttttatgagtacatacagacatgtcctccaagaaagggagtaaagtaaaggacaagaacaagacaagtcagatcagatcaatggaagaaattaaaatatttcttttcactttcattagcaaatctcttctatatattgggaaaatctactgtaagatatagcattccgaaagaaaataagccaatggaaattaacaacatatttgatattgttttctgttttttgtgtttagaaaatattttaaaaaatgagaacaaaaaatagtctttgaaattttcaaaacacaagtcgcgtttagttagtgttttctagaaataatattgacaaaaaatgaattgttttttttaaaacatcttgttgttttcaaaatttttgttttttgtaactttattttctaaaaattatttttaaaaattaaggccaaacaagcctaattgtttt

SEQ ID NO: 116431 - DNA, 3854 bp, Cannabis sativa
  modified_base (2436)..(2439): a, c, t, g, unknown or other
  modified_base (3822)..(3828): a, c, t, g, unknown or other
aaaaactaaaaaaaaatgaaaaatcaaaagaaaaaatgaaaaaaaaaaaaagagaggaaagtgattgatggttgattgaagagggatgagagagatgcactctcatatgcatgagggagtgtgcatgtggtatatatgtaagaaaataaagagaaaagataaaaatgttatggtatatatgtaagtatttgtgtaataaaaattccattttatatttttggtgtaaaaatttcatgaaattaaaatgagctgctccattagcgcctctccaagtatgtcagaaattaatacaatggatgaaccaacaatagattttgatagcaccaatcacagtgccagagtctctaaaacaaagctccctattgtgtaaaacatcagcttacagtcagaccagactttaagttggcaaacatacaataataaaattttagtgcacccctatctattttggtatttgagataatatcaatttcttgtcatggtgtctaggttatagttatttaagacattcgttaaaattttgaaaaatttaaaaaatttgacatgctatttcataaacgtataaattaaaagaatcttacattttggctaatatttttttttttttttgaatcttttaaaattttgcaggatgctttaattaacaacaatatagactactatgaaaaaaaaattagactcaaaaattctctcatatgccgaaatagataggggtgtatcggtagaccccttttaggggtgcattgttaaagtatccaaaactatttttttcccaaattttgtcacttatatgattgtactccgatagtattagtattgtcaaaaatgcccccttaactttatccgtcagtaaaaattaaaatttttgttaaagaataaaattattttactccttaaattttgtcatttatatgattgtgtctctcataatattggtattgttaagaatgattctttaactttatcaattaaaaaaatcaagacttgtattaaatttttgtaattgtttagcgacttaaaaaataaaaaaagtaaataatgtttattaaaaggtacaatcaaactaatttcaaactaatttataatgaaaatctcattttaatggaaaaattacatttataaactaaacttataaaaaaaaaaacttgaaactaatttgattactaaagaaaaaaaaggttaaaacataaaatatattaaagattaaatcaaaataaaattttgtaaaatttatttttattttgtttacttaggtaaaaatttaaattaaacaatataatatcacattcgcaagataattgagaaaaataaaaaaaaatgtagcataatactaatttcatataagtatagggagcatgattttttagtgacaaagttaaaggggcaaaaatagttttttattgaagattcaaagtttgagtcatagtcatagaaataactttctatagcttctgagtatgcacattaaacgctctactttattctttataatacattacaaaaacgttctattttcttcattttacatcaaatttttacattagatcactctcatcagcttctctactctgtccttcaaaattttttatttcacatcatactacagtacaccatacattagttttttttaaaaaaaaaaaaaaaaaaatacatcgccagaactctatttttttaaaatttaatatattttattcatttcaaatatatatttgttgactcagaaatctggacagagagttctaagccacacatgcttgctagattcgcgagaatgagatatatgttaagtataaatgagagacacaataatttatagtggttcactcccaatatcgtgatagtaatagaactatgtatacttcgagtttttattctcacgagatggattacaaaaaaatggctaagtctggatgctctaatttttagagagcaaaactagagagagatgctctaacctcgtggttacttttctgaatatgacaaataagctagaggaactctccttttataggtgaatgagatcctattaaatgtgaataaaataatccaaaaattaggaaaaaaatacatttaggctatttttgactgtaaatgatgatctaacagtgaaaattaacttctgagattaatcatcaatttttgggacccgcaatgagtaagttgtagcttaaatttgtagctctcttggatgaattttggagtcgatagcttcagaattgcaattaagttgtgagatatgacttgatagcgcattgaaagagcttcaaaaaacaagttgaatcgcgtcaatcggatcaatatattgagggagttatggctattttactgaaggttgttcaggacccaacgcctaggttgacatcctaacgcccaagttcacatccagcgcccaggttgacattgacgctggtgatgtattttttgatgcctaagtgnnnntttgacatcacttagtctatttttgtgttcaggcgaagctggtcaccagttctcagagatgttatgcggaaacgggagactcgaaactacctagtttctaagtaaatcaccttgtcagaaatgtgaaaatatgaagttgtgaatttgaatgttttgacttcattgctatcagttattgtgaaaactagacgaacggccgagatgaaatcagaatcaaataagcagaaccaaacataccaggccatatgtcaatctgggcgatgaatgctcattttggagctttcgagatgtcattttgatattttcaaggctctagaacttgaagacaagatctcctaccccgcttttgaccattttggagagaattctcatagcagaattggcatttaagtgatcgaaaccagcgttcatggttgatggtcaacatgggcactgggctccattttcatgcccttgtcattgtggttttctccccgagtttgtttgtgtcttcattatttctgatgatgaaaaaaatgtttgtaataattttttgagaaactgattggaaatggcccaggttgacaatatgtcaacttgggcgttgagccgagtgccaggtgtcaacctggttgctgggtctagttttaggtcacctggaagttccgtttggtccccagaaatagatgaatcttaatctttgctgaaaacagggaatatgcctataatacttctcggaaaaaattctcgaaagtggcttaggttgacaaaatgtcaacctgggcgttgggctagcctcaagtgtcaacatgagtgttgggcccttattctgcacccaggatgtgttgtttttccccaaaattacacatttccccatttttgatgaagacaaagaaggtgtgtgagccgaattttcgatctgatgcttggaagtggtccaggttggcagattgttaacctaggcgctgggttgcccatgcactgggtgtccgggtgctaaaaaatgagcattctctgaatatgtttctaatgcgtcaaatatgttcgtggtatgtctagttcatgtcccaatacaaattttgacccatttgcactaagacggtcccagaatttgaaaccatagttgaggccatcaacctgggtgcaaggtgaaaccctaggtgcccaagttaactttcgatgtgctggtttgtgtatttttagctcccaaacttggacttggttgctccatgtcttctttatagaatactgaaagatagtgagttaaaactatagggtagtgagttgaaaatgacttaacggaattcgaacttccattccagagttttcggagtcaacctaggcgcagggttagggacccctctcgggttgactgctatgattaggtgttaggttttatgcccnnnnnnnaactccatttcaatgtaatctatttt

SEQ ID NO: 116432 - DNA, 2788 bp, Cannabis sativa
tcttacaacagtatctctgaatacgaattcttagataactctagggtaaagtctcgactaaactgtctgcgaccaaacttttctcgatctcttgcccagtgaacatgcatcactatttatagggttgtaaacgtgtagagaaagtgtttcccttctcgttacaatgtgtataagcagaaagatcgtgtgataattgttgaatacaccgatcgtgggatcatgggataaatgaggaatacactgatcttgagatcatggatatgccatatctctgtaatctgacccctaagttatagggatttcgttgatgactcacagtgcgaaagctgaattcgctaagtgttgatcgttctgtgcggatcgctgattattctgcgtggattgctcacgaggcatcctgttcggattgtgtgtctccgaacagatactcacagttgcttccacgtgtcaccatcgtgtgatgccacgtcataatgcaaaaattaggataacaggtatgatgtgtaaataggcccgatgggtgagttcgatataggtctgatgccctttaattagtgtcccgatggtcaatccgatattacgcctgatgccacttagaattttgatttatatcccatgatcgatgtcatgtctgatggtagtgtctgatagtttttgttggaatttattatgtgggctctgatattggtctgatatgggtccgattgttgtgttcgatagttttttgtttgaatatatggggtttgatataggtccaattgtgtccaatgcttgacagatttatggttttttcaagaatttttaacacctttctgttagatttttgttctaaattttaattctatttaaatgtctgtagatgaaaggttcaactgtttttgcattggttatatataatggtccttgggaacttgagggtagagattgggtttataaccgaactgaaaatttgacttttgagattgatacgaatgtaagctactcacgtttagttgatcttttgtacgaagaacttgatgttgacaaagtgcagtattacttaaaattgaaagtgaattacaagtacatgaaaggtctaatgtatcgtcttgaagttattggaaatgataagcatgtaaggttatttttttctatgcttgcgaagaaactagatgaattaactcccttgtttgtgactttggtgaaaaagaatgcctgtccatcatcctagtcccacaccaagtactattaaggatactagtagcgaggttgggagttttattctagaaatgaattcggaggtgttggcggcaactgtggtacctgaattaaacactaggatgccaacaattgacattgtagcacaaatgccctttcatgatagctttggtgatggtttaaacccttaatggtatgttgaaggcaatgatgacgtaagagatgagtaagatacagaggtccctactgatgtagcttggaacttgactccactatcataccaaataccactcaggcaaccgacatagaaaagagtgccacgtagagaaaatcgcccaacacctggtactagtagtagttgttcagatagaactagtaatgctagaggaaccactgatgctagaggaaccaccgatgctagaggtcctagtgatgctagaagaaccagtaaagctagaggggccactgacggtagaggtcctagtgatgctagagggaccaatgatattggatttagcgattcattttctttttcgacaacttacgataaattcaaggagaaaacgtttacatgagaacacttcgaggatcatagtcattatatatctatgggtggcacaccaggtggggagttacatctatgaaagtttttttagggacaaagagcatttaaagatggttgtctacttgtatacaatgaagaaagagtttaactactttgttaggaagtaaaaggtgtgaaggtccagaagactacaaaaaaacacaaaaaaatggatgtcagaaattctgtacaaaggcataggaccacaatcgggcttatcgggccctaagaaaacacataaatttaaaaattccatcaatcaagccctatatcggacctatcgggccctcaatcaaacattaaaaatttaagaataattgggccttatatcgggtgctatatcagacctatcgggccccatctaaatatgaaaaattgagatagccattgggcctactatcgggccctatattggtcctattagaccaaacacaaaaacaacattcaacaagacaatattggacctattagggcatatatcagacctatcgggctcacaatctaacataaaattttgaggaaccatcgagcccactatcaggccctatatcggacttatcgagctatcttcttcaaccttcaaacctttcaacattaacataccctcaggccctatatcaggcctgcatcgggccagggaaaaatcacagattctcctccaaaacacaaatccgagcctaataacctgaaaaatcatatattctatactaaaaagcacaaaaaacattggcctaacaataaatctagttgctttcaccctaactcatgaaaaactaagacaattaaagttcaaaattcatgaaaatgattattacctttgacgaagacattgctgatgttgggtggtgtggtcgcggttgttcgtgggtcgtgttgctgtaaggtcgaggtggtctctgagttgtgggtcgtgtgggtggtttgtgtgcgtgtttagagagagagagagagagagagagagagagagaggattgttcaaatgggagg

SEQ ID NO: 116433 - DNA, 3945 bp, Cannabis sativa
  modified_base (3885)..(3908): a, c, t, g, unknown or other
gtaatctttaaaaataaaatacaatcaaaatcttaaaaagaccaaaatcttaaatgaaactagcaatacgtggctcggtacgtacattcacctagtatatatatatatatatatagatttgtagatttaagaaaatacttttatgttatcattaaaactaaaacctttaagaatgcatatgtatatatattcccattacttattataaaactactctttatgtatttattttgaggaaaatttacccaaatattatttttaacaaaattgtaacatttatacgattaaataatttttttcttttaattttacaattttttaattatatttttatagttataaaacaacaagaaaacaataaaaaaataacagaaaaacaacataagaataacaaaaaaatacaagaaaataacaaggaaacaacgatgtgaatcaatagtctgtattattattaaaaaacttataaacaataaaaatatttaaattctgtacaattatatttcagtatttttttagttaaatatgaaataattcttttatttttgtgcagactcttgaattgcgcaagattgatctaatattattgctgtctcaacaaattgtttaagaaaatgagaagaatgtgattgaagaggaatatttgaaacaatttttaaaataaaaaatttggcaacaaaaaaattagagacaaaactctagaaaaattatagcccaagggagacaaattttatttattcaacttactattacaagcataaattaacataagtagacacccatatagtataatttcaaccttgaataggctatagtggtggacttaagatcaaggatgcctttcactcgctgtaagttgtaacatgtggggtaggttcaaaatcttctgcaaataatttctgattcacataagtattcccatggtaagctgtgacgtcacctctttgtggctcaaagtctttactaaataaagtttttactggtgattcaatttcgtcattaggataagcagtagcatgaggttcaggttcaaaatctttagtaaataatgatttaacctcgttgttgtcaggatatgaactaatattaggcacaggttcaaaatctttggtaaacaatgattttactgatgatttaacctcgttgctatcaggatatgaactaatattaggcacaggttcaaaatctttagtaaataatgattttactgttgatttagcctcattgttgtcaggatatgaactaacattaggcacaggttcaaaatctttagtaaataatgatttaacctcattattgtcaggatatgaactgacattaggcacaggttcaaaatctttggtaaacattgatttgactgatgatctaagctcatcactgtcaggatatgaactaatattaggcacaggttcaaagtctttggtaaacaattttttttctgatgacttaacctcattctcaggataggaggtaacatggggtacaggttcaaagtctttagtgaaagtgtttaatgtatttttatgatcggaacatttggttttttggttggaaatttttggtgtggagtaataatccgagttaccatcgagaccaataaggcctccaatcgcctttggcatcggctgttctttcatcacagatctccagtattctcctgctggatcctttcttgattcaatactctcacataaaaacagctgcaacaatagagacattatttgttaacatgtataatctaatagtgaacaaattaaatgactattattcataacaaatactgcataattaaatatgatcatgaattatatatatacatataatgaaattgaatattgggaagtgagagtttatagtaaggtgtacaaaatataatagatttgagatgagaatgcatactagaattagtgagaggacaacaacaatggcacatgtagatttcatgatgatcttcacaacaaatgtatgatttagttttttgttttgaaaatgaccaaaaatttgcctttatttataagcaaattgttatgactacgttgcacatagttcttgaaataattgaatatcaaacagtgattttcacgttttaattatttttttcaattaataattgtagaatttacatataatataatatgggttttaaaaattttcttatttaaatatgacagttttaagtttgatcattttttatggtattttttagctattttataatatttgatatgtcatatatttgtaaatttaattatcaaagctcatatttaatgtttagataaatcaattttagaaaaataaaaattttcatttcttctcctctgtcaaaccctatctccaccatccctcaacagttccacctatccactttcattcaccagttccacatctggcaaacggcgaccgacaattcacccatccggtaacgattggtcaaagcaaaaatcaccaaagatcattcatcaaaaaactaattttttatcaaaaaactaaaattttcaccagaaaataagtttcgattatataaaaataaaatttatatacgagtcttaagttttttttataatatctttttatcgatatgatgatttattttatattttcttatatatattataaaaaatatatatttagtacaattaaatttgcaaggcatacatatcaaaactttccatttttttcataagtttgtaaatagcctttagatggagccaaaaggggacatgaatcttatcaactcttccaccatgaatgaaatcacaataagaaacaaaattcttcatcactcttttgtcattttatatttatttaaaatcatttgtgaaacatgacaggtcctttttattttattaagtaggatatatatctagagtaacaagacacatttaggttaggtgtatgtttggtaaaaaaaatgtttttggttttttattttaaatataaaaggtgaatatatattttcttaataagtgtttactagtttatttaaggctaattagaatttttatccttgtactttgatatgtactaaattatgcctcttgaactttttaggttgttaaaattttttcataaactatattgaaattgttagatttaaggacttttgtttaattttattcaattttgctattatgacgattgtccatatattaaatcgtgccccccaaactttgatatttaaaaaattatactccctaaactttaacatgtaccgaattatgctacttatatttttatctacgtcagactttctttagaaaaattgaacaaaagtccttaaatctaaccatctcaatagttcgagaggaatttttaacgaccagaaaaatttagagagcatgatttagtttatatcaaaatttaaaataacttttattttattattttttaagtaatgatggagaaaatagtgagagaaaacaaaatgaacagtaaatttaacaaattaataaatataaatattcatgttataatcaaaaaattaaagtataaaataaaaaatcaggaacgatcataaagattgtaaagttaatgaaaagatctcatagtaccaataatggagcttttattgttaaaattataatgatacctaaactaaaattagaagtacacaagaaatgacaaacacaatattattcattattgtaagaaaaataaaatctctcgtcacaatatacatcaactaaattttgtgtatatactaaataatatattttagttttttgttacatcataatatacacatatataatattatataagccaataatagtaatgtatattatatatatatactagggaattaagccgcgcttcgcgcgggtttgaccctacttttgtatttttttaagctttttaagatttttgccccctaaattttaacatgtnnnnnnnnnnnnnnnnnnnnnnnntaaggtcgttaaaaatgtcccatgaactattaagatt

SEQ ID NO: 116434 - DNA, 2718 bp, Cannabis sativa
  modified_base (40)..(44): a, c, t, g, unknown or other
caacgagctgcacagtacgtttgaaaatcacgtaatacgnnnnngttagttagggtgttacacttaaacttctgaaaaaatgtatttttcaaattcattatataaaactcatttttggtaaggttcaagttttcttggtatttttgcaaaagcttaccataaatcaccattttacaatatttttctgtttttccatttgaacatcttcattttgtcatatttaaggtgttacaaaaaaatttggggtcaaaaggatttttaaaacccaagttatgaccatttttgcctttagccactgtactgagaaaacgacaaaccgtttttataggatttcatggttgtatgattttttgtcatttcaaacacaaaaattttcctataaacctattctaacctctcacaaacccttattttgatttagtaaccctaaatagcactcctattccctctctaaccctttctcactttcaaaacctaattcccttcttttattttcaaaatccatattgttcacaaatctccacccctattcctccttcaatggcttcatcatctagacaagggaagaggacaagatcttcattgcaataagaagagaaaagcacgaaggataggcatgagctcttctctaatggaagattttcaaacaactttcatgaagacttctcaaaaagagacatactcattggtaagaagtgtgatttagatacccttaattatattaattttagcaatctttttagagatatgggttgggaaactttaataggcattcaaaccaatatttaccctaggctagtgagggctttttatgcttgcattaaaatttcttacaatccatacagcataagaggaaccttcaaaggagttagattcaccttaaccgttgattcctcgaatgaactcctagatgccctaaatgaaggtctcttacttgatcctaggcctagacttaagaatgatgcctactataaccatgccctatttattagtggagtttatgtagaagaaggtgttttgataaaccaaaatgccataatcttactcttcaaggaaaacttatccactctttcatttgtaacaacttagctcctaggaagggacaccaagatgatgttagtgttattgaccaaatccttctttttaacatcattatccaaagcaagagcattaacttaagctatctcatcactggaactataaatgaggtctataatcttagaaaaagaaaagccttatcctatggggcccttcttacctacctatttcctcttctaggcatccccactgatgatgaaactgaggtcttaaaatttaaggattttgatattttaggtgaaatcacatttaagggcatgtcttacaagtatgatgaggaataagaaagatagatttactccaaacaagatctcaaagctcatggagaagccaaagtacttcctagtgctagtgaagaataggaagaaaagaagaagaagaagaagaagaagaaaaagtgcaacctttagcacctccaatgcctcaagttcctcacttcaacatcgaagaggcattttctcatctttatacttcaggtggtactcaatttcaaaatttgagaaacgacatgaactctcaacttaccaacctccacaataacattaacaccatgaggaggtacatgggtttgctaatattcaagatgagatagcacaatggagagtatatacggaccgctttggacccccaccgaattagttcacttgcatcattttttagcatcttttctcatatttatgttttctcactttttagtatgtttgcaaggcttagtgcctttgactttccttgtgttatcttgttttagctcattgaacttgttgttatggtttgttgttttaacttgactatgtatgttttatggttatgaatggtgtgtttgttttatttttattattatttaccttttattttgtaaattcttttgccacccttttgatgaatcaaaaggggaagaaattctttttttttttttttggcaacaaactcaatttttggacttctaatgatttttaaatataagtataaaattaagagggattttacaaaatcatgtaaggtaaaactaaaatgtaatttttttaacccttgcacatattaagggggagttggggtgtatttattaattaaaagactttgtatggtctaattaattataactattaaataaatagttttgacatttataggtttgaaattagaaaatatgctattattgaaataagaataaatagttgaaataaagtggcaaaattgtaactagtaaaaggccctttagtggccagccactacgtgtaatttttgtccattattttattcttttttaatctatataattcaaccctaagctctagttgaaatactataaaaggaacatgatgctcgcatctcatccaattcaactattcacttcaatctaccaaacttagttttcattctcaaacaactagtagatgagagacaacttctaaagaattttgaacctccttcattgttcttcatactcgagccatagtgatagagtgtcatgcccacacatagcaagtcaagtgctcaatcatagtgctgaagacgatggtaaccaaaccccaaaggagagaaagagatccaggctcagatcttgataatactctgcgacaaaaaggaacaagggttagagatttgagcagaaagagtcat

SEQ ID NO: 116435 - DNA, 2070 bp, Cannabis sativa
  modified_base (2024)..(2031): a, c, t, g, unknown or other
gagaaggtcaggcaggtagcgtatcggctagccttactaccagtattattggttgttcataatgtattttatatttcgatggtgaggaaatatgtttcagacccgactcatgtcttgagttacaaagccctagagctacagttagactcattctataaggaataaccagttcacatcttcgataagagagaaaatgttcttcgaaataagaccatagttttagtaaaagtactctagaagaccagcaaggtgaagaagccaactgggaactagagtccaacataagggctcaatatctagagttattcaggttagattttaaggataaaatcctttaaacatggggataattataatgaccgcatgttagattttgaattagtaaaggcaattagcattaattactcacattttataataatatatgattttatatttgttgtgggacccatttttagaaatggtcattagagttataatttctcaattctaaagattttattaaactttgagagtattatttatgctaaatataaattatacagtttttatgacttttgcttggtgacgacggaaaatgcgatggattgtcgtttgagtcacatgggtaactttagaatcaatttcttagcaggacaattataagagatatttagtatgccgagtttaggcggggttatggttttagaccattttacccctaagtctaaaggttactttaaatggaagaaaggggcattttgggaatttgatttatttgattaggtggtggcttgtgaacttgacaggtagccacttatcctttcagctgaagtgtgttgaataatttgaattatttaattgggaaaatcaaagaaatagctagaaactcttttatccttccctctctccttcgaaccaagatagaacctaggagttggttactgatttcttcaaattcagcaacattccaggtaatttctaagaggaatttcagaggtagtttgaggtaaatccttaacttactaattttcaagttgttttagttacaagtttggtgttagcatgcatttttgagagttagtggctatttagatttagttttgctatagtatgttttcagaggttgtttttggttaaaattgattagttgtagctgattttagtgatttgagtggtgaatgagcaagtttgagttttaaagctcaaactttggtcattaatggaatttttggatttgtgtatgtttctttctgttattgcttggaaaatgttgtttgaggtttgtataggtgatctagaaggttttgtttggtttgatttggacacgaattgggcatgttttggacttgtttgggttacctggtaaaccaattaacaaattttacaggtcctgtagaacggttaaccagattaggggcaggattcttgaaaagtccattttgttgattcctgttatttttagagccttagttattgtttccatgataattaaggttatgtcaaagttagttatcaatagtggaactcgtagttgtgagtttaggttctcgaattaagttttggcatgttatttacccatttgcgtaaatatgacatagggtatccattcagcatgtgattttctattcaggtcacccagcacaaataaattttgaaacaaggtaagactagcatagaacgtatttatatatgaatatatataagtgtgatatatgcatgctatttgtgattcattcactaacaacactagtagggtagcggtactgagtgtattggtacagtgtatgatgtttgaagagtacaatacaatgttaccaacactagtacaaataggtacggagtgaatgtggtacaacacttaggggtactagaggtacggagcaaaccctaccaacacccgtagagtagcagtacatggttcatgtggtacagtggttgtaccttattaaagaacgatcttacttatctaataagccttgtggataggtgtatgggtgcctagatgcaagtcggtactatattattgttggaatttattttannnnnnnnttagatctactcacaaatatgttgtttaacatcctaaat

SEQ ID NO: 116436 - DNA, 1642 bp, Cannabis sativa
ccgccggctgctgctacaccgtaagaagtgtgtatggtccaatctactggaagagctgttagttgaagtattttcatggctgcctgcagagtctttgatccgattcaagtgcgtgaataaatattggtatggtctcataacttctcttctaaaaaactcatcatttgtccacaatcactttcgcaacctaaactccatctgtacctcttcatcatgtatggtcttttgttgccctggatatggccacttgtactacccggaactcgaatctctacgcaacaatgtcttcaaatctctcactatattctatgatccttctaccaaaatttctttgttggaacgttttgatctacctttgatttcgggtaaagaacacgcctctagtgtgattgggattcattgtaatggtataatttgccaagtgaattgccaaggagccatagctttatgcaatccggtggtaaagcaatggagaaatcttcccaaaacatgtctgagagagaatatcagcccccaaggagttggatttggttacgattcgaaatcgggtgattacaaagttgttaggtttgggtggagaaagaatcagcttggaaaggttttggctgaggtttatagcatgaggtcaaattcttggagagagattggagttgacattaaattcaagcgttggacaggcaatgccatgaaatgttattgtaatgggtttttttattggtctaaatgggttaattcatcatctgagtttttaatcatatcttttgatatgtgtaaggaggtatttagttatgtggcgttaccgggtaataatcttgtagtgcataaagagcagattcctacaatggctgcttggaatgactcacttgctttaatgttttatagtgagaataaagtattttttgagttgtgggtgctgaataataatcgagatcattgttggagtagaaaactagtgattgaagctggtggggtggaatttgcacgtccattgaatttcatgaaaaatgatgaaattctcatgcaaactgatgagaggaatatattggtgtacaacattcgaaatcaagtgatcagaaaacgtattcaaaaggtgtttagattacaaagttgggatttcttctatgcccccagtttggtatctgttcatggtatttctgatcaagtcatctaataatctctctcaactatatttttattcaaggctaatttggatgcagtgtgttggagatcatagaagaagtggaataaatgaagattcctttatttttttttaattcttgtttagtaataaggtttctctggccggtttaaattctcataatttaattttggtttaacttttttttaagcgttaattacaaattcattctcattagatgatccaaaaatagaaaatgattgaaaaaaaataccaaaaaatattccaactgctataaatattatttatatgaatgtgtaaatcaactaaattttttctattaattactattaattgtaataaatattttcctccttatcactaagtatatctctcttcatcttctttttttcttatctattttatataattaggttaattaggatttttacctatggtttagtataaacactgaaatagtaaaattgaataaaatataatata

SEQ ID NO: 116437 - DNA, 1587 bp, Cannabis sativa
  modified_base (40)..(49): a, c, t, g, unknown or other
  modified_base (1541)..(1558): a, c, t, g, unknown or other
ttagcaacataaggaccactagacacaatatgccacaaannnnnnnnnntagattgaaggtaagtttccattctaattttccaataaggaaaatctactccattgcaaaatagaacaaaatcctattgacaataatcatacatgtatcggacctatatcgggctaaacagaaaatttagcataataataataaaaaccacaattttccataaaaatatattataattcactattaatttttttgttctcccaatgctgtaactggcatgattttgacaaaaaaaaataattcattctaagttttggtagaataaatctacagcccatctttgtctaaacaacatgttatcgtcattcactccatcgaatggcaactcaagaatcttatgctcaatatgctcaataacgtacacaccacaatcgccattgcattagtaaataagcaataagttagtgttattataatcatatatacctatgtatcaaattacttagaaaacgtattatctcgtttctatctgtggtacttccgttctgtccttgagatcccgagtgaatggtcgacttggctttcagaggctgtcatctaagggaccattaccaagcagtgggtatcaaatataccagactggtcgatcaatgatgtgaatatgttacagtaactgtccatcaacttcttcaattcatttggagtgatcgagccaatactagaattgaggacgaataatttccacaactctaaatctgcctctacggctacccaatgtttttgagcatgcaagaacagggccaggtatatgaattcctccttctcccaagaagaaaaaaattggacttcatcaccacgaaccaaatccaaaatggagtcatcctaaagaaagcctcggtggtctggatctcccttccacgcatcccatcgacccttcactgacgcaaaaaatgcagtggggatgatggtgtaatggcgtttgtacacatctgggtataattgttgttgccttctcatcatgtgaaatgtagcatccagatcctacgcaattcaaacaaatgtcataaacaagcacattaaaagaaaaaggaaacacaacaataaaatagtacatagtgttagaaacttacatcatcaaaaatccattccttattatcgagccaccttaggaactatttcaagtcgtgttgaccagtgaagtactaccttggatacttattcctgatgatgcctacacaccagttccaaagactgtagagtaacttctgatcaactagttgaagcgggtcaacaattaaacttgccctcgatggccttgacttaatcttcatttcagtgtactcttcaaaccacttaggttcttctttggtcttttctccactggtgttgaagctgtgtctaaaacttgacactcagactcttgagtgtctctaatggacgtgatctggatgttctcgggtgtatagagaacatcagctgcatcattgggtatgtaatcattagggagaatgagagcatctcaaagggccttcttgttggaatttattttacnnnnnnnnnnnnnnnnnncacaagtatgttatttaaacaccctaaat

SEQ ID NO: 116438 - DNA, 1000 bp, Cannabis sativa
  modified_base (938)..(946): a, c, t, g, unknown or other
tctctctctctctctcacaaacccatatatctattattctataattagtttttggacaaaacatttacttgggaactccccctagtccctacacatctaccaccactacaacccatcccattctaaatatccttttttcttgtccacaaactaagcatatgtatagttactcttattaataatagctatcctctttttttttgttcattggtgactaaggaaaaattaattagccctatactcaaagcaaaacaaattttgcccatatatctaccatttagtatatacatacaatatatatttattattattctccttaattcacttcacatatatttttttgatgacacaaaatgggaaaaagagtcactactatcccaacccccacctcccctatatgccaaaacaaaacaagcccatgccccacaaggaccttttcctttgtgggagaaatgattaatttggtgcattcattgaatacataattataatttgggattttgtgtgcatgctatcattttactatgttgctctccatatgcaatatatacatatttaataattaatcgtgttcatgagtatactatggatcatatatatggacctaacataccaaaatctcttgtcatgattatagttattttcttactcttcgactttcatcatcaagagaatcatatataaatcaaatagtggtcctcatcactactttatgtttctttgacttcattttctttgtcttacgtatcatgggaatggtgtgcacgtatatgatataacatcatgttctttgggttaagatagtactgtaagtaaacgatgaaccatgcttgcatttaaatttaaagtttattttttaaggtcaaatttaattacttaattagaaattagtcatattattaaggctaattagtaatttttccccccaaactttgacnnnnnnnnnatcatgccccctgaacttttttggtcgttaaaaaaattccccctgaactattga

SEQ ID NO: 116439 - DNA, 1734 bp, Cannabis sativa
gacaaaaactttgccaaacataaaggagtcctcatcgagactctcatcggttatactaggataaaactccttgacaattcgatcaacatacccatcaaacccaatcaatgtatccatccattgtctttatttcaacaaattatgtaccccaaatggcttatgagcaatgactttgaaatttttctccacagtaaaattcttattctcataaaatttcattatcattgtaacaaaaataatgagaatgaggcttgaagttttcaagagtaatgccagagggcctttcccttttctgaggaggaatagggcttggagaaaccatgggtctttttcctttgctttctgttgaacagcaggaggaacagtaactggttctgtagtgataggatcatcttcaaggacttcactttcagatctagaatcatcaacagatgattgttcttttggaacaaattctttactataattagtctcgccctctaattctcgattaacattctcaatctcttcttttggttcagactctgatgaggaaagggaaggtggatgctctttgacacgttttgcctttacagatgaagacaccactttcttcccttttgaaacttctttgggctaaaccactactggtttctttggtgtagacaccttggaccttgtacaagagctcaccattggcaaaggagcaataactctcttggcattgggaacaccatttgaagaagatgacttcgagaaggtgtgatcagatgaatgggattcatcatgatgcccaggagttggggttacaattggagaagcaatggtcaaaggagagctcagattgtaggtcgatttttgagcttgggattttggcttcgtgactgtttccgatggaggagacgacaacccaagagctttgaccactagaacaggcagcccaggtggcaagggtggcaaagtagaggacgaagcacgaacaagcctcttggacggttgagcatccttggtcttggccatttttcctttgaaaccctaaacaaaatgtcttctcaaactaaaaaagattaaacttcttaccttgatcaccacgtgttgataaaaaggaaacacaaagattttttttcaaatttcggtcaatggttacaaaaagttgaaaaaggaaaatataacttaatcccacaaaatctaaataaacgaaagaaacaaagcacttacccaaaatctttgccttatacaaaaatgccacaaaaaaggaaactaacaacatacatatattttttaaaaaatacttccaaaaatcacacaaaaaaataaaaacaaatccccaaacaataaaaaataataaaaggaaacacaataaataagatgcaataaaagtatatttccataaatgagaaaataaaagaaaaaactactcaaaaagaacaaaaacccacgaaaatatgccccccttttttcttcaattttttcaatataagccccattttttatatatatattttttttattttttaaaaaaatggaaatcaaaaaaaagaaacaacacaagaacacattagcaccaatcaactctcttgagcaaaaaatagtggctaagaaaatagtgaaacataacaaagaaaatgacaagaatgtttaagaaagctgaattgaaaaactgttagccataaaattcaagattctggtaatcactgttagccattgctcgaatttcatgacatcaggacctcccaaaaaaactggaggtgcttg

SEQ ID NO: 116440 - DNA, 1244 bp, Cannabis sativa
atttcagaattcaataataacagcataaaattatttaaatatctataaataattttccataattaaacataattaactgctaatttcaaaattaaattaagcggttttacatgacatatcgagtaaagtttatgaaagtgaatatagacccaatttctgatatcttagagttataagaatataggtagtcgggaacatttgcacagatatagaatccactccttgaatggttgtagattaaatattcctttttgtattgatagtattagagagtagaaatttcatctgtatatgacttacataaatttttattagagtatcaagggtactgattgataaacatataattagaaaggttaattgacgaagatacctagctctaattatgaatatttagtagaaactcataactcatgtaatgactgaatcaatggacatgaattaatgtgattaatcgcttctaaataatatagattgtatgttttgagagtacaactataatttattagtgggataatatcatagttgataaattaattagttgagctaagagttagcaagataattaatttattggagcttatatagctttatctgtcctcaaactagcttgataacatagacatagtgttttgtaaaatagaaaaataataatggttaattaatttataaaaaataaattaataaaatattaatttatttggcacaataaaataataaagtatcatttgatataaattatttttgagaaaaatagtctataaataaattattatttttgaaataataaattgagaaaataaaatatagtgatattttataaaaagttaattttgaaaaaattaattatctatacaatttatttttgagaaaaataaaaaatagtataaataaaatgagagaataatatgtaatattagactacatagaagagaaatcctaccagagtctatggattgtagtgggtagcgccccaagcacagtccaagcaagaagatgagaagtaattgtcttatatgctctccattccattggtttatataaatacggcctatgggagacacttttagggtagtaatctttgagaaccatactgagaggctctcaaattggctagtacacttgcatgtttactaataagtaaatgggaattaatagtaaggtaattattctcttacatttgtttacttacattattaaaattaggaaagagagaactttaaataaaggagaaaagaaaggga

SEQ ID NO: 116441 - DNA, 1248 bp, Cannabis sativa
  modified_base (1213)..(1218): a, c, t, g, unknown or other
ccccttttaccaacacatcataggtaaattctattttaccagcgcaatactaacttttaccagcacaaaaatgtgctgacaaaagtgacatttcttgtagtgattgttgcgtttggctctgagcagagagagtcgagaaagaaaggaagagaaagtggaaaactcaagggagaaccaaacattggggtccccagagtctcgcgagctttttggtgtggtcctcgtccgttgattgtgtcttggatggttcaccaagcccaggcagagaagaaagaagaataagaaaaaaaggaaaaaatagaataaaaatagaaaaaaaaaatatttttttctaattttttagaaattaggtgggccaataaaatttcgccacgtgtacacttgtgtacacagtcccagtctactgtggcacttaacagaccaaagtgaacggaaggagtacagagcagaacgattatggatatgagagtatagccataactttttaagtatgaaggttagatcgtatcaaatgtaaaaattaaggagtttgaccgtaaattatcctttttagtattatatttagaagagaagatacaaatggaataatgctaaattgacacaatttttgcgggttggagttgctttagtataccatattttttcggccatatattgttgattatttatcttatttaactgttatttgatatttgtttcgactacacttttgttggcttgtataagataatttttttggaagctctttttttttttaatacaagaatcaattttattgccgaaagtcaaacaatacattaaggaagaaatttcttccaactaagaaatcttattttctatcttaagtgaataaactcatcatgtgttgcggtattaccattttacattacatgttgtaaatatacaccaaaaaagacagataataaagacctagctaatagatccaataaacaatcccacccaaaaacactcttagaaaaagaataaactgaaatcacgacaactttagaatcactctctacaaaaaaaaaataaaaagacctagcaatatgaacaacttcaggatcactctacttttggaagcctttttattatgctaatatataatcttttgagtttttgtttcttctattttttttaagagcagatagtatttttgagttataattaatataataaggaagaggtttcaatagttacatttttattgtannnnnnatggttacatttttttaagccattggatta

SEQ ID NO: 116442 - DNA, 2165 bp, Cannabis sativa
cataattaaacatgatttactgctaatttctaaattaaactaagcggtctttacagttcacatgccaaatagcaggatagtgtgtacaaaaaaaccctattcttgcgcttattagtcgtttaaaaaggtttgttttttccttcatagcaatggatttgaacgaagactttctcgcacgcatgaccatatctgtcaaaggtggatctattccatctatcaaaagatctttagtgggacaagaccaaatcaagctcccatggtaacatctcaacttgaggagcccttggaaaccattccagaaaatgaactcatctcttagagggacctccttatggagactaggagaggcaaatgggtcaaaattcctctactagtgcaggcccgtactaagtctatctgggaaatggattagaaagccaacagctttcgatcttacgggatgttgcatgcatattctgaattttgtggcctccataacgtcttttgactaatgtggcacaagcttttcgtcatgggtgaatctgcatccattagtgttgatgaattcagtgcatggagttagtcccacatttcttgtggcactcaccttccctttgtcatataggctcttggctgggtggtatgtgttctgtaagatcaacaaactggaggctccttccccggaggagatcctttacttttgcagtgtcaaggccaatcccataaggatggacatatcaaagttggggtttttctgactaaataggcacctagactgttactgccctgtctgtcaaaaggattacactcatgacttcctaggtattctaatgatataccttgagtattgtcttctttttaaactatactaatttctatacttggactaacatatttgattgtagcagagcttccacctcagagtgttaggatagaggagatagtcaagaaagaagtctggtataggacctttttggaagagcaattgatggttggggaccttgtgacaaccaaactgctttgcaggtctggattgatcaaaaaattgtaaagtattggcacagtcagccttcgagggaagcgctaagcgcccagggaagtgaaagaggcaatttccactaatttggtcgttataatcacaaatgtagccaaaaatgataatgccgtgaattttgattaggtgttgtgccatcccgttcctctgtccgaggaagaagagatctcagagagttttgctgctacttatcctgatgttgggacactaggtgctagtaattcgggaagaggtaatggaccctttcgcatcctttgtacccccaacttgagttacatgtcccagatgaatcaaggaggatttgacaaatatttcctatgcataagttgccgtagacaccccatgaaggataaatttcaaagtagaccctttgatggccatgtctttgcccaaatttaaggagtactgtagcttcattggtcatcatggcattttagattttgctcgtggacaactctatagcacttcactgaatggttgcacccatgcacaaatttctttactagattcttcttcttacttttgctattttcgttatgattgtatgacttgcaattgctcctcttatttactcataccgtcgttttatgtgtagatacaccaaaatccatgatgttgaagtcttggagaagccagatctcagatgccatggacaaggctaggaaatctcgggaaaatggcaaggggaggattaagactagggcttctaggaatcaaaaccgcattccccctcaacttcctctctaacgccctaaacatagagatgcaacctgtgtgatttttataaactagtttaatactaatagattaattaaatattaaacactgtgataatattaaaaatttgactaaaataaaacactaaaaattgacattgttaacgacataaaaagcgtgttttggggatccatgttataaaaagttttacaaaagagctatacgatgatgcctcaaaaatataaaaccaaaatacacaataaatacaacctaaaacaactcttggcaactcggcacgtaggcccgtgaggttaatatgtacattgctgaagaagattgtaacctcatggttaatctgttggaaatattttactaggatctagatttactaccatgtatgtttcattaacatcct

SEQ ID NO: 116443 - DNA, 3323 bp, Cannabis sativa
catcataaatatatacccattaatagacaagaaatcagagcttctgttccaatagtttaagtacctttttttagtccactcacagaaaaaagttagcacttgttcttatttaagattaaaattacatataatcatctaaatatgatttgactccatttttttagttcctttaccaaaagaccatacaagaaatcaacaatgataaaaattgaccaaaaataagactaaagctcctccattaatcattttctggattctgatgataaacattaaatacattaaaaatgaaataaaaaaaaatattcttcttcccgcattttccgttaagttgaccaaaaacatcaaaaaaaaaggaagaactaaaaatcagctgaaatcaaacaagagacattaatcgatagcaacaaaaaaaacccaaaacagagagaaaatacacagcaagatgaagatgatcagaccctaaaaaaaacgagagagagagagagagagagagagagagtgaaatgatggttatatatgtatgtacctgaaaaatctgaaattttgctggaaaataaaaaccgattcaaaaaaaggttagatagaatgaatgaaaatggtgaatggtggattggaaaaacttggtagtgaattgatttgagaatagagagaagaacagagagagagaaggttcttcctttttcagaaaattaaaataaaataaaatgaaatggaaaatgtggtattatatatacccaaggctaaggacagggctagctagtagagaataaggatgttctgccacgtggcgattgaataggaacttagagttaaaaaagtaacaaaaattcttttacggtgtccatgtccacgtggatcagtcaggtgcttgaggtttacgctaggttgccacgtgctcgtcacggacggagtacagttcttctcaatatgggttggatcccttttaaactaaaaacggcatgaaacaagcatatttggtatgaaaatatttgataccatgggcacaaatgtcatcaatcacaccccaaattactcaaataaatttcaaattattcatatatcaatatgttaatataaaattttgaaaatatatttggcccagaatctagttccacccgaaatactcaattgtaaatatactgggccgacttacctacagaagaacaaaacaagtatattatataataatttactccataaacaccctgtaatataaatttcacagttttactctttttaggtcaaaattacaaaaatatccctagctcatcaatagggtcttaacatgtcatttatcaaattaattcacatataataaattatataataatataattccatactaatacatattcaactagttagggttcgctaatctgtttctcttaatcttaggatattacataaatcgtgattgttttatacaatccaagattctaaatggctgtttaaaattgtcaaaaatagtgaagtattctcgacggttttaaacagtcaggtaacttgattagtaacggtcatcgaaaaaaatcaacttgagaatcgatgagaataaaccttttcagctaaaaagtaaaaagtatcattggagatgctctaatggattagatattttgttatagtagtgtaagtttatataacaatttggattaggtattagcttatgtaaggttatagaaaaaattttagttattccctatacctcacttaatggattagctcactactataaaattaggtttttatgactgttttaaaatatcgagtaaagtattctcgtcaatctctaacatcaacgcatattcgactgtcgagaaaactagatagaataggtgacagtagaaaactgtcgaaaaactttttcctgactatgcaaaattatcgaggatattgagcagtataattgaatgttttaaacagtcgatcgactatacccttatgcataataaaaaaaaaatagggttgcattatatttttctctttttatttttctagcaaaaccagggcccgcactagtccaataatttcgatcctgccctcttcatccagatcccttcgacttcgaccctaccctcttcatccaatgattcgagtctcaagaagccttctccgtccaacgaagctctgaatcccaagcaaccctttccttccaatgaacgaatcccaaatagccttctctgtctaaggaagccccaaatcgcacgaggacaagaccgtgcgtagccttctttggccatccaacggagtaccgaatcaacatttcaagtgagaatgttgggagttcatagaggtgataacgacgacggctagggttgactagagttcgctggctggggtcgaccaggagcaatagattttttttccttctttatgttcgagtgagagtgagaatgagagaagaaattcgagagagctcaggactttgattggatttcatagtggtggttggtgggttcttgttttagggtttgaagatgagagggagagagagatgtagagagatctgaatgtttgaacaaaattaaagaaaaaaatgggtttttatatatttaacatggtattcccaaactgtgggggatgtcgttttaattcgttttgaattttaaatcgtgattgtttggcatagttagagattctaaacgactattttaaagttaaactacttggaatagtaaagtgttcctgatgattttaaatagtcacgtaactttattagcaatggtcatcgaaaaatatcgatttgagaatcgacgagaataaactttttctattgtagtggctctaccttttctaagtagtgtaagattatataatatttttgaatttgaggtaacaaaattacaaaactaatctaagttgcttcttttatttagaattataaggtctgttgttatttatttatctttataatataatgtaagatgaaaaggattagctatctaatagaacatgcttatgatcatcagccaagttagtctattttttcctacttatgacattaattcacacaataataaaattcaacaaatttattcaaactataagtagttatttacaatgtatcacctcgttcatactacttaatagcaatggtaatagatcagaaaaagatttaaatcaatccaattctattatcatatatagttagagcttccacttgagtaattattttgttacatatttaatttattaactaatataataatgttaatcatttgtgagctttgttatttgatactttaaggtgtctaacattatactgatgtaacactttataaatttacacaatttatgaaaaaatttaaagtttaatatttctatct

SEQ ID NO: 116444 - DNA, 1063 bp, Cannabis sativa
ctctctctctctctcttcttaataaatctgcaaaggttttggcctcttattccacttatcagatatctctagtctacattgatggaacactactatatctgtcgatacatatgctaatttatccaccaggtttagctaggctgtctttataaattattaatatatccaaattaatagtgctcgacctgtttacgatgttcatacactactgtcttcttctccaatgacttgtctttatttggcgctcattttggtctcaatcttacacaatgcttggtaacagatggagttgcttaaccggaaagaaagctatcttagagatagtttagattatgaagctccttttattttctatatccattttcgaaatattattttatatataattttcatctactccattttaccacttgtaggaaatttgtcaattttaaccctttacaaactaacacacaaatcagtccgtgacggtcaattttgacctttacaattaaaacatatatactagtcaacataaacctgaaacgacacacttttgaacgacatagttttgaccctaggtataataacctagtagatagatcaagaaacacttcgatctttcttgaaagaccctagccacgattttacttcgcaacttagagccttcacattcttcttcttgctaatcgcttgccctaatctctaaattagagaaacacacaacaataacaatatccaaatctcgatctagaattatctaagtttgagttagaatcaaacaaaagagacataaaaattgatctcggagttcacccaaaaactgttagctagtatgtctctgtcaaactccctttagatatgcttaaccgtgaactatcaatcatcaatggagttacaacaatggagattcctgatcacacagttccaatcaagtaatgtcaattattctctttatcctctcttctatttttctttacaatttttttttttacctagaaactgaccctgttgatgtatacatcaatgtttagcacgtggcaagaaggaaaatattcacagagttaatgtaacaccctaacta

SEQ ID NO: 116445 - DNA, 2581 bp, Cannabis sativa
ccgccgtagcggctaccaccttagctatcttccctttcgatgacgtggaaggacccgtcgtcgccgctggttcgaccggcgtcggaagttgagtgggtgaatttgaagatgggggttttgatggaaggggagaagaggttggtggagatgggtttgggtatgggtaggtggtttctatgttttgaggagagaaagagagaactgtgagagtgagattgatgaagatgaaggtgagaatccatggcggaaattgttttgccatggatgaattttgagtagagaatttagagaagaagaaagtaattagtgaaatgtaaggaaaatctgttttgggaatatttgttgttaggcatattattatggggaggtttttttggttacataattaacaaagttcaaattgttgaaatggtacaatattagaattttttatatatatatataatatagtatttgtgattgtggaccttgtaaatgataattataataatatttttatgatatatattaattaatatgtagtgtcattaagaaaaataaaaaattatgtacttaggttgtattgacacaaaaatatattggagggatgtaattcattttaaaatataagttgataaaattatggttttttttttaattttgggaaaattttaaaaaaatgttcaaaaaatatataaaaaattaccctagagtacttagttatgtttatttagttttttatattttttttaacttttacacaaaatagtataatggtcattatattgtgaaagaactataatgttgttttgaataaaaatttattgtataattaattaagtaaataatctaacaaaacaaataccctactaaaccgatgaattgaaaaaaaaaaaaaacaaatatataaatgtacgaaataattgatcgtcttattagtagatcgtttaataaatttgtaaaactaaataatattttactacaatatttttaaaactaaatttaacaacaaaatttaatagtatctcaaaaaaaaaaaacaacaaaatttaatagtgatgccctattaattttaatctaataaataatataaaaaaattattaagtaaatgtgcatttaagtataatattaaatactttagagtgttaaataagaatgcagttataattggaattgttaattaatacgtactagtgtcatattaaaaaaaaatattggtattaggtatttatagtgtttagtactatttagaagtgacatctcacaattggtaaacgacactctacataatttaataaaatttgatatttaattgtaccaacaacaataacatacacattaaaaaatattactcatatcttttaacatttctaaaaaaaaatgtgtacttaccctatattgaaatttgaaagaaacaaaaacaaagtcaaaatgggacctcatcaacaaaaaaaaaattgattttaattaatcatttggagatgttgaaagtttcctcctttaatgcaaaatcataagactttttaaaaacattagtgttgaaatggacaacacaacaaattaatgggtcaacgaccttcttctctctttggaaattttttaattaaaaaaacaaaatggatagaagaaataatcataaattaaccaatttggcaacaaaaatggaattaattattccaacacgtagtttgtggatttcaaagaagagtggctcaccaaattaattttggggacaagtttaggcataaataatgatgatgatgatgatgatgatgagttaagctatttgcaatttgtgtgtgtgtgtgtgtgtttatgcagtggttgaagaaatctcaaaatttggtttaaatctaattaagtttgtcacctaaggatttggtaattaaccacactctctcattagggtcctactatttgtttggtttgatccaactttctattttattttatttttcttgattcatttttgttagtttggaaaaaatgttaaaagccttttcttttgaaccaattgaattacaaccttttaatttatattatattattttgggttaatagaattttagaccttgtattgtataaaaattattaatcgaattttttgttttgttttgttaaataataaaataaattatatatattttaaaatagtactataatcttacatttcaacaactttttagaataatttacggtgtaaatacttaaatttaatcccgaatactttaatttttagcggtaataataactaagttatatttttggaagtgtcaagtcaatatccatctgttatttttttattgatatatttaaatgaatttataaataaaaatttaatgacatgcactaatcacttgatacttaaacttttagaaatataatttaagtattattactattaaaaattaaaattatgcatttatttagtattttatatcgctttgaatattataggatataatttataatttaacaaaataaaaatttagtgaataacctttgcaaaatataaaatctaaaatagtatttaatcttggctaattaggatttttcctcccgaactttgacatgtaccaaatcatgctcccgaacttttaa

SEQ ID NO: 116446 - DNA, 1425 bp, Cannabis sativa
ttttttttttttttttgtgaaatgggaattaatattaatttagagctttgtaagttgtaaataccttttgtcattttatttcatataagcttttaattgcaagaaaacgaataactttgtcgataatatatagagtaattaatggtcctcataacttaatatatcaattctaagccatattccataataagtaaataaataaataaaaaattttacccttcttttgtttgagatctactccttcttctactagttgtaattttatgaatgttagtagacgttgtagctatgttgcccataatgtggctaagtgggcttttacccccgtaggtttggctgtattccggtctcttctttgccgaagaacctgctttgtaatgaccatgaggtctaattatgtttcctttatctaatgtaactcgacgctaattttcaaaataaataaataaataaataaaaaataatattaattctaagccatacgtagaggaagtggtgttggaaatagaggatgcaatagggtgtgcacttgaaatttcctagtgattagcttgcttaaagccctatgagtaaatggaaattgaccaacttttgagatcttattccctactatatcatattggtaaataatataagaatcttgtagtagaaatatcaaagtgccattgcccgtatggagagaaaccacgctcaaattttttgtttcgaaaccttccataactttatgcaccaaacttcacacagacgactgaaactccttatgttcatcattatcactattatgattacgattaaaactgaattcccaaattctccaaagaaatccatccttcttgctaatcatataaagttacgaaagccttaatcgtccatgaaccactccaatacgaacctttctagtattacttttacctcgcgttctctcaaagtttgaaggtaagttaatgctacgaatgtgttgtggatcttcatattcatgatatggatcaattgcaataatcctcttaacacatttagtgatagaattagtcactagccaatgttgtattccattacatgaaaaattattttcatccaattcttccatcataccaagagtaaagaatgctctactccattttctaatttcaaaatgaaaggtccaaatacaatacatttcaagatcgctattataataatatattatcacaactttgtatatattattattattattatttggccgacaaaccgatctagcaattcctttaaatggttgaagatctcttttcattgtatacttattaagaacccgagaaatcttaggaagctcaaaccattgtcgagtaatcagattgcatataacaaaactctttttattacataagagtaacatcaaatcattcaaagatgcatactgttgagaatcatggggctccatctcaa

SEQ ID NO: 116447 - DNA, 1131 bp, Cannabis sativa
ggcattccttgaaaaggtgtacacacgtctccataccagtttcgcacagagagcattctttgtcatacacaaaaggaaactttaccttcgtaggaatacactcactaactgtacaccaaagcatccacgccaaacgaggatgaatttctggtttccaaatctacttccaaatctcttgagtctcctgaaaatgatgctcttgatccaacaaatatgctcctttaacagaaaattccccattactattgttcatccaaatgatacaatccttgaaattcttggtgagaaaatgctcactaagaaattcctctcactatcttttatttttatttgtaaaacactaatctctacagtatatttttctttttatcatatctacaatatgctttacacgatttatataattctcacaaaagtaagtgttcctatgctcctaaaaatagcagcaataatctcaactttaatctcctttttcatatactttgaaaatatatttactatgaaaaaaataaattatttagggttaattatatgcataatcaaaaatcaaaattgtatgaaaaaaaaattgaaattattattattttgctaatttatgaacaagtcattggcatcctatacatactaatttaaatttttaaaaaaattgaaaaactttagcatttccaatggagatataaatattactatatttactatactaatactaattattgaattactttgtttttgagaaaattattttttgaatttttataattttaatttaattataaaatacttaatataaaattaagtatacatgtttacataactgaataataataaatttattgttttttcatattttttataaatactaaaagagcattaattaaatattttgttttgcaattatatattgggtcacaatgttaaaaactatatcaaatatattctaaagtgattttttttgttaaatatgagacaaatttcacatcactcattcgagaaggtcttctatgttcactacaagaaatgtcacttttaccaccacagtttgttactatgctggtaaaagttagtaacttttaccagcgcattttgcaaactgcgctggcaaagaggttaaagttttaccagcgtacattt

SEQ ID NO: 116448 - DNA, 1981 bp, Cannabis sativa
  modified_base (1619)..(1619): a, c, t, g, unknown or other
  modified_base (1914)..(1921): a, c, t, g, unknown or other
ctccctctccctctctctctctcttatacatgcccaaagtgctttctctccctctctctcacacgcctccaaggtttcatctctctctcattagaaacctgcctactaattcatgcattgtaaccttaagagagctatatcagatccaacgtattctgaatagtataatgtctcagtatcaatacaactaaaagaggagtaggtcattacccgctaacttagggggcctaacctctataaaaatccttatgttcttctattatctagttctaattgtgtaacacatgacaatcatcaattcaatacgactccgctgtcgattggccaatttcagaggtcaaaactccccttgatttattttggtgatactcgttataggcataatgtaatcactcgctgcttgatgatgttgacagaattcctctaaaatattgtttccttgatgtaattgctccaggtccaaacctattgaaccacttatatgcgacccctttaagtgtaagcataaagtattggcaccttgccttgcatgacacctttttcatcttaattagctaattaaaagctcctagatggtattttgtgtcagtcgtaccatcatatggcgtcatgcaaggctccttgaaattcggtggaagtgcttccattttaatttcccttgagaaaggggattcctcgtcgaatccattatccttcgaatcttcctttgatgttatagccatccttcgacatagatcttacatctctacttctagttctttcattttctttttcatccttttctcgagagttagtgaatggaacttggattttcctagtggttttcatggagcttgtgagtagtactcctttcatcccatcatcatgcgactctctatcctggttaagaggagattgcttttctatagattgggggtgcaagcgcggtgttcccttgcatgagattctttggttgaagtccctccataagactacatgatgtttcccccattgtagtcttaccccaatggatagattcatgttgctctgagggacctcttgggttcttatttcgtgataggccctttctactctcaccctttggggtgccatttgttaatgacatggatctctttccgtcaccgtgtgtaattgaaatcatgcactcttgcttgtggcctttgtacagaaagtgcaaagtttgagttttgccttcaagaatggcgctcaatacttttttcatgtcggccaccacaatttctagccatcaactcttctggcagagatttttttatttcgtcttcatagtggcgagtttgggattttgggctcatagagttagctcacttctccttcccaaggcaatgtcgcgaggtgttgggatcttgtagtgttggtggtggagggtgcataggtgacaacgggacctccttccttcatgtcacacctttacctttggtcgtgaaggaggcaataactctattgttttgcttgtccactagggtctttttccagcgatggtctccttacattgcttgatgttcccgctgttgcgttttgtgccctgaataaaactcatttcaacataatcagatttactaattaatataagattaaaaatcgcttttatgttgcatggntcacatgatttatttcataattatgtttaatgtatatattctattaagtaaagaacatatataaatatgtatatatttgttcatgattatagtgtcgtcaacatagtgaaatataaccatgattatatgttcaaaagtttaattcccatgatttgtaagttcactggatttagactaacatgataatttacgataaagtatacttacatcttggataagtgttatgtcctttccagagcatcaacaaagcttaccattatcggatgtatgtagtatacattggaagggaccgatnnnnnnnntggataagatatcataaacttatcgttatatctttccaagtcaatattaatggttgatct

SEQ ID NO: 116449 - DNA, 1408 bp, Cannabis sativa
acaagaatcttaccataaaagaaaaaatattttgtcaactaacttgccaaaaaaggactttacatattctattaagcaatgaagggtcagctccataattgagaaccttgagcgctatgctttgtcattttttctataatatgccaataatgagagtagaacatgactgacattccgtctattcctagactactatctattttcatggtctataaggtgatataaactttagaggatttgtatggtctagtaaaatagccatttacctcttctgaaatgaccacaagaactgaattgagtacatgatcaagcaccacctgatccactcactctgtatggtaaatattctgacagttttcagtcttctccaataatgttagatatagcattcttataagtgtgttgaattctacttttaattttgtttacacttttttgagaattcgagtgttgatgaaaatatttggtgttgaaattccatacttttagccaatcaattctactcctttgttgtcaatattctttttcttgtgcaggcaaattatccaagatatcttcagatttatggagcttagtaaaatgagattgtgaagtatcataagaatttctcaagtttgcaaccttattctgtgtggtccaaatctgcttaggtagatatccaaattttccatggtaccaaattagaaggttagaagaaacagctgcaatattttgcaatgatattaaagttgaaggtgtgtcataagagtgccaatgccttgaaatgagctcttcacattcagcttcttgaagccacaactcttcaaagtgaaattgagacttaaattaaattggtggatcttgtctattcgatgtaataataacttttaatgcctgtgattagacttgtaaaaatcaaggtgtttgagagaaggtagcacataattatcaatccaagggacatttgaaaaagcataatccaaacactctttaatatttttatttgaaacattgttgtcaagccaaataaaaatctccccttcaaggttgagaggagtgagtctacaataataaaatgcatcttaaaaagagtcaatctatatatccagtcttagggtacctccaattttatcagttgcatagagaatctcattaaatcttcttaaccatggcatcaatggagcgaaatcatgaagtatttgaggagtttctaggataatggtctcataaaagtgataggagaaccataaaactagaaaaataccattatgggccattgtcaaactccatatagctggggataagttgatgaatacctctttttcgtattcaataataaaaaatactctcatattaaattttatttaaatgtacccacttttatgagtgggttgcccaatatactctcaccatccacttaagtctacca

SEQ ID NO: 116450 - DNA, 1356 bp, Cannabis sativa
  modified_base (35)..(44): a, c, t, g, unknown or other
taactataacgtacatgatcatgagaaaaaatttnnnnnnnnnnttatttcggatgctaaaatagataaggatgcatcaatatatcttttttaaggggtgcattaatatatcccttttaaagggttcattggagaattttccataatgttttatctcctctcaactaaaccccatcaaaatgtaaaggaaaaggaaaagtgatgggaaaacgaaaagacgtggaaagacagttaaaaactttccctcctttccgttcctgcatttaaaacctctgtgttttcccattcataaaacttcacgatcgcattaaatggaaaaaagaaaaattcaatttttattattatttctttaattttcaaacatggaaatcaattccttaaaccccactccatttcccgatccccataaccaaatccctcctcttcgaatagccgaccttcttctcaactccgacgacgatcacggctatcactccgacgatagtagaagttacagacccctactatctttcctcatggacggcgttggtaatcgccggagagatcggtcctctgacaagtgtaagcacaacagccattgctcctcgccgcggcggatcattgctcggtgtttctcggccttgaggccggccaaggagaggaaaacagaggaacggccggtgagcgatttgcctgtttcggctccagagagtgaagactcaggtgatgattttaaggttttttttttttttttggattaatcaatgaagtgagatttattttggtttaactgttgattgtttaattttaggtcaatgtaaaggaaacacttctttcaatttggggattgcttgtggtttactgtatctaattggtacgagtaaaaatgaaatgaataagatgattgaaatgaggaaacaaatggagatgtttcttcataatattagagatgagtttcgaaataagagtaatcttgcttattcttccaataataattttagagagagttcaagctctaatacccatctctcacctcttatgaattttactgggacaacttcatatgtggtaccagactcagaaaccatcttggaatgtgatgattctatttctactgatcttaatatgaatgaacagcgtttaggtgaaatggatgaacttgaggctgaacttgaagctgagtttgaacgtttgcagctccgtttggatacagaacattcacaacaccaaagtttaaaggtaaaaagattacatgatttactaataatagtattagagatggaaattggtcggttaatgtacggggaatgcaatccccgcccccatccccgttacctatttatacccccatccctgccccatccccgtctaataacc

SEQ ID NO: 116451 - DNA, 1795 bp, Cannabis sativa
  modified_base (1578)..(1580): a, c, t, g, unknown or other
agtttgtgattgtgctcaattataatatagtttttctctttatattacacttttaaaagggacttaaaagctcatggaaaacaattaataatcaaactcaaactcaaactcagatatatattaaggattgatgagagagagagagagatacctaaaggagagaatagcagggagagttcgttgtttgatgagtttgtcaagttgagaagtgttagaagaaaaagatatgggaaactccacaaggtcagctccttctgctttagcctcattcatggaagccaccatttggtccaagcttccatactctatgggtgcgcacaccacaagattccttttcaaattgaaaaatgccatcacaatttcagaaaaaagtactcaaaattaagagtttgaaacttattggaagttggaagaacacaactacgcacatatatatatatttttatttatataaataaatgactataacctctagaggacttgtcaattgcactctacaaaaatgagtgttatatgacgtataatttttttttttatatatagaaattctattttttttttatatatattttattgcagacttgtttttagcatgtcaaacagatcatttgaaaacattacctataatatggaatgtactcttatatcttattggaaaactttcctttatcttatcgtaaaaaactaaaatttccttatcttattggaaaaatcttgtactattacgctcatgtgtttaagcgtctataatagttttttagttcaatttttattatcatgtatatgttgtaattatttagtattatttgtaaattttttaaaaattataaataatttatagtgtttaaaataagattaaaatattttgttgtaatacataattacttttttttttgtatatatatttttatatattagatatatacataataaatacttatttaatttttttttttgaaaaggaaattttatttttaatgctagataaattatttataatttttttaaaatttactaatacttttaaataactacaatatatatatatataaattattatataaaaaaaattaaactcctcttataaataccaaaacaaattagaagtgtatgtactataccctagcttatacatacgaaatggcatgataaccattaaacctctttctttcataattttgggtatctatcttttacttagtgctttgtgaaattatttagaaatttgaatacattgatatatggcataacatacaaaaataatttttttaaaaataaaataaaatatgttcctagtataaaaatatgctactttatatggtaatagataattggtattcatctcactttcatgcaaaacaagataattatttaaattttttttctccgaaactaaactatgatctatttaaaaataatttgaaattttttaatttaattaggtagtgtttggtaatatttttgtttatatacattttttaataataacaataaaagtaattttttttttaaaaaaaaattgtttttgaaaaacaaaaatgtgttctataaccaattttatttttcaattttaaaaannnaaaataaaagtgtgttctataaatatcattttcatttcatttgttgattttatttaagtcgggtcgagggaggtcgggatcaggggttggtccaagtctggggccgggtccgggttcagttttcaagatctaaattggggtcggagtctaaaatattgattaaaataaaacttttttttaaaaaaaaaaatccaaagtgattttttttttttttt

SEQ ID NO: 116452 - DNA, 2687 bp, Cannabis sativa
aatttagtcaaaaaaaatacagattattaattaatttaaaattattaacaaaatatataacaatatatattaatgatgactacaagtgagatacggttatgatattgattttaaatgtagtggtgactacaaatgagatatgatgataacatttgttttgaagatatttttttatatgctttcttttttatataaaaagtgtatgatgatatttttaaaaaaattctttagagtcatctatatagatttatatttttttaaaaaaaaagatttacataaaaatatgtttgaaattattttatataattttattattcaattaatattcatatataattttaaatttctctattgtgtaagagttgttcaatttctaattttttttcactataatgtacattaaaaaaaaaaagtgtgcttttgtatttatataagaaattgcataataattctttttttaaaattctttagagttcttttttaataagcatatatatatatatatatatattaaaaaaaattatatatataaaatagatttaattatttgatttcaattttattattcaataaatatttatatgtataataatttaaccgctggacgcgaagcgcggccagtttactagttttatttaaaaagtaagtgatctttcagtttacataatcgattagacaagaccattataatattaatcatttaattaagataaaaaaaaaagtttatgaaataaataatagaacaatctcgaccgttcttatttaatatccaaataggtgcgactaatgaactcgtacattggaagtccacattcttgagtaacacataaactcgcgagatctttggtgctactcacatataaggtctttggacacttcaaaatacaaaaatacctctcaggatttttattgatacatgaacctttcgggttttataaaatagaatgcatgtgactatgtcggtcacatattgagcattcatgtactgacaacattgaacttgcgggctctagacaagtagtcgcatacattagtcattcatacctgatgcttgtaaagatgcagtctttacatgaggcgtaggggagaaatatttggtcattgcataaaattgatatatgtgcaactttgctaacttctctctatgtcctacttttactttactatgctatatatagtgtgcgactaaacactgtctctgttgcaccttctcgcaaattgtgatcatggcgtcataagttttaattgggaactaaatccacgtgtcaattgcatacgagactgcactatttctaggcaaaaattcaatctataattaattagttttttttaaaaaaaaaattactacaaatccatttcttatgaaaaagtttttttttttcaaaaggaaaattattttttttaaaagcaatgaatatattattgaacaaaaaattagagttaaatggcttaataaccagaaactaattatctcaaagacacaaagggagattgtacaattaaataaattgttcatccatctaaagagcatgacccgataatccatgtgcagttatattggtcatccgacaaatatagatttgggacactcttaaaaatttaaataacaaacttgtcgaatcctctaataatgatctaagatcattcacaaataaatgccttttattaaaagtagtagacacaagtgcaagataatctatttcaattacatgagtagcaaaacctaatgaaagaatccaatctaaatagattctacttgaaccacatgaaagcttccaaatattagttttgaaaggaaaaaaatattgtgaatttgctttttatataaggaatgaagagatttgactaagtagttcatattatgctactaattatatatataatgaaacacgtaatgtgagattagaaaaagcttcttaagattaattaggatttgttagaactgatttgaagggatttgattggctgcaacaagtgtggtgcaagttacaatcctaagaactcaaatttggcttcaacatggtggattgtgctccattgtgtttttggacatgatttcttgatgaaatatgttggttatattgtgtttagaagttttggacagtttggaaagatttcagttagaatcgggaggaaaaattatgtttatttcttgttgcaaaaacggtctaccgcttttacaaggggtagtaattcgatctgtcatttttggtaattttggaatgattaaaattgtattttggccataacttttcactcgggtgtctattttagacgttctatatactgtttcaaagcttgcgacgagctatatagtatgatatatatttcatagccaaaatatagattttattttagggtattttcaccacgtagtgcagtagaaaaccctagattcttttcgagaattaggaagtgttctggagcaaactcttatcggctcttttatgaatgtgacttagggccttcaaccattagtagctatttctattcaggttcactgacacacttgaaattataattgaggtaagaatagtataacacacatacatatgtacatgtttatattgccaaatatatgacatatcagttatagtgatagtgttggattttgtaaactaaataaaatccatttcaatacaatcagatttactaataaagatcagaaatcacattttatgttgcat

SEQ ID NO: 116453 - DNA, 2187 bp, Cannabis sativa
  modified_base (1155)..(1156): a, c, t, g, unknown or other
aactttttgaaaagtaaaattgaaaaatgtaaaagttaaaaaagtttaaaaaaccgtgtatggataaaaatgtaaaaaaggtgtcaattttgacatgaagtgtaaaaatctcaatttaatagtcctagacttttatttgcggtatgtaggagggttttggaggatgcgctttgcgactgtcctattagagatcgtgttgtgtcgttcctttcctctacacccctcctaatacctacttatttttttaataatttttttaggattatcttatcataatgacttcttgttactcttattgatctacaagtgtaactaaatctttggatcactaagaatttttttttgctgccccttagacagccactttgacattttcaattgcaaagttgtgatatatgaatgtatcgagtagacaagtcaaatgtatcgatacgtgcatgaacatcttcctacattttctactctaaaggccaatttagatgtgtcctctttaatttaaagcattaattattaaaagaaagaagatagacttgttcacccaaatttttggatgttatataagaaaattacaattaaatgtgcagaatcaaattaattaaactttaaacaattaaacaattagcaatgacaagattaacaaatcgagaacaacaatcgaaaataaaacagggacaagcagagtatgtaaaatcagaaacaataaatgcataatataaaaaaatcaatatcaagatatatactggttcaagtccgatagaccgatgagatctatgactctactccaattctggaatacaaccataatccttctttattgattgagcaagaaccggtacaacacagtcgagacaagattctctgttgagttctcacaaagtatttcaagtctcatacttacactcaagaatcttcatctacacaagattcttcttacaaaactcaaactcaatctctctgttttctctgcacctatctctctatctctcaatctctctctcaaactatcaatctcatctgaacttagttctaaatctttgcgtgttcagtctgtctaaaatgataattgaaggtggtatttataggcttaagatcaagatcctaaagttggtggcggctggaagaaacaaggttgttaagttagttagaaataactannttaaccaactcctctttgagcgaagttttcacgtcaactctagtatcagggcctccgaaaacgtaaacaagcttccggactcacagattaacgatactcgctaaggatgttttgggatagaattgagctggagtggactatccgaaactaccattctaggaaggaagactagccaactagaactccatcctggaataaggctagatatcctaagaactatactcggagtagacatgattgacatctggaaactccctttaatttggactcaactatcattccacaagacttctttcgagactgccatttgcgagtaaacaactttttaaaaatgatgattgcggagacttttttcatttagaagaattatacaattgatgtaatgttaattatatattgaattgatcatttcttggagtcgtatttgtgtacataatgttgattattcttattcttcaggagagtgtcataattgaaagacttattaagtcttttatgtccaatatttatatttaatattaatacattaaatgtttaataattaaaaaatatttaaaaatgaggaacccaataattaatatcatataccttattacaaaaagtaatttttatcatagattaaaattattgaagaacatcattattacttttgagaaagataatttttgaaaaaattaggttgtatacttactttattttacttgttttaatttttacttctactttgtattctttaaaatatactcacttttataaatgatgtcctcattagaccctttaaattaatgtaaattatatactagaagtagagagtaagagtatattgggcaactcactcaaaaaaataagtatattttaataaaatataatatgaaagtgtatttttaatttattaatgaatacgaatatttttcgcataatttttttagtttaataaaatcaccatgtattagtaattcattagcataatttattgatatatatatatactagtatattgttacgtgcgatgcacgtatgctatattttat

SEQ ID NO: 116454 - DNA, 1250 bp, Cannabis sativa
acatgactcaaaacctgtaggttttgagaagtttggcgaagaacacatggtttgcaaactcaagaagtagatatatgggcttaaacaagcattaatgtaaaaattccacattaattaagatctcaataacaccaaactcttcaaaggtcctggacactcaaacctgggaagatattgttattatattacagccatatactatattacagccatgctggaaacagagaaattgtggaacaaaatgactgcttctggctataaggttccagcatattaaagaaacgtggaaaaacataaaggttttttaatatgctatattacagcatattaaagaaattgtgggaaaacatatactatattacaacatattaaagacacgtaaacttgtatacatggctaagaaactagctatttatttaaacacaacatcttttatgagaacaacccacctcccattattctccaccccttagtctttttaacatttgcttacatatacatacatagaaacagttcattaacacataaatcataagaaagtaacacaaattattccatggttcactaaactaaactagtagagagacaagttcctactaatcttcacaacagctccaaccactctaaggctcttaaatcaatttactacattttaacaaggcaaggggagaattgattagacaatggttagtatgtaccaacaaattattacctccctaatttcattagacaagcacttcagttagatcacaactgatataatcactagcccacatgttcaaatccaagaaccacctccttctatgatcaagaattcattcaaaaaatctcaaaaaccatttacttatcaacatcattagctactagacaaccaataattggtatgtatagaaggctcacgtcaatcaagcaataaaatctcaattcttatatcagagtatatgctaaattcaatacccataacatagccatccaactaccataaattgtgaaacaaaacaaaacaaaggacaacagccacttaatttgttcaaacttccacttgcacatataaataagcttagccagttcaattcaaagtatgagaaaagctacaaacagctttacttatacaaatatccaaaaaaaaaatctaaggaaaaactactagaatccaaatacttttatccaaaagaattcagagtgcagaatcccaatcaatagtatggagaaatgtaaaataacgtgtaaaaatatatttaacttagtct

SEQ ID NO: 116455 - DNA, 1974 bp, Cannabis sativa
aatatatattattcacataatattatatattaccacattttaatctacatattattatattaaaaataatataacagaaaagttcttcccagagacctaaaaacacgactcccttggttgttacattaaaggttgtcatgcactggccaactcccttactacactatgagtcacgtgctactggttaggaggccaatgaattgtactcctccaagaagtgtgcccaccaacttaagaagatagtggtggagaacgagatttcccctcatcctgaagaaggagtcttccatcagctccctcgagaccaagaaacccctagtcaaaactatgggggtttcggaggttggagccaaacacatttgatgtttagggcaactcttccactctaggactatttcatcaattttcttgttttcgtggggcttgccccttaccaacttatttcgcaagggtaaagactgttggttggtttatttattttttacatcaatcgagggtggaatgctcccattcttactgaaatttagtatttttatgaacttgtttcactcctgaagaaggaagacaaatttaaagatgaattttactctttacaactccactcagacattaccaatggaaatgtcccatataattaccaaaaaaaaaaaaaagtaaaggaacaataagactctttacggtctcaaataggcaccaagggcctggtttgagaagttgtctacaactctggttcagcatgggttttagttttcaaaagctgaccagtctctgttcataagagtcacacctcaatcatgtatctacatccatgtctatgtagatgacattctcatcattggcagtgataacactttggttgaacaactcattcatgatttaagttcaaaattctcccttaaagatcttggccttgctgactattttttgggcattcaggtcactaaaaaacaccaactgggatcttgcttactcaaactaagtatcttcaagatcttctaaccaaagctgatatgcaaaatgtgaacacacaaaatactcccatgaacagtggccttaaactgtgtaactatggaagagaacttgtcacagatgctactctgtacaggtccattgttggtgccttgcaatatgctacaatcacaaggccagagctagctttttgtgtaaataaagtgtgtcaatttatgcaaaattctttgcacacacactggaatgttgtgaagagaatactaagatatattgctggcactcttcatcatggcttgatgcttaaactagttttagatttttctcttgatgtcttctgtgaagcaaattgggcatctgatccagatgacagatgctcaacctcaggctactgcatctaccttggtggcaatcttattgcctagaaatctcagaagcaagctaccatcagtaggtcatcttctgaagcagagtttcgaagccttaccaatgatgttgctgaagtgacttgggttcaatgtctgcttcatgaattgcaaatttctcaagatgcaattccttctgcagagcacagttcttttggctactaatcatgtacttcatgcacacacgaagtacatagaaattgacctatactttgttcgagagaaagttctacaaccacacattcatgtcaaacatgtctcagctactgcaaagattgcagattgcctaactaaaccaatctcgagcactaagttttctaattttagaaccaaactgtgtgttgtttccaaaaccacactcagtttgaaggggcctgtcaagggtataggttagttacaatagttagttaatactgttaactaccctgcactgttagttaagtgtgttctgttagagttagttgggtagttagtgtttgatcaattgtatatatacttcttttgaaaattcaacacaatcaataacaaaatactctctctctctctcaacacaatcaataacaaaatactctctctctctctc

SEQ ID NO: 116456 - DNA, 2242 bp, Cannabis sativa
  modified_base (46)..(66): a, c, t, g, unknown or other
tttcattgttttagaaattcatagtaggatgttaatgaaacatacnnnnnnnnnnnnnnnnnnnnnggtaaaatatttccaacacaccaatcaccccctcgaggatttccaactaatggttttttagtacctgggcctgttgggtcggtatgagtactagttgttccagcttcctgtgtgcccagaatgaatctagtcagaggggttatcaccccatgtcctgctgattggggacatattggtggttgaggaatggttggatcaggatccgtctttcagtggatctctcctattcgctggagtttacacattgggatttgtaggatctgttgtttcaatgggattaccccttgtagtcacaaccatcttcgtgtgttttgaagggaatcaaaacaacgaatgtgttcttttgctctcaatgaaaacaccaaaatattgaccttactttttgcaaacgacactgggtcaattgaaacgattataaatagttcaaatttttttataaaggtccggttcggtgatagtggtaatagcttactctccttttgcttgtattaacttgtgagaaaagaagcaggaactcttgatctttctcgaaagcttttactaagattttaacagtgtaaatgctcattgaatgaatgatttttggatcactgaatagtgaaatgacttcactatttataggaaagaactacatcaattaggctttctaaaagaattaagaaataaaaagggaaactagttacttcccaaatcaggtgaaacaaaaagagaaactataaaagattcctcttattccttgctgatgtgaacctttcccacaaaattagggacgtgatcgtgacttgaatgcttgaacatttatggataatttctttgaagatattccaatatcgcatttaccctaggcggtatatgcgagatgactacaaagttgatgctagtaggatggtgtaatataccatgtttggatgttccaacttatttgttaaacgagttatatatttatgaatgataaatcacctttgacgacacatcataaagtgtactgcccatccagataataaattgttctccacatgtcatacaggtaagtgtaacgtcaccctgtgcagaaattaggataacaccattgtagttcaaattcaaaattagtttattttattattattttattgtttgaattatatattaaaatattatattaaggatatcttaattttttaaatttaggtattatactatttttttttttaatttattggctattcaaaacattaaaagatatttgaataacttatatatttttataaatatttaaaaaatacttaaaatagagatatttaagggttgttacaaccctgtaatttttgaaaattaatattagtgttatttaatattcttttgttaaataatgataatatcctaatcataaagattccattttcaatttttttttattttctattattatttctttttgtattaaattataagattagaaaaatgatattaaaattatcacattttggttaattttaatattttttaatttattatttagttatttaatacatataattattaagtagcctaaaaatttgttagataattgtatttttgaatggatattttgattgtttcaacaacctatttttttttttaaaaaaaaatagttatatttttaataatatttattttattaaaaatgaaatatctcaaccaattttattacatttgtgtttattttattatttttggaaagaaataatttattggtaaaatatatcttaattaactatggttaaattgatgatggattatttagatctaaattaaccataattaactcgatgatatacttttaccataacattaattattttgataaaacttattatttaattgatttaagtggctatggttaacttgattatggatccaatcaatccaaatttatcataagttaattgatgataaatcaatcaaataatttgtaacaaaggtacatctttctatttttttttatctttgtcataaacttagaaatatgatagggtccatccacataaacttgttacatggactatgtatttacttatgggcttagatacatatagtggttcatatattttagataataaaatagactacattgctaaataaaataatcacattattgataattttatttagcaggctcaattggtattgagcctattcaatgaataacaattat

SEQ ID NO: 116457 - DNA, 1877 bp, Cannabis sativa
atcactgataatgttcttgtttcctttgagattcttctttatctaagacgtaaatagaaaggtaacactagttgtatggctctcaaattggatatgagcaaggcatatgataggatggaatgcccttttttacaaactattccgcttcgcatgggcttttttattgactaggtaatgatgataatggaaagtcttcgtactatatcttataacattattcatggaggagaaattcatgagcctattattccttctagaaaaattcgtcagggggatcctatctcgccatatctctttataatttgtgcagaaggtttttcggcattgatttgtctttacgaagagaagaaatggattcatgggtgttaggtaactcgtaggcctcctattctctctcatatgctgtttgcagatgatagtttcctctactttaaagatacaagggaggaggcgcagggagttctagagttgcttaataagcttgaaaaggcttcagggcaaaaggcgaatttgagtaagttttctattttctttagctcgaatacagatgagggagtttgtcatagaattctgtctactcttcacatgagagctgcagatgatcacattttttatcttggttttccgagtgtaattggaagaaataagaatgtgacgtttggttttttgaaggagaaagttaggaagcgcattaagaactgggatagtaagttacttttgagagcgggcaaggaagttttattgaaatctgtcatccaatctttgccttcttcaactatgagtgtctttttaatccctttggaaatttgcaaagatattgatcgtcttatggggagattctgatggcatataaagtcttctaatggtagtggtatccattggaaaagttgggacaagatgtgtctacataagcataaaggagggttagggtttcgtaatttgcgtgattttaatctctccatgtttggcaaacaaggatggtgtctgctgaccaatccttcatctcttgttgctcgagtttttcaagccatgtattatcctctacgcacttttcttgatgttgagttcggttctaatccgagctatgcttagaggagtgtatttgaagcccaagatgttgttaaaatttgtgctagatatagagttgggtctggtatttccattcctattcttatcctgtcgtggcttcctaccaaggaaaacccttatgtgatttcatctcatgaggctctttaggactgtagagtatttaacctccttaaaactgattgtttgaactgggatgaagagcttttggaggacctgtttgttctgagagatgtggagttaattcgtagcattcctctgcctttgactcctgaggtggatacctggttttgggattttgacgcttatggtggttactcagtcaagagtgtgtatcgagcattgtaactacgtaatgggagatggaatatgcaagataattatggcttttgggagaaattttggtatttgaaactacctccaaaagttaagaactttcttaggagggctctcaccaactgtcttcctactttgatgtctcttcaatctaaaagggttaatgtgtatagtatctgccgtctttgtaatggagagcatgagactatttttcacatcatggtgggctgccctttaacccaagcttaaaggaatcgaggcctggggtttgattttaatgatgggggagaggaattcagttactggtttgagagcttctgcaattctcatccaggggactgctggaatatattttaccagtatctagatttactaacaagtagaatgcttttaacatcctaatatgaatttctaaaacgatgaaaataaacacataaaaggtatgagagacctta

SEQ ID NO: 116458 - DNA, 3737 bp, Cannabis sativa
ctgttcacagtataaatgttatgttgttgggcttgggcagtacaaaagtaaggaaaatgggctggggcagtaaaaaagttgtttttgccgtgtcccagtatttttataaagttttggtccaaaaatagtacatatgtaaatttcctatttattattattgttttgaccatttaattaaggataatttcacaaaaacacaaaaacaacaaaaaaaattacaaacatacggtttcacggaattttaaatatttttacaaattttttgattttatttataaaaaatacggtctttttatatcgtattcatattactttgttgttgattttttttttatttgtatgttatttttttattgttgtttaggtgttattttcatgttacttttatgtagcttttttgttgttttcgtattatttttacggaaaaccgtaaaaatataaaaaaaatttattaaacgtaaaaatgtaattttttttacaaaaaatagtgtcttatctaattatctcatttaattatttattttgagtatcgttcatttttctttattattgtttttttgtttgctcattttgtttttaaagaatatagctaaatttggggtttactttcggatgtatagttatagggagagtctacatgcaccaccaatatgtttgcattagtaaacccctacatgttttgatattgtagagaggatatttttctctttatatatatatgtgtacagtatagttatataagataattttttactttacgcataagaaaaaaataatcatgtccaatataatatttaaactttatttttcacactttaaattatttaaatttttttaaaaaattataaatatttatgagaaaattacctcaccattttgacattttaaaaaatttataaaaatatgttgtaatattttaatattaagtgtcttactaagattttcataaactcaatataataaaataagaattaaaaaaatgattagacaaatgaaatagaaatagaaatttttacgtacttttggatgttaagaaccgtagtctacaagtcagttgtattaggtttgttagagcactcacaacaagtgaattataatagttaaaagctaaaaaaaaaatagctaagagcttaaaattaagctccaacaaatgctttaaacccttagctattataactcatcccaaattctaataaattttctctacatttagttgataaatagtgaagaggtaaatcatattttatactttttctttctctctttcattaaattaattaattttttattattctttttactcattttcatatttttttttattttaattaataaagtatatgtaaaaaatataatatttaaatgatatagaaaaaaatataaagaagttgatgtatgatgtaatataaatgtatgaggtaaaataaagaaaatggagttttagtgaagtattttaaagaatagagcagagaagctgttaggagtgctcttagcctcaaagtattacaatggtgtccttaacaagtttaagaactctaactttttgttatagcatttgagtaatgaatttctcaccctttgcatgaaggtatcatgtagtatttatagggtaggatctgggtatggataaacccgcaactcgctaggatttgcgtgtaacatggcccactaataagataaatacataaaatttactgacttcgggcccacggactgaagcccaacctgtggggcagttatgctccgtacgacaggagaccacttgaagttgacaagtgtcgtgtgtgcgacgcctttctgtattgtagtgtcagaacaatggtagtaggataaaaggaaggttctttttggtggtacacacactcttaggctctgacataggaggcaaccccctaattcagtgggattcagtgtcagatgatcgccacgtcagcttcatcctagctttcggggcatctcttggagaacccttccagatgtatcctagaagctcatctagagggtcttgactacttcattttaagaagggcgaggcgtcctttcggattcggagacatctgattccgagtgcaaattttctatatctcgaatgattgtgaggcccatctctccgtataatcttttcccattatctcgttgggctttcgagcgggccttaatcaattaattttgtattggaaatgccacatgtcttctttccaaaaatacgaataacactaagaatatgaaatttatttttaatatcttgatatgcatgtagaaagtaattttttttatttcttttctaactactaaaagtcaatgcatatttgatatcataactaaaaaaatattttttttttcagagcaagagtgtttggtcataagaaaataattagattgaattcatcatatttggttgtaaagggtttgaggagtaatttgttgaagaaatattcaagtagctaatttacaaaagaaaaaaaaaaaaagactagtagtcttggtaattggtacttcggccggtgctcttttctcaaaccagaacaactcatcttttccttgttataaatacaaggatgtcattattaatacattatagactgatttaagatgaaaaaaattacatttataaactaaattttgtttaaattaaattttagttaatttaatattttgtaaattatttaattaattatattgaattttatttgagtaattttatgttaatgaattatggtatttttgcaaatagttcattattgtggtatattggaataaatcaattggacatactcatatattaacaagttagacctatccaattattttcatatcatacatcattacaagtgacctttttgcaccagttacccatatttttgaattgttttgaatttttctcaacaaataatatttttcttgtgaaaaaaggcatatttgtgtaaacttttccataaaaatgataaaatctatttccaatgggtttagatgcattataaatgacatttttttgggttgttacaagggagattttcataaatataggaattggaggtgtaattcaaacgaaaacttctctagcgatcttctctcccaaaattctctttgattttctctctcagaatcacgatattctccagcgatttaatactgcaattcgatctcaaaaactagaaaattcatcttttcacataccaacgattgacgacagactagaaacaaaaatcatcattgccgattgtcttctccagttccggtgagtttgtcaattacttctgatcatcttcttcagcaacgtgaacttgacaatcaatgcatatataattgcttagccaaaaaatatagaatcaaaaagaattatatataacaaatttcgaaaacgattctcaaaatcatcaaattaggtatatacactcaaaaatcaaagttacgataattatttagggaaatttcatttttttaccctaataaaataccccatatcaaaatttatacccctttattttttttacaaattgattccactaatttaaaaagattcctaaaatacccctaaaataaacttttcactctctctctctgactttcccactctctcgctctctctgactttttcctctctctcgctctcttcacaaactcacaaacccacgcgaaccaggcgacccaggcgaacccacacgaaccaggcgaaccaacaaacccaaaccgacaaactcgccgtcgacgacgaaaccaaaaaacccacgaaccaa

SEQ ID NO: 116459 - DNA, 1422 bp, Cannabis sativa
gttgacatgtattgacctagacacacttttgcagttaaaaggggtggactataaaaatttggaagattcacttgttgacaacatgtaagaattagaatttggccactttcatctcctactatgtgcttgagttctgtctctggctgacaaatgttactgaggaagggcatattatttttagacatgctgcaaaggttttgtagggaaaacaatagaaggtcctcttgaattcaagactaagaaatttagatttccagcaagttatcatggaagtaagttaaaaatgttctagttcataattgaaaatctgttatgtagtcttttaggttgtatttttatgattatggcccatagtcatattcttactatatttatcaattatctttctatgtaattaagtactggaaattgaaacgagtgttagtgttggtatttctgctttgtttgttattaatataagctgtaattgtgtaaccagttgttgcttttatagttttattttcaatattatcgacttctttaaaacagatttaaaagggagcttattacaactttgttaaggaagtttattagatattattaataaacaatggcgtgtgatgtgtttgaaaccatatatatatatatagtaatttgatgatgctaactgacaaatagtttacgagggacaaatcctcacatcaaatcaaatggctccagccatgtaatgtaaacaagtctatgaaattatgaaccatatataaatggatatgcccaggacatacgaaagctaggtaggacatatacaacagatcaggctgtcaagaaagaaaaagaaattaccatatccataatcaactttgttagtaataacattcaacatagatttcactaaaagagtggaaaccaaaaaaggaacaagtggtttctatggctgcaaaggggtcttcaatgacatgtagtttgtcagcagagcataatgagtttcaaatcagcagctgggtcttcacatcttcatgtgcatgttcaatgagaggataaaatggttttattgcttggcaacattgatctttactgcaaccggctctgagcaatatggacaatttccaaacagaacattaaatgacctgcaatgcaagttacaaacaataattttaagccaagtagtcaaaaggtcagctcgagttggtgactatagtatttgagatgacataaataatcacatgtgatagaaaattattcagaatcccttggacattctctgaagagtaggagtgttcattaaaccgctcaaactgcccgcaccgcaaaaaaaatgtcgtttgaaattctttgcggtgcggtcacggtttgaattttttctaaattgcgtgttgcgatttgcggttttgaattgttaatatgcggttcaaactgcaccgcacattataaaaatactaattt

SEQ ID NO: 116460 - DNA, 3105 bp, Cannabis sativa
  modified_base (3067)..(3079): a, c, t, g, unknown or other
tctattctctgaatctccaaattctgatcctcaaagtgatcaaaccagatagtcttagaaatgaactcctgggttcggtgagtaaaacttctgaaaatgccctccaaatcgacagcttgccctttaaaaacacagtcattgcgccactgccaaattgaatcacacaacaccggaaccatcacctgcaaattcagatcattcagattacaccaccacataccaaactccaacaaactgtcccaattgcactcagccttaaaccaaaaagcccgagtacaagtacagtggcaaaacaagtgaagagcggactccattgaaaaccaagcttgcttttggtgggaggaagatcactgaacagcctccagcagaaatgctttaatcgagggtgcaactctatcttccaaagtttctcccaaagcttatgaggctctttgaagcggtttttttgacttagccaataggcactcttaactgaacatttaccagaagcagaagccttccaaaatagaatatcaccccctcgttcagagttctaatcaatgtccacccaaaaacagtccttaaccaccttctcattccagcttcttgttccaggtatgaaaagatccatgactctccataaaggttggtttcgttggaattggaagtcggctttaatatcttctaagcctcgccttggaagctaaggtctatcccaaatttcgcatgagccatcagctatcagtataccagccccattcacgcaaatctctctagcctctaaaatactcttccaacaccttgaatcattcccatttttgtccacagcccacatatcattgtgtttacaatatttatctttgagtagtttcacccacggcttatccttttcctccataaccatccaacaaagtttagccagtaaagccaaattcatatccttaaatcttcagaatccaagtcccccgcatctcttcggttgacataactcactccagcttcttagagcacaataattctttttatccacacaaccaatccactagaacttgcaaccacccgatccaggtcctcacacaaagtagtaggaactttcactgttgacataaagtaattggggatgctttggagaaccgaacttaccaaagtagtccttcccgcttgcgtgagatacttcgccttccaaccttccagtttgcctaggattttgtctttcaagaacaaaaaatcattcctcttcttagccgagaaaaagaaaggatttccaagatatttcttctttggattcaaatttttgaagcccaaaatccctttgatttcctctctgcataagctctttgtgttaggagagaacactactccactcttggcactgcttacacgttgtcccgaccaactttcatacttatgaagacaattcaccaaagcacccgcgttttttgcattagcactacaaaagaaaatggagtcgtcagcataaaacagttgagttatcggggtagtgttccttgccacactaactcctttcaaatcaccattcttttcagctcggagaataagttttgataaaacttcactgcagagtatgaacagaaacggtgaaagagggtctccttggtggaggccccgtttgggattgaagggagccaagggtgcaccattgagcaaaatagaatatctaaccgtcgtaacacactccatcagcagagtacaaaccttgttgttaaatccgttcgcattcaagacccgcagaaggaatccccactcaagacgatcataagctttgctcatgtccgtcttaaccgccacaactccctctttacctctctttcctttcatggaatgaagaacttcctgagccacaagggaacactcgacaatccatggccaggtatgaaagccgattggaaaggggacacgagccgatctaaacaacctttgagacgatccgttaatataggagaaataattttatagccaaaattgcatagacttataggtctaaattgatcaaaagtattagcacttgaagtcttgggtatcaagcttataaaagtctcatttactctgtccatcatccgcccagttaagaaaaattgttgaaccatcgaacaaaccgattcaccaactgtatcccaatactttctgaagaaaattccagggaatccatctggccccggagctttgaggggatgcatcttgtataccacttctttaatctcccctacctcgggtatccgacagatagcttcattttcacttgtagttactttctcaataaacaaagtctccaattcgtcttctatcaaaggattggaagagacaaacatttcatggaaatgatcctgaaagtgcttccctatgttatccctgcctcgtatccactgtcccatatcgcccctaaccgcaccaacatagtttcgtcttctcctgatcaaagtggacgcgtgaaaaaacttcatattcccatcaccaaaccggagccaattctcgcgagacttttggcgccaaatcctacccattttctcctccatatcaaggatttccatttgaatttctgcttctttagaaaccgtagaatgatcaataggcatcttttgaattctctccaattggtcccaaagctgtttcagctttttgtcacagaaaccaaaaacattttggttccaaaccttcagctctcttttagttgtacttagcttttgagggagccccacaacccttcggttatcacaatctttcttccaggcactttcaacaactaatctacaatcatctctcgtagtccagaactcaagaaaatggaatgggtagttcagcttcacagtatccccctaggtttccagcaatataggagcatgatccgagccaactatcagataattacgcacaccggcattagagaaagcagtacaccaattcccatcagcaatgacttgatcaaggcgttttcagattcgcttggaagccaaccttaaattttccaagtgaaaacaccatcatcacttcctaaatcaattccagcacaattaaacagaaaatttctcaaaaactcgccttccctagctgttggaaatattttaccagnnnnnnnnnnnnntaccatgtatgtttcattaacatcct

SEQ ID NO: 116461 - DNA, 773 bp, Cannabis sativa
  modified_base (55)..(60): a, c, t, g, unknown or other
gtcacaatacaataatgataatttataattagccacaacttttttatttttagtnnnnnnttttgttgtaactaaaagtaaaaatttttgtagtttgaaggattgtgtaagcttgaaaatggtttccaagccctagtgaaggatagtttctggtaaagcttcaaagtggtaaacatatggtttttaccatttggtttatggtttctttcatcatatatagttggaaaatctttaaaataatttttataggttgttgaattgtttatgagtatgttaaggtctgatcatgcatgcatgtgggtttaaagttccatttctttttaagtttatgttgcaatattgtttgttgcttgattttgtaaattcttggctagggtttgaattccaatgggtcagctcctagcgtaacctctctgtttttattaaaaaaaaataaataaataaaaaaaagaaagaaaactcaaagagcacatgaatttgagccttgtaatcactccaatagcttccctaaaactcgagttataagttgttgatgtttggtgtgcaaaatgggaaatttctgggcagcaagtgctctgcctagattgtaaaacttgttttatgtatgaatgatgggccaaaaaatatcaaatttgaattaaatatggggtaagttgaaaaatactttttctattatcaattaatcaaatttacctataattttatatttaattgaaacatacctctttttatatgtattgtatccaaagtaccctgacataagagagtcacat

SEQ ID NO: 116462 - DNA, 1795 bp, Cannabis sativa
ttcttcttcttttttttttttgaataattttttttttttttaaatatttatatattacaatacataatttagaaccttaaacacacacgtaccttctttattttggtttactctccctattactcttatgtcaattttctttctaaaccgcattattattactctgcctctaatactaccatagttatacaatcacataataattattagaaatagttgtggcataattattaaaattttaaatttttaagcgacataaatttaattatatttttaatattataagtatttaatattagtaaaattataattttatccaatttgtacaactctattaaatttatttaaaaaatatttaaaaataactgataacatatgtttttataaagactcaataatttaaaattggatcctatttaagacgttaataaagtctccattgacaaaactagaccaaatataaataagacacacatagacaaactcagttgaccttgaccccaattgtctttccaagaaaaaaaaaactcatttatgaattgtgtaatggtacacctgtatttcccagtaaacaaaaaatctcatggctctctttttctgagttcatgtctctgctcttgttataattaatgtacaagaaatagaacaaagagatagagtgaaaaatagagagattagacaatttttaatggttgcactattatatggcatgtttattttgttgaaaaagaaataaagtgtaagagagtgtttcttgtcaaattgtttacttatatttaataatggaaaaacttgatgagctctacctaaattaaggagaaaagtaacaaggagaaaagtaatagagaacttctcctctaatttgtctaagtaatagatttacctgtaaaaaatatttttttaattttttatattaaaaaattaaaaggcctacatacagcttctaattatttatgaatttagttttatatttttatgatttaattttaaaataaaaaaaataaaaaaaaaatattttctatgaaatgtaatttagtccatttaagttatttccattactttttctaattatataaacaaaataaaataattttgattatctttctagtcaatttaataaatgacataataaaatattgatcccgtttatttaatattttattccttttcattccactgattttgtttttaaaatttcgactacaatttagtaaatatgtcttagtaatttaaccgtagttaattgtattaagattaatcatgctgttaaggaatatgaaatcttaaccgcactttggggttggttaaattttcatcaattccccgcctaatccataccacgctcacccctaattacatcccataataaagttttaattattaggtaaatatagttattccttttcaatgtaatcaagtaaaacaatttgtccattaaaaaaaaaaagtaaaacaatttgtaccttcttaaaaaaatttatatagtttaggatgtcaaaataagtttcctaactcttctaatctaatcctaaaaaggtttaggatataccaaaattaagtgtaggataaaatacaagtttttgcacaacagaaagatacacaataagcaacttccaagattacaaaaaaaaaataataataacttccaagaagggacttaggacgcgtttagaaagttaagatagaattgaaatgcagtgtaagggctcgtttggaacgctgtattaggtcgtgttgtattatattgtattatattgaattgtattttatgcaatatttttatgtaaaactatat

SEQ ID NO: 116463 - DNA, 3430 bp, Cannabis sativa
atattgaaattagttttatttagggcataaaacccaacaagtgtatcaccctagggagctgtgattttgtttgtgaaaaagaaggatggatccctttggatatatattgactaacacgaattgaataaactcacaatcaagaataagtatctattacctagcatcgatgacttgttcgatcaacttcaaggtaatagagtgttctccaagattgacttgcatttaggttatcatcacttgagaatttaggaggaagatattctgaagactgcatttcgaaccaggtattatcattctaagttccttgtgatttccttcagtttaacaaatgctcttgcggcctttatagatcttatgaattgggtgttcaaggatatgctcaataagtgtattatagtgtttatcgatgacatccttatgtactctgagaaggaggtggagcatgaacaacatttacgaatggctttgtaatgactcagagatcataggttgtataaaaagttcaaaagtgcaaattatggttatcaaaagtgtccttcatagggaatattgtcaaaaatgacagaaatatagttgatttgaggaaaattgagtcaattaacaattggctgaggccatggacagctagagaggtttgaagttttctcttaatggaagggtattatcaacattttgtagaatgattttttaagatttcaatgacgctgacagaattgactaaatgaattagtggttcgtatggtctaataagtgtgaaataagctttcaagagttgaaatagaaattgatcacggaaccagtgttagctttgccatcagttcaagaaaagttcattgtatattgtgatggatccagacagggtctagggtgtgttctgatacaagctgacatggtcatagcttatgcctcacattagttgaaagaatatgaacaacgctatctgacacatgatttagaacttactaccattgtatttgacctaaagatatggtgatgttacctatacggagagaagtgtgagatctatactcaccacaaatgcctaaagtacttcttcacttagaaagatttaaatatgaggcagaggcagtagttagagctagtcaaagattacgattgtgagattttgtatcatcccgagacggccaaagtagtggcagatgccctgagtgggaaaggtcctggctaggtttttagtaccataaaaatatcacctcaactggcttcagatatggttaaagctgatattgagcttgtgatagggaaactgcataatctgacacttcagtcatatttgtttgaaagaatcagagaggcacaattggaagactctaagttagtcaagactcgacaggagatgttagctggttgggctaaggatatatcaatctcaaacaatggaatgttactttacaaggctcgagtttgtgtttaaagcagtggtgagctcagaaaagagatgcttgattaggctcatactatagcttattaattacatctgggtaccaccaaaatgtatcgagatttgaaaccctattattggtggtgcaaaatgaagaatgatgtagtggaatacgtgtccaagtgctttacatgttaacaaattatggcagaacatcaaaaaccgagagggttactacaacaattaatgcttcctgagtggaagtgggaggatgttacaatggactttgtggttggtttgcctagaaccacgagaatttatgattcagtatgggtcatagaggacccatactgcttgaagtggcccgggcgatgagactttctatctcaactttttactgacgacactcttctgttgtgtgcccaatgtccttatggtacttgcaatacctggtaggatcacttttatgcctggcatgcctcatgggctcgggcttggtgaacgcaaccttgcactcatgcgcgaggtaaatattctctcgagtttcattaagctcggtataaatagtataaactagcacgtactcatcgtgcttcttttgtttttttttgtcctttgacaaccccttaaaatcgtcttttctctttgagccagtggcccttgagttatcaactctagttgagagagtaattgtttaaacactgcttggtttgcctcctgagccagtttttagcaagttcatctcttttcaagcttcctccttttggatgaacacatgagccctctgttgaactgagtgatgttcttcactagacgaccctgtaagtcgtcccacaatttgccccctgcggtggatagatcagtagtgatccccgcctgaagggcagtaagttgtgtactatcatctagatttaaaactcttgcagctgtcgtgctaaaacgacttaaatatgccttaagtgtctcgcctggctgttgctttatattgattaccaaggacgcctcaggtcgcctatctcttgcggcctggaactgttttttgaagtccttggacaggtgttcccaggaagtaatggaatgatgaataaatttgttgaaccaactacttgttgctccaactagcgaggtaggaaacaaaatacaacgtaaattgttttgtaacattactagctcgcattattttgttgaagttactcaaatatgaaaccggattggtggtcccatcataagatgagataggagggttttaaaatccctggggaaaaagagtagtcatgatttttggatggtacggctcgagttccttgtctgagtcatatcctgattgttacccgattcccccacttgatacctcttgaacttatcctccaactcatctattcgcaattggataggatcgtcttgctttggaccgagttgttggcaaagatcaagtttttcctgattcaagtgctcttgcagatccggttaggaataattactagtagacctcgcctgcttacagactgtgttctacttacagacctcatcttgctcatggacttcgtcctactcatggccctcatccttgggtgacttacagatttactggttcctgtgctttctccatcattagcgcaacgagcactctctcctccttgagttaatcgactgtgggtcctttagcgccacgaggtcacacttgcttcttcgcgccctgttcttcctcctgagcatggttcgttgtgtttccccctttgtggtttgcatgatccctctccctatggattcgggaagaacgctgttgattcctcaccgctgacctacgttcccctagttgtgtcccaacgtcttccccatttgcacgaggaatttcctattcgttggtttctggttgcctcccattctcatttctatgagatggtataggctaatcatttggattttcagggggaacctcactttccccaagttgttcttcttgaaaagttttctgtttcctagttcgtgagccacgaggtctgcctcgtggtcttctcactccagggt

SEQ ID NO: 116464 - DNA, 4090 bp, Cannabis sativa
tcaccatccccaccgtggtatgttactaacgtagctgacattgtactttactttgaagacgaaaacaaatgtaaaaattcacaaaatgtgaaacacataattgaaagttcacacaactataaggatcccatcagggatcttcaccacggtgatcctgcagaagtgaaggaggccttgaaggctgctaaaactgatcaaatttggttgggaaactagtactgctaatatccaaagaagttaagcaaggttgaagagctcgctattcattttaaagacagattctgaaaggagagggtactcctggaacgagtgcttttggaagtggtaagacatcgttttgtctagttagggctctatctttggcaaacttagaccgtatcaaccaaggtgggtttgacccttactttttactcttagatcatcataaatatcctgtcaatgattatgtggatagagtagatgatatcgttaggagtccaaactattttattatacctacacatgatgtcagggtagatatttttagcaagatgttgtatccaaggttcttccagtatggaagtctcttaggcagagaagatactattcagtcttctagaaggaatcccaaaatgctaaaataaatggtttgaatctcacttgtatattgcttttcatgatattgttatgatgatctcatgtttaacgtttgaatttgctttatcttttgcagagtaaccattcacattacaaatgggcttggtagaaaaattcttgggcaccatcgtccagagatcaaatgaagttagggaagttgccaagggtggccgaggcaaaaaaatagttgggaaatcttctaatgctggaggtagaaagccagcacttctggccaaaggtcatggagctatttccatggctacagctttagaagttattgtccatccccaaacttccttggcagtggtggattatttttcctagaaagggttaaataacactgctttggcaatacttcctctccagtagaggcctatcatcgtggacgatgaggaggaggaggaaggcaaagggttcgtgttccttcaaaggaaaagatattgctctaacctgggtggagatagtaaaagattaagggttgaagctaaagaaaagcttcaacaactagctgctaccagaaagcatggttcagaatctttgtggcgaagaggagcatatgttcagggaagcaacaagccacataggtggagtacccattccagcaaagagactaccaactctcagcctctgccatcacaaccagtttaggctccttcagcctagtttcctagagataagacgagtcttccaccacttcctcattccaatattgtgataccagcctgccttttcccgttgttggaagaaatacgtgctcatttggatgcaacagataagttttacctcaagatatttaactttgaatatgacaatataaggaaaaaagagtccttgctttcaactaggagcagcgccaaattcgggcctaattaatactctttgtgggtctaattaataaatatatttaaattatattttatagataattatttataattattaaaataaaattgatatttaaataattagatgggataagtggtaaaattagaaaagtcagtttaattttattagttaaaataaagtggcaaaaatctaactctaaagcccatatgtatattcgggcctaagagaaagatttagcctaagtctttatttaagctcatctcatctaaacctaagtgaatgcctatataaaaaagaaaagaggattgaaaatcctaatgtcaaaatggctcatctttctcttcccttctttctttgaaaattcgaaaatcatcaattctcaatctcaaaattgttccaaaggtgttttgagtatcagcccacactattcaaggttatacccaggcttttgtggaagactgtgatgaatacaatcgaaggaataaaagatccaggtttagttcttgatcatactatacaggaaaaaatattaagggttagagaactgaatggaatgggacaatttattctgctaccatttttgaaaggttttataaacttttatgtgtttaatttttcgttttaggaatattcatatttaagttgttagattttagaattataattaatatacttgttagtaaatatagattctagtaaaataagttccaacaatttttggctaaattattgccaaacgtgacctcactacattacattggtatgatatttaccaaaaaatccttgtcacctatcatatgtctagaacaaccattgcaaagataccatatttgagaagcgacaattttatcagaaaacccagccatacattttcctttttcaatctacttttatttaggagcattatgtttcttttgcaaatttttcaaaataccaaaatactttgatttgaacatattttgcatggttaaacatttaggttgaatatgcccctcaaggccacaaaagtaacaaattggaataaaccttcttacttgagaatttaccctttttgattttactggagtctttgcttctgcaagtgatgcttttacagcaacgaaccttgtatttgcagtagcaggaaaattcgatggaacactggatttcacaaattatgttttcccagaatattcagtaccatttgatcttaatttagcaaagcctcttaaaattttcaagttctttcttctacaaattaatttacttatcttttgataccaattgaaaaactgtatttttgcatatgtcaataaatttacaattgacttaagcaagtttagactccctctaaaattttaccgcaatagcgaactcccttcgacttttgatgtgtgtgtgtgcttacttcctcttgaagtatagcttggacaagtcttttcttgaagacccttctcttattaaataaagctcttcaacctattttaagaataatgataaagactactagctaatcactctcagtttttacaaaagaaagtttctcctcacaaatatgaaaatataaaaatgaaactagaagaggtgagaatgtttggctgctctctagatcttatttataacatatagtaactctagagacatccataaacatattttcacagctgtacaaaactttattaaaataagtcataatttacaacaacaaaatcacacattgtagtagaatatcaagatgaatcgggaaactatccaaataagtccaagatcacaattcggactttaattcctgccatataaagattatataatctgctatattcatagaaaaattgaaaagagcaactagcaaaagagaacattattttttcaaaaataaaccaattaagcaaatttttcataaagagaattccttctcttatataaattttccctaaagaaaaagacagtcatgaaaatgcaatgaaacacgagaaaataatattttattctcataaagtattcacaattaattaaagaatattttaacaactaaattgtcaaaaaatgactttacattatcaaacataaagctgattctcacaatgtcattctccaatttataaaattggtctgaaatcatatcaacaagaaaattaaagattttagatctgataatgaaaaggaattacaatttgctgactttgtttaaaacttttgggattatgcaaaaactctggtagagagaaaataccaacatttactcaatttagctatagcaatcttgtttcaatcctatgtttattttattgggagagtttgcaactattgcagcctatttaattaataagacactaacacctaatctcaataataagtcaccctttacattctttactctaaaccatcaacttatgtatatttaaaagcatttggttgtctagcatatgcatctactttaagtcagtctaggtctaagttctctcttagatcttcgccatgcatttttcttgggtaccccataagcatgaaagcatacaaattacttgatcttgtttacctttgttagagtattaactgtatattaggtgtaaaagaattaaggtaacttgtattttagtagtttcctattttgttggtagtttcctat

SEQ ID NO: 116465 - DNA, 4172 bp, Cannabis sativa
  modified_base (32)..(36): a, c, t, g, unknown or other
aataatctggattacattgaaatagagttttnnnnngggcataaaacccaacagcttcaagctcggggtgtaccttgatctccaatcttggccacagttcaagacttcaaaaaaaaagcttactcggggtgtaccccgacccaccaatgtcagtgtaacacccaagtgttggggtaatcattgtcgtatgggagttgcttgggtcacggagtgtgtgtgcgtaactcggggtgtttatgagctttgggtggtctaagggcatggtgagtcaaaagggtcatacctcgacccccaactcaaggcctcatggtgaggccaaagcttagtctcggggtgtgcgacacaggtacataccccgacccccaaaagaggtatctcaacgtgtggggatgcaaggtggcccaaaattcacaccccacacacaaagtatagtcatcaataatttttctcaaggaacataatcaaccaaaagtttcaaaattagtcattccttcacaaaatttcatcaaaccagagccaaaaacacattacccacaacctatgctgtagaatccaatcgttaaacactcacatcttataaaaaaatcaaagatcctaattatccaatgccagttttgaccatggaaaaaactaccaagaagtgctaaaaaacttcatcgaatttcaaatttcaagcaagaaaattgcaagaggaagtgtagagaacctactcactatgaagatggagacctcaaagctatagtcaatagtcaatccaagcaacaattaataaagcaatttattaatttgcaaaaggttgattttgttgggctccttgagactagagttaaggctccaaaacttagaaccttatactcgaatgtgtttgaaggacggtgcttttcgtccaacatagcttggcatgctggtaggaaaattgttatagcacggaatccatttagtttcactgttgatatcatcaaatgcaccagccagttgatgcatttgagggtttcaaccactgagggttttagcagtcttctcactattgtgtatgcttcaaataataagggagaaaggaggattttgtgaaaggagttatgtgagttgagtactgatgagaattggtgtctaatgggggactttaatgatattttggccaaggaggaaaggattgggcatagagtaagatcttatccagattttgactttctaaactgtgtgaacttttgtcatttagaagatgtcaaagcaagtggaaattattacacttagactaacaagcaacctggtgaggacataatttactctaaaattgatagagtgttagctaatcaaacttggatcaataagtttgatttagctgaaggtgtctttctaaatgaaggcttatttgatcactcccctgctattctatctctacatcctgatcttggtggtggtaaaaagccttttaaatatttcaaaatgtggaaatctcacccaaaatatgaggaagtgttgaaggaattatggaatacagaaattgaaggcaacaatatgttccaagttgtgtcgaaaatgaagagattgaaggttattttgaagggcataaatagagatggctattcgaatcttcaaagtgctgtagctaaggccaaaatggacctcgataccatccaaagtcacctgtagaggcacccacttgaccctgacttacaccagcaggagaaggaaaccagagaacagttaataaaggttcagaaggactgctcatccttgttacaccaaaaatctaagatagctttgatgcaaaatggagacactaatttggctctcttccatgcttgcattaagtagccgttgagacagaataggattctatctattgaaaaaaatgatggcatgagagtaaatgatccctcacagattacagcggcctttttagaatactaccatggactccttggcactaaaatgagtaatagaagacatgtaaaaagtagcatacttgctaaagagcctatggtgacacttgaacaagcaggaaaattaacacaaagattcactaaagaagaggtaaagcaagttgtttttagcattcttgggaacaaatctcctggcccagatggattttctagcagtttctttcaagacaactggaattcattggaggggacatatgtggggcaatcttatcaccccaggtaaaattctaaaagagattaattctaccatacttaccttagttcccaagatgaaatgtcctaattctgttaaggattttagaccaataacttgttgtaatgtgatttataaggttgcaactaagctattaagtactagaatcaataacattctccctgaaataatatcacaggctcaaggtggttttgttaaagggagatttataggacataatattctgatatgtcaagatctggtgagacattatggtaggaaggaaaacaaacttagctgcatgatcaaattggatctccaaaaagtttatgacacgattgagtggagtttcatcaaagaaatgctcacaggtttgaattttcctagaaagttcacacaattggtaatgaattgtgtcactactcctaaattctctcttagtttcaatggaacattacatgacttctttgaaactaagaggggaattaggcaaggggatcctatgtctccattactatttgttctgggaatggaatatgactctagattgatgagacaggttggagagaaagaggactttcacttccatgatagatgctctgaacttaagctcaaccatctagcttttgctgatgatgtcttgctattttgtcatggagatatcaagagtatcctttatatgctacaggccctgatactgttctctcttacatatggattgcatccaaatgcaagtaaaactgccatcttctgtagcaatatgcataatgaaactgtgaatcacatattgcaactttctggatttactaggcaggatatgccttttacttatctgtggatcccaatttgtgggaagaagatatctggcaaagaatgtgaactattagtagaaagaatgacgactacgatcaagagttggagctccagaaacctcacctttgttgggagaatcacacttataaactctgcattagttgctatccaggcctattagagtcgtatgatgatcatgcctaagaaagtgttgaaagctattgaagaaatatgcagggaattcttatggaaaggtcaggctctctttcatggggctggttttgtagcctggaataatatttgtcagcctaaatcttcaggtggtttgggaattaaaaacctggaacaatggaacaaaactgctatatgcaagtaagtttgggtcatcgctaataaacaggagaacttatggattagatgggttcacagtgtttacatcaagaaataagattagtggaattactctgcctcaattcactcaagctggtattggaagaagatggttgcactcaaagatcagattaagaacttgactaattgcaatgtgttccaaaggcaatcctatactattgcagctggttataagctattttagcctcctcaaaacaagctgaactggagaaatgaagtgtggactaggttcaatacaccaaaacatggtgtcatcttaaggttggctgttctcaataggttgaagaccaaagatagactcctcaaatacaaaatttaggtacaaccgagctgccgcctttgtggttcaaatcttgaaaatggacaacatctattctttgaatgcatggtctttaaccattgtttaacagagattgaataatggctgaactggaatgcacgcaccaacagtttgccacagctgattagatggatcgggaaggccaaaatgttgagttttagaagaaaagtgttggctactgctatagcagctctggtgtacattgtttggaagactagaaatgctgtcatatggcagcaaacacaaatggatacaagtggactaattgaagacataaagtggactctcaagcatcgggttgccatatttttgcctaggagaaataagactattgataaagattagtttgttgctttgtaattgaaaaatctgtttgtgtgtatagatttttaggcccttgatagggtgctattagattgtaaatatcgtttgtgcaatacaattcaataatttatcaaaaaaaaaaaaa

SEQ ID NO: 116466 - DNA, 2004 bp, Cannabis sativa
tatacggacaaagttgtatgctaatggtatataattgttgagactgtagggagaagcatctaaacaatttttttttggagaaaaatctaaacaaaattcttgagatgatggaaaatggggaaattaaaaatacatggctatttaggatatgacctatgcattattgtacctctaaatttctcaacccgttaaaaatagttttcaaatcactcatggtgtcgtagagtagttcttctgtcggattttgtcacatgtggcaaacagaaagatgccgtgacagtttagactattgctgtataagcgcaacatgtgtaattaatttaataagaaaacaaaagttaatttttttagtttagttttacttaatttttttttttagtcattaattaatttttagcttaatgatttctgaaaatgcatatttttatttattttttttccattttaaattacataggtgtcattgatgtgtcaataatataaatatgtatgtcattattttgtttgtcaccggtgacaaaatttgacagaaggactactttatagcatcctgaatagttcaggagctactttaacaggttaagaaattcaggagcaccattagttatagtttggggggcaaaaaagagagaagaaagctacaccttgttggagtagactgttgcgtagtcagttggctaatttttacgtttctatgtttatgtttaaaggagtcctcaaaatgttgtcttcgatcggcctgattccaatcccagtgaattccgtaaacgacacccacttgtaacctttattgtgtataatctatcaatggctgtgataatataaaatatataatgacatgaccttattaacctatgtatataaaatatttttaatagctctgatattatacatttcagtatatattagtggaatctgggataccagaattagtagagttcatgatatataggattctcatgttaagtgaaattcgtaaattacaattctttgtctcagagaaagatgaccaagtcaagtacaggaatcttctccctgtggcttcaattatatccaggcaaatatgaggtgggtcaactatgatattcattatcatcatttcacaccagttcgccactttaatattaaggagtctgagaagttttatttcttacaaatgttgcagatcaaattcattgttgatggtgagtggatgattgatcctctgcgccccattgttcataacaatggttataagaacaatttacttgttatcacctaaggaaaggccagactaacaatacaactagatcttttattctttctgtttcgttctttttgtaaagaagagtaggttgcagattatgattctaatgattctttcatgtcttgagatcaacacaaaggcgtgttttgttttgtttccctttcttacttagaggtgggttgctataaaagcttgtattgtttgctcagacacaatgttggcctctttttgttcaagtaatctatgacgaattgaagtcctaagtcctgtaattctataattcagtaatcagtatcactggggaatcaattggatcacggtcaaagatttttgtcaagttttaactaaaaccagattgtattaatgctatttgtttgtttcttgtaaatggacaagggaaaatatcagtaaaagaatattaagctccattcctcttttaacacaccagcggaggaaggaaaatagttgaatttcaggccactaatggtggtgtggtgtgtatgtaaaactaatctactgcaactcctactcctaatttaacaaagggaaatcaaagttcatacttccacgtagtttcagcaccttcaaaccctctgccaagttcgtaggggtgttcatttaattcaattcgcattattttgctcatagtgtatccgatttaatctacacaatagttcaaatttaatccaatccgtgaaagtgcggattgaataagttattttggattggttactttttaatattaagttatttaatat

SEQ ID NO: 116467 - DNA, 1362 bp, Cannabis sativa
ccaaaaaaaaaaagatatacaaatatatataaaatacaaaagtcaatttattagctgaggtttaccattaaattattgttattagttttattatgtactagtgtgggaggcacacctggggagcacgtgtattcaacacgattttttttttattttgaagggacttatttattacaaaaatatgaaaaattttatatgcaccccataaattaataagtgcaccttaatattttataaaaaataaatttaaaataattttttaaaaatcactcttaatatttttttgaattatttttctcacattatggttcttaaaggtccatactgaattgctcgaacgatttactacaagaaccccaaaaaactttgtaaacaaaccaaatcaaccctaaatgattgtaaaccttctagaccacctatttaaactacaaaaaacataattcaagaaatagaactaggtacaaaccctagaaactaaaatcaccatgggagagaaatgtttgagctcttaagcttaaacttttcccaaaaacaactacaagcattaaaacctacttaaatcagcccaaacaagctcaaaataaccttagaaaatgaaaccgaattcaattcgcgtacagcagcttaacttcaaaagtttcatgaatttctaaacttaaaaattataaaatttcaaagaaaaaagagagagcaagcataccatgaattagttcactaagattcttcaaaaattaggaagaacacgaagaatgaattgaaaaatcctaatttttttactggtcttcctaagggatcgatagagagaattttggagagagagcctattaatttcttattttgtaaaaagggtaattcaagattttatttaatatcaatcataataaaatttgattatttaacttaataataataataataataatccattagctcataaaagacaaaaactcacttaagcaaaagatcattttgcccttgcttcactaacaagttaccttgccacctaagggtattttggtcaaatctaatacctcgaatacttttgatattcccaatgtctatctaagtttccccactattaataaattacaaaaccataagaaagtgtgactctatcagccaaacatcgcattccactgttgacggacataaaatatgaaaaacatgaattttcatgtatagcatatgtaacaccctaattagcaaaggcgtgttaacgtgattttgaacgtacagtacagctcgttactaaacaacaaggtttacaaaactcgtgattaattaaaattttacttatttaattaaatacgtataatatagcatacaaaatacttcgagatcccatttacaaaatactttaca

SEQ ID NO: 116468 - DNA, 2188 bp, Cannabis sativa
agcatgttcaagtaaagtgtggatgtctctattgacttgaacaaaaataagatgggatttggagcagctgtttataatagtaatggtactcttgtggctgcttgtgtatcccctattccaagtaagttgcctcctctccgtgctgaagctgcagccttaaataatgttttgacctggtgtaatatttttgagtttcctattgctttggtagaatctgatatccaagctttagttaacaaaattaattaatgtaatttccaagatagatctcctttagcagatgtaattcacaaggttctactctgtctaaatttatgttttccttgagtatgtacctagagaatggaatgttgtgctcataatttgtctagaaaagcgttaggactagacaaagaggtcatttggaagtgtaattccaaattttcagcatttgtaacctgtactttcggttttttttttttttgttttgttttccttggcaaagaataaaagtcatttggagcaattaatcttgtattgggcccagaatgtgggcggggctttataaagtaggcccctcactcacctgccggctgaggttcaaatcatcggcctaggtgtgtctggagtctgaggaatgttcatcactaaagtttcttcttatacaatcattatttattcctaaaataaaagaaaaaagatcataagatttttggatctactgtacaaagatggatgaataatccaagagagcaagaaagctagctaggtgaaccaatatgaagtgacagaagttcacgaggacggagaaagagattcaactgtttgaccaaacagcctgtgctgactatagttacagtaatctacattatagaatagagcattgtgactccaacccttttgtttgtttctttgttttgactcctaataatacaatgcttttcatattcgatacgtaatcctccttccgcggtggttctcttctctgtttagcaataaatgaaatcaaatgctttatttatataattagtattattgcttaaaatttataagtgccaaacaataccagctatatatatataaattaggggctagttaagaattgcctgaaaataatcccaaattttgagtttgtcaattgattaattagttcgaagttttctagctaattcgagactcaatcattttaatgtgttagcatgtacttaatttcttgttgtgtattcaaaccattttctttgcacacatactatacgcctttgtagaattgtttttgccttgcaattacatgtttttataatttcaagttatatatacggataagcaattgtcaatcgatattaatatattaatatttgtgattactactactacaaaataatttgatagagatttatttagttggaaaaaattaaaaagaaaataacgtggaaccaccggcccacttgtgtttttaatataatttgatagagatttaaagaatcattaaatcatgagttagaagttcttccaaaatagcttttctcaaacatcatctactttggaaaccaatttgaactttcgctttagatatatttgaactcaaaaggctattgaagacaagtggataacactataaaactgatccaacttacttcatgtttgtcatcattattaaaaaaactattttttatttctaaaaataaaaaaataaataaaacaactaaatgtgtttggctttatttttccaaaacaatatttgaaaaccaaaagttgcaaaaaaaaaaaatgttgtttttttgttttaaaaaacaatacttttttggttaatattttttttccacttaatctcacatcaatatactcattatttttttcatattatgttctctctcatcactttctctctcctctttctctctcctctttctctcttatcctttctctctcatcattttctcattttcttattattttctcatattattttctctatcatcactttctcacattatttttttctctcatcactttctttctctttattttctcatattatttcactcattattttctctctcctcattttcttatattatttcacattattttctctctcctcattttttgtctcatcttttctcttactctttcattattttctctctcatctcttactctttcattattttctctctcatctcttactctttcattattttctctctca

SEQ ID NO: 116469 - DNA, 1099 bp, Cannabis sativa
aattttaatatttcgcgatgcggttagtttaaaaaattataaaaactgtatatgcaatttagtttttttaaaaaaagtttataatttgtactacctgtaccccgaacactcctaactaaagataactttttaaagtaaaaaaaaaaaaatagcagcacatccttgccagttgccaccatagtataataatacaacagatgatgacatttttttttttggtttttctttatcaaaacatcagtatttatatattgcgcatttttttaacaatatattataagttattgcgcttgtaaaaaaaagaaagttacctttcaaaaaaaaaaaaaaaacagaaggaaagttttcattcaaaaaagaaaaaaagaaaaaagaagaaaagtttaattccaattaatttggcatataatcaaagcattttgactttgtatttcattcaagaatttacagcaatattcaagaactaccttttgtaatttatagaatgcatacaatccctataaagaaataaatagttatataacatttttcagttttatattatggacggtcgaaaaaaaaatcctcatatcacctaaaagatcaaatatctttttaccctttttaatttttttttgttttttaaaaatgaccaaatatattttattttatttttctgtaataaaataataatttgtattccaaaactaccgaatatgttgtgaattgtgatatgtagatcacaaaaatacataactattaaaatttatatctctaatttaagattcgaatcacaaatttatatgtcatactaataaataattgatttaaaactaactatttcatttgatagtgctgaacctttttcttttcatgagtagtttgattaaaactaaatatcattactcattagtcattgcaaaataattgagtatttgtaggttcttctaatttgtactctcatcaaaatgctatctttaatgagttctatcttaacttgtatgttgcatttttatgtaagttaaataccactttagactctgtattttgtaaaagttatttattagaacatctgttttgtaacaaaataaatcttggatcctgagtttaatttttaaca

SEQ ID NO: 116470 - DNA, 1167 bp, Cannabis sativa
  modified_base (48)..(48): a, c, t, g, unknown or other
atatttagggtgttaatcaacagacttgtgagtagatctaagatcctngtaaaataatttccaacacttttcgtgtaagctccacacgtggcaatcataggctaccatcctagtcagactccacattggttggttatatccacagtcaacatttttgtgctttcattgagaggccaaaattctcattcaagaagcttttatttttcagcatggctatcacaatacgtggaaatttgagcaaatcacgagaccctatggccacagagaaaaatatcgaagtgccacccgtggtgaccagtccaagaggggctggccagtcgccacattttgaccagtagcccggagcttccactatagtatggccaggagagaaagtctctgttggaccctccgtctagcccacaactaaaattcttggcacaggagtgggacctcgtgtctatgcttgtgagagttgaacaggggttggcgaccttagcattgacgaaccccacatggatatgggggatgatacaaaactttccatgctaagagaggctgtagggaatgtatagggtcatactaatgtcctgtaccatgaccaacaagagacatgcgctgccatgggcaacgattttacctaatagagatgtgaattccaggaatggatggattgacaagccacagtcctctgaacccaataggtggagctgagacgctagaatagggaggctaacgacctaatcaggtcgtttaatgagacagttggatcttaagttgaagatccctccctcataagggatccttgtcggcagaggtccctatgtcctagagggaactcagtgtccaagagataactgggcaggtcctatccatgtttggcaggataatagtggacaaccaagggattacgtggcaggtcctgtccatgtttggtaggataatgatagacaatgtagggattacttggtaggtcttgtcctttggtaggataatgatggacatcccaaggattactaggtagaccttgtcaatgttgggcaggataatgataaaaaacctagggataactaggcaaaccatatccatgtttggcaaaataatgacagatagtccaaggatagccaggcaggtcctgttagaattattttaccaggatcatagatttactcacaagtatgttgttta

SEQ ID NO: 116471 - DNA, 3515 bp, Cannabis sativa
tcccatgggttcgacctcgttcttcacaatctccatactacaataaagattcgtgcgcttgcgagttgataaatgtaaaacgtaccattttggtatacaacagtggactttggtgagacttttagtcccgtaattaaagcctttacagtacgcattgtccttactatagctacgacctacaactgggatgttcgccaactttacatcaataatgtgtttcttaatgggacccttgatgaggacatttatatggtccaaccactaggctttgaagatccttcacttcctcatcatgtctgcaagttgcagttttcgatatacggtctaaagcaagcaccaagggcttagttagatcgactcaagacaaccttgctgctgtggaaatttgaaaattcaaaaggctgacttatcattcttcatgttgaagcatcccaagtatgtgctcatggttcttatatacgtggatgacatcattgtcacaaggagctgctcaaaagaacttgaacgatttgtcactcaacttgataaggtcttctctcttaaagaccttggtccattacacttctttcttggaatcgaggtgtttcgtgatgaaacaggattttatttgtcacaaagcaaatacactgttgaactcttacaagaggttaccatgttgaatacaaagcctagtcctacaccaatggtgaccaacaaacaactctctatatataatggcacacctatgacagatccttcacactacaaaagtgtattaggtgcacttcaatacttaagtcacacccgtcttgacatttcgtttgtcgctaacaaactcagtcaattcttgaagaatcctactgatgtacattggaacgccaccaaaagagtgttaagatacttgaaagggtcaatccttcatgacctgcacatttcaccaagtgacagattgacactcacaagtttttcggatgcagattgagcctgctgccccgacgatcgcaggtccgtagatggctactgtgtgttcttaggagattctttagtctcatggtcatcaaagaagcaaaccgtggtagctcgctcaagtactgagtcagaatacagagccctcactcacttggcagcagaactttcatggattcaggaactgttaaaagaaatgaagttcaaaccatctgctactcctgttatatggtgcgacaacatgagcgctagtgcacttgctgcaaatccagtttaccacgctcggaccaaacacatcgaattggatgtgcactttgtaagagacaaagtgttagagaaacaattagaaattcgctatattccttcacataatcagatagtgaattgtctaaccaaagggttgtcacattctcgatttcaatttctcatggacaagctcagagatacagcttcaccctttcgcttgaggggtggtgtcacgagataaaattcacaggggcactttagtcattgtttctctacctccaattctgttggaatgcagcaatccctagaatgatttcctcaccagctgtcaaatcttttctgttagaatagaatcttttttattcccttttgattatattttattgatcacgtgtcaatcattgactgtgtaatatcattgtaccctgtactgtacctggtgaatgaatcgttatatactattcatttcatcttaaataaaattaaaagagacatttgtatgaggtttctcgttttaaaaaagagaatgctaatatagaagatattgattggtttgggagtttaagtgcaacttattagttgcacttaattaggattttgttataaagttttcctttgtgacgataacattaatatgtagtaaaacttgatattaaattacatcaataataattataatatagtagcgattataaatattaaagtatgttgcaagaggagtcattgtagtaagaagagaaagtgatgatgtcgacaagctgacaatcggaacaacatatcgggagagggaggagcttttcaacgaccgggaccaccggaggcttagggggttggggttgtttgggaggtccgacgctgagaatatcgacaacttttcctgtattcttctttattttctttgctaacataattggatcaacttcaccaactaccgttagactatccttttcagcatccaccactatttcatctataccttttgtacataaatatatattcattaattaatcaactaataataatactagtacgtgtatatctatctaataattaattaattaaggggtcaacttattatatcattgaatatagttacatacatgcatatatatacattttcaaggaaaatgtattttagttatcacatcaagagaatatagctctaccgcgattaatttaaattactatcgatgaccttacaaaataaataaataaataaattactatctatgatataatttgttatgtatacagtcatatatagaagttatgtaataattagatataatatatatttatatatatatttttgtgataacatgacaaaattaaattttcaagaagataagtataaaaacatttaaaaaggatattaattaatttattaatgggtataactaattaattaacgtatgtaaaattttataaatttttttgaaggggtgtatatgggaatgggagacttcaccctcccggcagtcatttacatatataagtatagttaataaaattattattatatatatgaacagtcattaaagatttatttttttgtaatcaatttatggtattgataggttattataatttgattattaattaactaaagtatatacaaacacaatatcatatatattggaagaaagaaaaatgtatagggttggataaagtatacctgaaagtttagtgatggcttggagtatatccttcttgcatttctcgcaattaatgaccacttttaacactgttttctgtcaaataccaaaaaattaatgattaaagataaatttaggtggatcatatatgaagagataaaacaaataatgaatttcaaagacattatatataccagcttcatggtgctaacagtactatattgacgaagcaatttaattgagatctttgacaattgagggttgggtttcctaatttttggctattcgacttagctgaggcctggcctttatatatattatatatatatgcatgtaatgttcatatctgcattagtgtcaccatcagtatggattagattcggaggaataatatatatttatcaggtacgtacacaaattaattaagctaacgataagtcaatataacatatatatatatatatatatatatgtatgtattgtggctctatataatatacatgtagctggcgttcttgttggcgttcttgtcttctgggcagtgtatagctataccttttaatatttcaaacagggtaaataccattttggaccctgtattttgtaaaagttacagattggaccttgtgttttgttaaatgacataatggaccctgtattttctaaaat

SEQ ID NO: 116472 - DNA, 1762 bp, Cannabis sativa
  modified_base (1667)..(1668): a, c, t, g, unknown or other
ccacgtgtcccctctcgactggtccacgtattttgggcgaattttggagcaacaatacctatttatgggtaatacacattaagagtgcacctatatatatataattggagactcctttaataaactcattttttacattttgaaaagtctacataaagtaagagtatctctctagtttttctttctaggactaagagttatctcttaactaataatcttataattcttatgaagaataaaagctttaagtagacgtaactcattactatcgcgacacgaagagtgaactattataaattgtagtctcttttttatatttattcaaaaaaaaaggggggataacgaattcttgctcacaccaaattagtcaaaattctgtcgaaatacatcttcaaaagcacatttgagcttaggaattagtagacctataccgaattgaaataattgagaaggaaatcgagtcacccgatataaagtatattttgattagaccaaatatggtgtaaagaattcgaaatgataatataaatttgttgttgagccagttttcggcatcaatagttacacttacactttcagtttctacaactactataaagcaatatttttcaactacaaatataataaagattacacttcgcaataatatgataaatgaatttttaagtgattgtttgctagcataaattaaaagaatgatcaaaaaaattagtataaattcactttaatttttgtgctatgtatggaaaaagttctgtattttaatttattttttttttttgacgtattttgtattttaattttaattataaatttaataaaatatttttgagagatttatcatttaaatttataatatagtttacctgcctcctaacttctcatcctaactccacccttatttcgtaccaacaagaaaagttttccacaaaggagaataaaatattagaatttacacacccactactttgtgcgtgtgagtggcagcttcagaagtcaagttacttacattttacatggggtttttataaaaataatagattttgagtaaaagtttacaattttattgtagggtaaatttttttacaaaaatactgtctttttttttaaaacaaccgtaaaacaataaaacagaacaattaaaacaatagtggaacaacttaaaaacaaccgtgaaacaatcgtaaaaacttaacacagtacacagtataaaatttacacaatatttcttttaaaaaattcgccccatagtaaaaatgtaaaaagattaaaaaatgggattttatatttttagagactttaatttaattttttacggatttttttattatatttttataaaaaacaacaaaatataaatgtaacaacaacataaaaataacaacataattattaatacagtagaaaaacaattatttttatttttgtaagaaagaaaacttcaaatctgtaaaaatattataaatactatagatctgtatttttataattttttttttggttaaaattaaaaaaatctctaaataacatttgttagaaaaattgataataaactcaagatcaatttgtatataatatagaagacaataataatatataataattagacaagcgtacttaattgatccatagtaattactactatttgatagtgcaatactatcaanntaagtcttcctccctaggtctctaaatcaggaacagttttatttatctgattatcaaaaatataccattgtgatgagacaatatgtatttatag

SEQ ID NO: 116473 - DNA, 1330 bp, Cannabis sativa
aggtaaatttgattaattgatgaataaaagagacatttttcaacttactcctactatttatctaattattaaaaagacaagacttgatataaataccacaaattactcacacatgacaaatactcacaattttttttttaataaaatcacaagtaccaaatatgtattctatttaagtcctatttttgtataaataagtaataattttatattattagtattatatgtgtattggttgtaatagtcaaaataggttgtattaggaagaaatgaggaaaatgtgggcattaggttggttggaaagtaaaatattggtagttacataatgtttatgtatgagtgatgtgattatttgtaaggttatgttttgtattcatatatttgtgagtacaacattaaatagacattgacaatgcaaaaaatgtttatatcaattatcaatcaatatcatacataccaactcacatcatatttatagagattaaaaaaatattatagcaagaacaaaacaaaataaatagtattaatgttgctgcccaggatcgaactggagacctttagtgtgtaagactaacgtgataaccactacaccacagcaacattgtgtaacataaatcttacattaaacattttatttaaaatttgttttcgaaattataacaaaataattaaatgtaaattttataaaaaataccccattttaatatacatattctttttgaattagaaaatttcattcaactagaccaacttgatcttaacattaacatgacgaaaacaacatcggtaagaattagagctcaaaaaaatacaaccaacattaaaccgaaaagctagtgtaacatgatgagtaactcggttagcagatctcttaacaaaacttaaagaaatatcacgagcaatcaaaggtgtttacactcctctacaatacctccaaacatggagctagattttttggtacttctaacaacttgaatgtaatataagctgttagaaccccccttaaatgtaagctaaagtaattaattaaggtctaatatattcaatatatttttcttgaatgggcatacgtaggtgtgtgagtttatttatttatttttctgaatagaaatatggcagttttattaaaatgaattatgatcaattaattcaacagggaagtcggttacattaattaaagataggaactggtgaaacacaagagctatatgctaataattactaattacttcaagagagactcgcccagatttgttgatatatagacaaggttattagaatattttatttatggaaattattttctaattaaggaaatgattttctattt

SEQ ID NO: 116474 - DNA, 3246 bp, Cannabis sativa
aaaaaaaaaaaaaagactaaaaatctttcgtggatgctgaaataaataaaaaaatctaccaaaatgacattttaggaagggtctactacataaatttgtagaatttttttttttcattaatagctaaattaggcaaaccatgccttacaaaaaatagtaatgaaaaatctaatattttataatatttttatttattatttaccaaataaattctattatttttttgtaatatttttatgggttagcacttttttggatcctgtactgttttgtaaaagttattgattgggaccctgtgctgttttgtaaaagttattcatttcaccatctattttgttgaatggcaagatagactttgtgttttccaaaatagcatataaataggacactgtgttcaatttttgataattttttttttaatataatcaacttaaagacaattcctaacacaaatagatgcagtaaacaaggttggccctgagtaaatttgggccctaggaaaaataatttttttggacctttttataaaaataaatagtacttttaaaaattattaaaaacttatgtatatttattaaaactttttttttcatttgggtccctgataggagtgggctttaggtgcaggcctagcccgccttagcctagggccgaccctagcagtaaacataactaattttgtcataacacctttaaattatgttattattaagttttattttgacaaaaaataagttttagtactattttgaaaaatacataattactgtaatttgtcatttaacaaaataaagagtccaataaataatttttacaaaatacaaagtttaaatagtatttaccctacttttatttaaacaatattatttgtcaaatatgtaatatgaaatttttaaggccacttactatacataattaataatttaatatcttatgacattagcattagcatgtaataagtaattagtaaggtcaataaataattgaaaatacaactacaaattatgtctaaacatcagaattttatattaagtgtcatcataacttaaaaagcatgtgattaaataacttatgaaatattattatgtattggaaacaacaatcctattccaagttcaagaccttatgactcgtaaagagttgtattaaaaacaatgatcctgttctgagtggatgatggtgggtgattggaacacaaaatatttccataacaaggcatctgtgaaaaaataaaagaatgtcattacagagattatgacagaaactggtcaaaaactttcaattgaggttgatattgttaatgagattgaacagtacttttctggtattttccaaactttctcacttactaatgaccagattcggcaaggtattgaagtagtacagtctcaagtctgctggggacaatgaatgccttatagttgtgtttacttcaaatgatattttttgatcagtcaaggctattagggccaccaaagctcatggccccaatcgttttcatgcaatgttcttttaaaaatattgagatgtggttggtaaacgagtttcatgtgtcttcttggctattttgaatgaggagcggtctgtggagtatattaataagtcaaatatggtgtttatacccagagttaaaaaaattcaagctggttaaagagtattggcccattagtttgtgtaatgtcgtgtataaaattggctccacgacattcgcattgagaatgaagaatgttcttagtcctcttatctccttcgacaagaggagttcatggtgataggtggtgttggcattttgatagggatggtaattactcagttaaaagtggctattttgtggcatggttcattcaatttgatgagggggctgctgactcatcttggcaagcgtggtggtggaatggtatgtgaaatttaggggtccctccaaaagtgaaagtgtttatatggtgccttatttattatgccattcatgtagattcgagattgcgtactcgaaaagttgtttttcctttatattgttcgagatgtggtgaggaatctgagaccttagagcaatccttgtttttcgttctacacttactatgatctgaaagagtgttggactgttgtctccaattcaaaggtttgtaaatcgcccaatactagatattcttactggtctattttttaaactttctcaaggtgagtttgaggtgatgttgatgcttttgtatgatagaaattttattttatttggtgagacgcaattaagattggaacttattctcgacttagcacaacgggctttgtgggagtttcgtgagcaccaatggctcggtttgatttcgacggtggttgctacttctaaggtggtgtcgtttattggcgggtcacttttctttgaccatcgacgcttcagtgaatttggggaggggtttgtggggttcggcgtgatacgtgatggtgagggtgtggtatgggcttattgggcagtagggaagtttggtgtgaatgtggcgaagttgcttgcggttcgaatgggttgtgttttgctcaacaatttcgattccccatctctgctattgaaagtgattcgacgatggttattggatggattaataatcccaatttaaatagcatttttcaactaattattttagatgttatttctttattagcagttgttgatgatagttcctgcaaggctattttgcgttctacgaatggtgttgctcatgcactggatacttatgttactagttctgtaggagagtatatttggatggatgtttgtccatgttttaattagttcttttgtaacagttgattttatcttaataaaatgatttttttttctattaaatttcaaaattgagacatttctgagtagttcgccaatcaatgacatcacatttgcccaagtatttatatatatttatggtaattatatattacaattattaaaaggcctattttgttcacctttttatttattttggtatttacgagagcttttatattttatttattataatgattatgtatacatcggttagtttggtcgggttataatgtatttttatcaacccaatataaatgtcgtgttgtaaatatataattataactcgtccaatgaaaaaataaaaaaaaagtgtaactcgtcttatgatttttattagtttggtcgggttaacccgtttaaaccgatctttattttttattttttttcattattgttagtttttagtgttcaaataattaatttgaaaa

SEQ ID NO: 116475 - DNA, 3212 bp, Cannabis sativa
atcctcttcatatcctccaccatcatcatcatcttggtaagcttgactgcataaatcattgactgacccccaccactggctagggtcagttgttccttcttcaactaatcttggatcctgggtttctagagcatattcctcttccataaaatctggatcttctattgattggttttttttttctcttgattggtcttttggatgatgtttctcttactctctttctggtttggggtggtctttgggacacactttgagatctagtttgggtggtgtttctcttactcttttcctagtttggggtggtgttcgagatacacttctggatccggtgcaaggtggtgtttgggctactgtgtgactgtttagaggtgttgtagaaggtctttgggatctggtttgagccctctcctatcctagttttggatgttgtttgagatctattttggggtaatttgttgagatatggctggcctttgttttttctagtttggggtggtgttttggatggagttttagacctggtttggggtgattggaacagttctgtttggcaactttttttcttggtttggggtggtgttttggatgttatttgggacatggttttgggtgatgggcatggatttaattggccagttgttttcatggttcggggttgtgttttggatgtttgacaactagttttgggtgatgggcagggatttaattggcctatttttttcttggtttggtgtggtgttttggatgttctttgacaccttgttttggaggataggcacggatttaattggccaattttgccttgtgtatgggatctggtttgtgctgatgttttgctacttttggctttctctggtttggatggtgtttgaaagttgttttgggcatatgtttgggtattgtgctctgatattggcatgggctgtatgggcatgttggggtgtaaatgggcctcacttgaattagtatgggcctcatctgttgggccttcatctcagcttcacctccatacatttctccaatttcatctagtgtctcaataattttgacactagaatcactatcatcagcacttcctccatcaacatcttccatgtcaaattatggcatgtacataacaaactcatcatacccatcatcataatcaccaccacaatcctctaatttatctgccaattcctccccaacctccctcattgctgctttggtcataacagtcttttggtctcgcacttacccgagcatcaacagtcacattcgcatcatctggtagctcctctattatgcatattctcagcttagttccaggtggtgtattgtccactgttgtcttaggaacttgaccataaacaactgctaattcaacactgtttcctctaaaagttccagataaatcagcataaacatcaaccttcctatatctctttcttctcatgtcctcgaacatagccaaaaaatccttgtcagtcttaagctcaaatccatcaattacttgtttgtctttaggcttaaaccagaaataaaaaggagaaccatgacaccactgaacttgcaaaagcattccttcaagctccatcatgttgaacaaatctgtatggcacttgtcaaactcggtcatagtgccacccacatattgtttcaacccatttttattgcatcaagaacccccatggtgcatatttacactaaagtgcaaacctgccagcaacaaaacaacaaaaatttacaataaagttcatgacataaagcctaaaacccacacaacattgaaaaatagtttaataccaactttatcatgtcccaacaaaaataatatagatcaaacaaatgtgtacacctaaaccaatatattcaacccaatataaatatcaaactccatctgaaaaaactattttcatacagtgaatgagaaatgaaaaaaagaaagagaaagtaaaacttaaaaacaattttttagtaaaatagagagaaaaaatatagtaaaaactatttttttcactcaaattacaaaataaaatatgaataatcaagaaaaagagacataatattatacctccaccatcatcgtcgtccattatatgactagtttctgggcatctctactcctctatcttcaacctttagggatttagcttaggaatgaggatctaatgaggtcgatatggacaaaatcgactggattttaatgcatacacaattttcatcttcaattttgagggatttaggttcgatttcgtgattttggtattgggtgtcgataatggttctgagttatggtttctttctgaaatgaactatgaaattttattttgtttctttttgattctttttgttttaattcaatcagtttaattaattttagcttaatttaaaatttgttttatttatttgttttaggttttattagtttgttttagttattacttttatattttagggggaaaacaaaaataaaaaaaaggattaaatttagggcatccacgtgtcacgttagttacactaacggactgggtatgaacggacaaacaactttgttgactttgggtattttcactgtcaattttcgaggttgggaactaatctggatcaacctcaagtttttggggacttttgctacaaatatcccaagagaatataaatatcatagggtaatttcacggtacatttcttatctgtttcggcatctaagaaagtattttagtgtatttttttatgatcgcctatgcttttgttgtttaggattacttgtaaattttcaaaaaattctgaatagtttatagtgtcaaaagtaaggttcaaacagttacttaccacgcatataaaaaggcattcactcatataacaaaatacataaattttatctttggtatttatttttttaaatttataaatggtcttaaataacaacaacattcacaatatttctaaatactaaaataatattatcacaataactaatattaataggaaaattttggacaaaagtctgtaaaaagttcactttgatgtagactagtccttaacctcgaaaaatagcggaaatagtcctaaaggtcacattttttgtaagtacgttacttttaaatttgacggatgcgttaagttattcataactgccacatgttaaaccattattggtccaaataataattttaataaaaataattaaaaattaaaaaatatattttaaaaatattttttttcttttt

SEQ ID NO: 116476 - DNA, 2388 bp, Cannabis sativa
aaggcatgcaaccaaaagagttttatgatcaaatgttcaactaaagacatatgctcatgctcaaagcaaaaagccaaaaaaaaaatgtttcaagtatagatcttcaaaacaataggactctttggaaattgcttcaaaaaatgaacatcatggaaaattctcaaaccaatgtttcttgtgtagaaagaaggggccactttgcaaagcaatgcttaaaaggtaaaaccaccaagatgataacacatatagagaacgccactggggtattactctctgataatggcgttgagtcagtcttttcaattaaagagaagatgtccccacatgtgtgtattacaatcaacatccaattcaaacaatgaaagctatgccgaaatttttaacatggttacaatcaccatttgacaaccgatactgatagaaaacatccatgtcatcccaacaaaatactattggccaatcaaggtagctacattttttaatacgggagcatcatatacaattatgaaccccgacatcttgtcatctgaattatggaagaagaaacagtatttccaagttgcaaataacctagtactctgcaccgaattaatcaacaagccgataaagctacaattcttccctagatgttccgttgtccacagagtcattggattaaaggtttctacgaaaggacctcattgtgagatttgacctttacacaaaaaagaaaggtcttagaattctctcacaagggttggcctacaagtatttcttcacccaatcgaagcgaatctcgaattatttttacctagtgcaagacatattttcatcaatcaaagtaaaactaatacaaaggtcatttgtaaattcttactcagaattctcaacaaagtgcaatcattcattatggaaaaatgaagaattctacatctctctaccattcaaacagaacaaagatatcaatccaaccaaaacaaaccaccccggaatgaatcctgaacatcaaaaagtggcgagggaagaatgtcatcaacttaatcacaagggattattgaagacaacgaatcaccatgggcatttcacgccttttatgtcattaacagggcagagcaagctaaaggaaagtaaagattgataattaattatcaaccactgaactattttttggggaacgataaattttctctaccaaataaaaattttcttttctctaacatttaaaaaacaaagatattttcaaagtttaatctaaaaagcgggtttttggcaactggacattgaaaaggaagacaaacctaagatgacgctttgcatcccaaatcaacattttcaatgggcactgatgccttttggattcaaaacggggccatccctatttcagaaagcaatgattaaaatctacaatccaatccttaatcaagccctaatctacattgattatatactgttgttttcactcgataacaaggcccatacaaacttcctggcccaatttgcggagatcactaaaaaatatggcatcatgctctctgaaaaaaagatggtaataggtcagccagagatcaaattccttggaataaaacttcatgatggaaaatatgaggaacccaaatccaataatttctcagaattgtagattacttgaggattttgtacccctcttgtccaagatcacaagcccattataaaaaatgctctaaagaggatctttaccttggggaaaagaacaaacagtcccaatcaacaaactcaaagatataatgcaaggcctaccccctttcaaagtccctctagcgggaaaagaatcttacagatagatgcgagtctcaaacactagggagcagtcttattggaggaagacgatcgtagtaaacacaaagtgtgcgatgacaaaagtggggctttcaaagactcacagctacactaccattccacattcaaagagatactgacagtaaaaatggacttcacaaaacttgagttccatcttatcggacacaatgtcccagtgaaaatagattttgtcgcattgtaagggatgctcacgttgaaatagaataaagcagtcaataatcaactactcaggttagccacgtggttctcacgttgcacgtttgaaatcaaacacataaaagataaaattgtgatttttgattttctcacagcacaaacctattataaatatgatgaattcacaaactgaaaatctaatccctttgatatacatggccaacctatctcttatcctccctaaatttcccattgatgccaaattaattgtcaaaagcaaaatttcaagggttaaagcaatttgaagagccttagaagtgttgggttttatgccttaaataaaacccatttcaatataatcagatttaaaaaaaaaaaaaaaagtttttttctttt

SEQ ID NO: 116477 - DNA, 2650 bp, Cannabis sativa
ataaagttgatgacaataccacttatcttgggttacctaatacaatggggaggaagaaaacttctattttgggctttctcaaagaaaattttgggctttctcaaagaaaagttgaagaagtgaattcaagggtgggaagttcgttttttgtctcagataaaaaaagaggttttactcaagacagttgctcaagctatttcaaattatgcaatgagtatttttttgcttcctattaaaacttgtaaggaggtggagcgtcttatggctaattttttgtgaaaaactagttcgccaactacaataaatattagttggatgagctggtctcgaatgtgtaagcacaaaatacgctgggggtttggatttcgatagcctttgtgattttaatttagctttgttgggaaagcaagggtggcatttactcacgcaagatttgtctttggttagtaaagtgtttaaggctcgctattttttcactggttcttttttaagtgctactttgagcaacaactcgcgttttgtttgacgtagtgtgttggaggctcaatttcatgtttgttctagagctcaaaaaaatgttggtgatggctcttctatctctgtcctccatgatccttggttagtcatgtaaatataatcctttcattgctttagatcatccaggtttgcaagataaatatgttaaaaagttgtttagattggatgctaagaaatgggacttggagattctcaattacttgtttattctccgagactgtgatcttattctatatattcagttaagctcttctcatgttcatgattattggtcttggaagtatgaaagaatagtattttaagtgtcaagagtacttatcggttcttggaggatcttgaaggtggatggtctgaagacaatactacaggtttttggaggaaaatttaaaatttaaaaattctaccaaaggttagcaactttatttggagggcagtttctggtattttaccaacttgtgttcagctaagcgtcatcttcttgttagtcttctttgtcaaatctataattaatggccatgagaaaacaatttttcatgctcgagtaggttgttcttttgctcgagcatgttagaatcgaccgttgatggatgtttctagctagtctgagagtgattttggctattcgtttaaatctctcttggctgtgattagttagcgggctttggaagaagttgtgatagtttcttgggtgatttggaagactcgtaataaggtgatttggcaacataagacccccgatgctgcaattgttgttgtttcagcatgttctctacttaatcattatacttttgcacaatcaaggactaattcttctttgtccatagtttttactaggctgaaacaaaatgtgcaatggactacacaccgacttacaatcaaatcaaggaaaatattgatagagtattgtttaatgatgttggtcactttggcatagggtgcttggcaagatctcatgattggagaatgttggaggcctataccgtgggcaagttgggagttgtcctgctagaaattgtagaaataaattacattaagaaggcattgagttggattcagcgacattcatggtctaatgtggttgtggaaactgatagtttggtttgtgttcaggctattcagtgtgatttacatatgccttctgagttggcttattagttaattagttttcatgttgttttatcttccttaagtaatgttgttatttagtttgtggaacgatctactaacaaagttacccattgtttagcgcgtgactcttgtttctctttaggtcgtattttttaggaacatgatatgtctcctgaattacttgctattgtaatggatgaatttccaatttaatgaaagattaaaaaaaaaaacaaaaaacataaacattactgttagacctttttagtaatttagttatcaaaatatattttaaattaatttaaatgtttattgtaaatgtttaaatgtcttgatttcattttatatggatgatcctaatttatattgtatatatataaaaatgaaacattcatgttatgaaataaatgatataaattatgttttaattggtattttttgaactcatttttagttaacgacgcagagtcaataaaatgatgatatgagtgtttgaataattaaaaaataagaagctataaataacgcaagatttatagaggttcggtccctaaattgataatgactcactcttctttttgttgtatttatctggagaataacaagatcacatgaacctggtcaagtgagtttctttttatctctgaaggttacaaatagtttggcaatataatagctcttttgagaatgtaaaatttggtcctggatagtgactatgatccactatttatagggaaaaggatgtagaatatctacatttaatatttgaatgagttaatcccacgaaattctctaatttctcttgattcttgcaacccctcaattacctatatgcaaggaaataagttgttgaaatgaatttggacatttcctctcgcgaacttgctagtcggacgtcttctgttagatggccctttggttgccttgaaatttggttgatatacttcgtccagcatgtatttgatgttggatgactctatctggt

SEQ ID NO: 116478 - DNA, 2295 bp, Cannabis sativa
  modified_base (2253)..(2258): a, c, t, g, unknown or other
attttaattaatcatgatttctataaacctcgtcgagctgcacaatacgtttaactgcacaatacgtttaaaaatcacgtaatacgcctatgctagtttgggtgttacaattattttatcatctacaccttcattactttcttaagctctatagttaccggtgcgagaccgcctagaaaaaggtccctgtgagaaaagaagaaaagcctcctaaccgtataacgaggtctgagcgaaggccgcaaatgtgcatcgccaaggtgttgcccacaaaggaacttgatgcctcagtctactcaagaaaggtgacgaagatggacacaggcattctcaaaacacctgaggcactgatacccatcctcaaaagcttagatctggccagccaattctctaggggtaggatctgccatcgatgtccttgggctcatatcaaccgttgtatcactgtgtgtagacagagcagcacaaaaggtgctcgggccatatgaagaagcgatgagtcgatgcggttacgatgactaactcagcaagggtcatcagacacaacgactctatgcaactagagacttcagtgtcggcaccggtgcaaaggtcgaatctctcttctcgaaactactttccctgcctttcctacaggtggtaaagtttctcagaaatagatccagtgatggcagctgctaagaggtgaccatcagtaccatcggcggctgctcagttagtggtgaggcctagttatggtacctgtaataccctagaattatgaaatggattagcaaaaccttaactagataattttgtattattgtgaaattatattattaaataatttaatatatgggaatttttatcatttatgacatattaagactccgttggtgagccaggggcattttagtaattttgaccctagaagggtaaaacaatgatattaatttatttacgtgcttatgtgactatattattatatagtatgcatgtgttgtctttttcaggtgtgttttgacaggtgggcgcggtatagtcaacagggtatttcgggccgaacccagttcggggctgaaatacaattctgggattaattattggcattttgataatatgtaaagaatctgaatttttatttgagaagatttatgttgtgttttaccattttgcccttgtataggtgcttatgtgtgttatggtcctaagggcattatggtaaattggtttatttgtgttaatggtagtaaattggattatttgtaattaagggattaattttctggttcatttgcctcaaacccgcccccctctctctatctctttctctcaaaatctatttcaagttagtgaatttttgtgaggaatttcttggtgtgaagcttgatagttgtgggtcttggtgcttggttttgggattgaatttgaggtaatatttcatagcctttatctgtaatttgtagctgaagtagagattgaacattatgctttttctatgctttgtttattcttgattgcatgagtgttaatggtgctagatgttggaattttgttgtatgaacttgctcatgtggggactttcacatctcttcttattggtgttttgctagggctattgttagagattaaattggatctttggccctaattttagttgctggtttttagtgtatcaagttgcaagttcgatgttcttgagtttgagttaaagatgggttttctcaagaattgtgcttgatttgagtagggatgaaatcgtaattttatgttgcatgtatgctgtaattttgagtttttattgtgtgtaatagctccctcgtttataaattttattgtgaagttatggtggttggttgagcatgttttggggttgatttggttgtgttttatggctgaaatttgacgttgggttgctggttttctaggtttagaacctaggtgtcgcggcatggcttttgcatgccgcagcgcacccctttggttgagacctggcaattcgtcccaggtgctgggcagattcaagtgcaaactttgaatatacataactttgtgatccaaactccgttttgggagttctatatatcgttggaaagctcgttccgagctctatatgattatctatattttaaatgccatgtatataatgtatgaatgtgaaattatgggttaaccctatttttgtaaattccagaattgtaactaggattaccgacacccggtcaggagcacttggggatttggaatctctactattgcgggacatcaggtaannnnnnagttagcacgtagagttatgcgcgatggcgcttatat

SEQ ID NO: 116479 - DNA, 1987 bp, Cannabis sativa
cactttgaatagttatatatagtagctctattttttatactaccgtggaacactttgaatagttattgaagcatttttatttttttaattaaggtgctcgaatagttatagtagatactctatattcttttttttttttatcaaaaaaaggatcatttagacttcagagtgatatagtggttattactaattatatatttggacaatataaattattgaatttttttatttttttatttatgttttacaaggaaaaagatatatatatatatatttatatacttataattatggttgttgcaatgcaggggaagtgattatatagggaagattttgttcaatcaatagttattagtaagatatagttttttttttaagtcaaatggtatttgtttagttagtgtttatttatttatttattattttaattgtgagattcataatttccatttttttcattattctatcatttttagctttttgactcccaaatatttggaagaaagttaaaatatttataatacatggaattaattaatttactgcacatgcatgcatactgtttcacgtacgtaaatacgtaccttggttcaaaaaaacaaatacctatgtaacgccctaaatcataaaggcgccacatatgtgtgcttttattaattagtttataataataaactaacggtttaagaaaaaaatgtaatttaattaaaatttttagaaaaatttatttaaattctaacttaaacttttcttatacaaaataccacaaaattcgggaatccccttaattacgaacttttgctaaatactacgaaaccagcttgttacaaaatattattacatattctaaacataacaaaagaaagatcatgtccactgagaaccaaagcatggcgggttaatatgtacattattgtcgggaaatctcggactcatgcgctggtccagtttcccctttctcttaactacaccacacagcacccgtgagtctaggggcggacccagaataaaattataaatttgattctcattaatataatacaagctactataatttattatcaacaaaaaagaaaaaagcattttgtttgtttgtgatgcatatagtcttattctgatttgtgcagagaggagtccaatgtacataatcctacttgcactacaacaaacactacaagaaaattaccctatttgagcgattaagaactcccgtaatagacctatctcagcggttatcgaccgtcgaggatctgattgccgagatagggtaccaatctcagtgattttatcttaaactaccgagatagctgtgcaatcatcttatgggtttggataatctcaacacctagaacacctggaaccgccaagatatgtaccaatctaagcggtcacatcgtgaaacgtcgaaataggtagcaatctcgacactttgaaattgccaagataggtagtaatcttggcgagcatctatgatattttcttttcagtgtcatgaaagtttatgtacgtatgacaacattatcatttcaaatgtcgatcgtcacaaagagttattaaaaacaaataatgtcattttaatactaaatgttgtataaatgaatattaatgacgtaatgtttaaaaatttagcaagtataatgttattataatatatattatttatgatatattattataaatattagtgtatggagttatataaaatacttacactacagcctttagttgatcatatatatttttgtcacatgaattttgagatttttaatcacaataaaaaggtactataactaacacataatatttaaatacgaattgtcacttcctttcaaaaaagatacaagtacgttgtcactaatttaattttagtcacaacaattattgcgactaaaaatacatttagtcacaacaaattatcatttttgcgtataatacttttagtcacggactttaagtcacaacataagaatgatgatttataattaat

SEQ ID NO: 116480 - DNA, 2022 bp, Cannabis sativa
aaaaaaaaaaaaaaaattggagtgccttccttcatgttactatagcttaatttaggagattagagagaattatatagtaataacttgagttaattataattacttggattgtttagagagacaagaccagttttgtcaaagtcacaattccaagggtgccttccttttctttggtaataaagattcatagcaaatgaagcatgaagcatgagtgaatttgtgttgaagcaaggatgatcttgctcgatggcgtcacaatcgtgttcgtcgagatgatcacaagcgtaaaattggttatttttaagtgttaattctggcgttgaaggctttgcaatacaccatgtctaaaaagaaaagttcataacataattaattaagataatgatcatagtaataaagctaaataatttgaactatttttgttacctgcaaagtctctactccaaaacttttacctacaaaataagaaagattattagaagaatagtaactagttactagaaagatgttactttacaataaaattataaagtacctaagtttaaagataacaccaaaaggaatttaatagacataataacaatgttcttatgagccattattgattttgcactatgagaaaataatggaagagaagtatataaggatttatagatgaaactaagatttgggttttgagaatgggaaagatttgagcaaagcaatggtatttaaaggcctctaattaaaatggctcttgatttgggaatgtggaagaactagctggaaagaaagagttttatttttattgaattaaatatttttagcataagatcaaagaattaattaattaattaattaattaattattctctcatagtctcatgtgcatagaaaaagaaaatgatatgtaactttcatggatggaatattgatatactttttgacatggtttatgataaattaataatccaacattataataaagttgaatactaaacttatattacattagggtaaatataactttaatagagataatgaaattttgagaattacttaggtactattcaaaaattaggtatgtactattgtagtgttgaatttagcatattttacaacattgtatttgtactattaatatattttttttatttgtgtttatgataaaatatgtgacacactcacaaatcatattttacaatattgcatttttaactattacttctatgtatatgataattatattgtaggacctttagtttgtatcttgggtagatttttttaccaataaaattaaaatcaaataaaaattacatggtatgataatatgtacacataggattattttttctggctaaaaaaaaaagtggttgctttataaaaaaaaattaataggttttgttattattattattattttgctattgaaaaaaatgaataagtatgttttagaaaaaatacatatataattttaaaaataatatataagttagaatgtgttataaaaattatattatatttataaaaatgtgttagcgagtgaaatttatggtatttagctaaactaaaatttgtgtacaaataagaaaaagtttattaacccgtatagatggtagcattaaagagagcattaaaaatacatttaatcttgtatagaaaaagaagttgtgtaagataaaattattcttaaaaattataaaagagttgtaagtttttatgttgaaggagaatcctcttgtggatgtaattgactcggtttgattaatagatattatctttcttgataaaaaaaaattaataaagtaatcaatttaaaacaattatggtagaactatgtatgtaaacaaattgatggcaaaaatacttaagtaatcaatttcgttatagttaactattagtataaaaaaaataggcatataccattttttaacattttttttttatttttaaggtttggattgcgctttaagttgctatgtgaattttcgtaaaaatgcaaaaaaaaaaaaaaaaaaaaaactttgaaatgaaaaaaaaaaa

SEQ ID NO: 116481 - DNA, 1477 bp, Cannabis sativa
ttttttttttttttctcattttccccattttcatcaatattaatttttaaaaaactataaatctctaactaaaccttcaaatcattatatgctaaagagatattggaggcaaaactacctgaattatataatttataatacttaaccccacaaattgagtttttagtagtaaaactattcgaacctcacttctcctttgccttctccttcttctctaaaccaacggaacccacaatcacccaccaccaccacccacatcacccacatcacccaccaccaccccatctcttccccgtactctctctatccatcacagacttccactctctttctcgaatctcaatcgttctccgtaacaaagaacaaactcacaaataccttacatccttctcctcctccaacctccattaacaaataaactgagtctctgattcgaaacacaccagcaattgtaaaaagttaaagataattgaggttatgattcagaacaagcctggcatggccagcatcaaggacatgcctcttctccaagacgggttgcctccagatgggtttgccccagtccgatacgctctgagcagaaagaacttgagaaaagaagggagatataaaagtttgtgggctctagatggttcagagaattaagaaagaagaaggaagaagaagaaaaaaaagatttttatttttatttttgtaattttattatttatttttcttttttaaacaattttatatgttgaaataattttaaaatgatatggactacgtaaattatatcatgtgtatatttgtgtagtcattagcagaacacgatggcatttaacaatactattttaaagaaagtgtaaatagcataacataagtaaggtttggagggttttaccacaaaaaattagtttttggggttaagtgttacaaactgtatcatgtagttttgctgccaatatccttatgctaaactacattatctctaaaactaatttatttttattagtttttccttcctcttcttagccacgtttattcttagccaaatatggggctctaaaatcctaaccatctaccatgataaaaaatcaatgcagcaattaagtacattcatctatttgtgtaggttgttttgaaccggctcaaacttttaaaggcactagcctataaattggatcatttcccagtttgttttctttttttgtttacatgtttcagaatatgctatattatgtttttttttatatatatatatatatatttatcaatttatattagagagtgtaattatcattttgttatttttattttatttttttacaatcttatacgttcataatacaaataaatttatagctacaaaattatcctcttatagactattattcatatcccccgaactttgacatatatcaaatcatgcctcctgaactttttggccgttaaaaattccctctgaactattgagattattaaatttaaggacttt

SEQ ID NO: 116482 - DNA, 2075 bp, Cannabis sativa
tgacagagatgtagcccagatttttgggtgaactctgaaatatttcttggtgttttctctcccttactttgtttttcatttttcaaaacctaaatttgtgtgtgtggattgagatcctagggttttctactgggatcaagcaagttcttgtgtgaagaacttactctgctagggtttcgagtttgataggttgagtgtgtgatctgtttgagtttagggtttttagactcttcttgagagtctttaaccctgggatccaaacgacacagaaattggtgtcgtgttggttaaacgttgtcgttttagtctaaagtttaattagactaagaaaggtcgattttgaccttgatactgatattaaattgtcttgttggtgtagggtaaaagggtaaaaatcctacagtagtactcaataaatcccaattttcttcttgggaagaaacatatttctagctgtcatacgaggactaaatctattggtgaagttcattcaagatgttgttcctcctttgtggttcttgaacgatgcaaataggctaacaatgtcttgaaccctatgtttgttgaatgggattgtacaagaccagctaatggtttcatggcttctctcatcaataataaaatgcctattaacaataatagtgggatgtcacacaactaaatatatttagaatgtcttgaaaaaaatactttatactactcgtttcttcaaaaaaaaattagaattttgcaccaagctgaaaaggttccatgtctttaaatgaatacttgctcaaagtcaagaagcccattgatcttcttgcttgcaaatgttggagaaatactcagtgttcgtgatcacatctctaccatcttcaaaagaattcctagagagtatgtttataatctcctccaatacaagagctaaaggctacaccgttgctgaaatatttgaagcattattgctagcttctaaatcaagaattgagaaaatagatcaagaaattgatctcattgtgaatcttgcaaaagtcaagtctgatcatctttgaaactcatcttgctcaatttaatcgcaatatgaggcatcctctatcaaatcatagtttttctcatggaaactcttctcagtcatactctaattttctcagaggaggatgtggctatcagtcctatcaacatggctctaacactcgtggatggataggcttgttaaaaagatccatttagttggagggagttggagttctgatccgacggatcgcctataatccgaaacattcggatacttattggatcttggatcagatccgctccgcgtcgcataactgtttctggattggctctgatccgaaccaatttcaatttatttaagaaaaatttaattcaagactcggaccctagactcgaatccattgggacctggacccgaacccagactcggaccgagacctgggacccaaacccgggaccctgaccctcacttgggacccagacccggaccttgacctgggacccaaactcggaccctgacccaggacccagacccggacccatgacccgacccgcactcgaacccaacccggattgggacacaaaactcgaacccggactgggacacagaactcggacctggcccgaaccccgtcgaccccagatctggaccaggacccaggacccaggatcaggactcaagatcaggacctgggaccaggactcgggacccgggacccaggaccgggacctgggacccggaccctgactcgggacttggacccagacctggggcccgtacacgaactcagactcgagactaggacctaggaccgggacccagacctagtctggaccccgacctaggacccagacccagacccaaacccagatcgggaccgagactgggacccaaatcgggacctagaccgagacccgaacccagatccggacccagcccgaactggatcgggacttgagaccaaactcaggactcgagaccacgactaggacccgagaccgagactgcgacccaagactttagacctgaggcccaagacccgggacccggtactgggaccgagacccaaggcccgagatcg

SEQ ID NO: 116483 - DNA, 2721 bp, Cannabis sativa
  modified_base (301)..(304): a, c, t, g, unknown or other
ataatatataagattcttgtacttaaccaaacaatataatttaattaacaagaatatgattacatattaccctacacagttcccaataatcatattctcctttataatattccttataatcaaattattttgaacacctcgtaccaaatgcccctggctttagctttttgaagaatttttagagaagctacaactgaaagctaaagctcctccaacctaatttttagaaaaaattattttgattaaaagattataataaatttttttatactaaaaccatatttacttatttattatatannnnaaaaaataaaaaaaatttaaaataaactaattataataaaatgaataattattaaatctcttttttttaaaaaaaaaaattacattttattttaatattaacaaacaacatcaacctagaatttttcttatatactcgagtttctaatttttttttacatttgataaaacataataataataaaaaaaactataaattatttttatcaaatatgcatataaatttatacttttaaaaaaaaattaaaaatatatatataaaataaatttttacatatttgtgattataataaactagattataatattatcattatcattataatagatcttaacaattcacagtactttgaaatttataatttaccaaatactcacctcagtttttttccacacttctactacaactgttttttctcacagcacagctatagctatttttttccacagcactactgtaacaaactggccctaaatgtataattgatatataataatgtattatgtaattattaaacaaatacaatatctaattttataatttattcctgcatgccgtgcatatataagtacaattgcaagtttgttcgaataaaaataaaactccaaaatggaatcaatagccacaaaattacaaatgctatatataatttatttaatagagtactttaaattattcaaaaaatatatataatttttattattgtagttgatgttgattagtttgtcaaattagtataagtagttaaacatagagacgagatgtgtaatttaatttatttatctatattatattattttttcaatagatatatattatattaattaatattattagaagggacacatatatagatgcatatttgtgtaattaattacttctaatttaactcattgatatatctttttggtcaagtatctaagaagaagattaatttgtcataatcaaaaaatgttacctctttcaattatatatttatggtgactattaaatgattaaaatgtgtaattatgataattatatttttttataatttgttataacatattattaagtgataaaattttatttttagatttaaattaattataatttactatataattaaaataaattgatttttaattaaaatatttaatttgttataattaatatttataatttactttttatttctgtcattatttcttttattttattttcttaaatattttttatttctttatgattttctacttattcttttcttttctttttctcccatttcttatatttattgtttttttttttttttttttgtttctttttatttttctcataatttttttttcactttctatttatgttgcacccttcaaataagtatataaagttatataattaaatttaaagtacccaaaatgataaggtagagagagacccaagcttattaatggaaagggtttagttagttccttggaaggaccacattagcaatccaccaccaaattacaaaagtttaaacttctacctactaacagttcaaaatattataacatccatttgatcaaatatctcattgttatgaatttttctacgcaaatatatgtatctctttcaagtaatagactcagaagaagagtgaggtcgatttcgcaaaaattatagttaagtactaataaattaaattcgcaataaaatttaaggaagaatattaaaatctaaaaaaaaaaaacaactaatttagaatgaaaattaacaatgattagagtttaaggttattaactcaattgtatctatcttatatggcttaatataattaatttctaaatactaatttctatacaatagcgaatttactaaagtaactcatattcacactagaatatataagtctcaacctacatgcaaattcttactcttctgataaatttaaacatataagaggtattaagtaaagaaatcctaaatgatatccaaaccacataggtactttcgtcctatgtcaaaatttgtccctattttactatatcataatcaacactcacttttcaaattttgtatcgatatcataaataattaattgatggtcaaacaattaaaagaaattaagaacgaataaaataggtgcaattaattcctaaactttacgaaaaatatggtgtgtaaatcagtttatcataactaaaatggaaagcaagcaattccttagtacaaccatttcaatttaaaatataaataaataataataaaattaaaaatatggttaaaaatatttataataattttaaatttaaatttctttacataaaatatttacataatttttttcttttaattcaaagttaaactaataaatttaaaaatatgaataaaaatatctataacatgtattttaaatttaaatttacatttctttatataaaatatctatataa

SEQ ID NO: 116484 - DNA, 2320 bp, Cannabis sativa
tggtattcttacaatcaactaatagcttatagcttaaaggtcttgggttcgaacccatgacctctcccttttcccattcctccctcaccactaagctagccttagtggcttatacccctaaacttcttaaactatggatttcggcaccatcaattcttttactgaaattttaggagctaaactccccaaaatacacaattattttgttccttactttttcgttaatttttgactgttaaatattaaataaatctgcatgttgtacatgtgacatgcttttattagtccacatcattttatttatttaaatattataaaattattttttttgtttatttttctttttttttgttctccttcttagcgtttaccacctcaccattgcattgtcgcccaacccaactattaccattgtcgtgacatcactgccaccaccaaccaacaccacccaactcttactaccaccaccaccgccacatcactgccgccaccacaaacaccacctcactgtcaccaccattattatactaaatcaacaaaaattagaaaaaaaaaatccaaaaatagaaatcccaaatggcaaatctaacccctaaacagaaacaaaaacccagaaaatctcaagattaagagaagggggttggacgaaactgttcttcatttattctttaaacgtttattttgatttaatactatcatttactgcaaaaacagtttgaattgaccagttatgtaaacctaatagatacttgctttctatataaaggggtgatccaaatcaaataaactaagctgaaatcattaccaaaagtggattgagcagactaagttctgactgtacactatctcttatcttctctttatttttgctttcatttttatctattttgtagcttatactttgagtactcactattctaatcgagtactcgcataactgttagtaaatattctaatatgtttgaatattagcagtatttggtattgtctaaattcctccgataacacattaatattccatttgtagaggaacttgaaattcatgaacaatattttggctaagaaaatgaatttgtaagaatatgagacagtaacattgaggaagttgaaagttgtgaaaaatcaattttttagctaaatttaaatgaatttttaaggttatataaatgaaatttttagacttcccttctccctaatatctttaatcaaattcacattataatagagatttttgttcaacaacaacaacaacaacaattcattttaactttgctctataccattttcttaatctcattatacatttcctccattcacaataccttttaacacttcattttatgctaaaaatatgtaaatgcttcattcatctctttgagttgcacttgcaaaaacacacacacaaaaacaattaaaaaacttccccaaaaaaaaaaaaaagacccatctttttcttctatatacaaattgggccacatctcctaaaacaggcccaaccaaaacccaaagctcaagcccaaacaacaagaaaacaacaaagcccagcccattcgtatatgtacaaaatttaacttaaaactaggcgcgtttttctacaaaatacacctcattgagtacatagacacaggtgaatcggctgctggtacatcgtacaccctcggatgatcactctccaatccataatccatcatcggacggtgctccaaatcctcatcatgatcatacacaaactcaggtatctctatctcattcctcctcacctgttcccataggtaatcaagtctgctaacgtaccttagcttcccatacaacctaccacacacaatcacaaacttaattaattaaacaattaataccattttattttattcaacataaattgaatctttctacttttataaatgattacaagcttaatttttaataattttcttttaatataaaaaacttaaataatttataacactaacaaaacagaaaaattacttagttttgtggtgctgatttgtactagttttaaaaaataaaaataaaatcaaattattatttaataaaataaaagattaatatcttccacaaactacaaaatagtattggtaaatacaatttacatatttattttgctatccaaaataattatttaattaaattttttattacgttaaaacattctccaaaattttaaaaaataaaaaaaatttaacaaaaccagagttaaaataacatgttacatagttattagattgtttcaacactactttataaaatatcttaaataaataaaaaaattatactaaaaaacttattataccaaaaaaaa

SEQ ID NO: 116485 - DNA, 2963 bp, Cannabis sativa
cacttttagtataattacatattatataaatatcagtattttattaaattgcacacacgtggcgtccctgttggacagggcgttacacttgatctcccaaaaatagatactaagagattggaagaacagattgttgccttgactaaattggtaaaaaagcaaagtggggcattgtcagattcaaaagatggagatccaaaaccctatgtcagaaggattaaaaatcctctccctaaaaagtttaagatgcctcacatcaagttatatgaaggtagaactaatccgcgagcacatttagccaagtacaataagatgatgatagtcgcccacattagtgatgatgccaagtgttaatgaatttccctgactcttaccaaatctagggaagaatggtggaagcagttggctctaggatcaatttacaactagaaggatttaaagtcgacatttcgcaagcagtttattgccacacgtgagaagggcttggaagtcagatccttaaccaatgtcaagcaacaaccttacaaaattcggaaggcttattcaaagaatgatggaggcagccaccaaaacatagtcagtgacgaattgatgctcatggccctccactcaagatttgctataggctccttgttgtggggagagatgcacagaaagagagttgagaccttaaataaattcattggaaaggtgctgggcataattaaccttgaggatgcttatattcaagcctttggagtccccttgcaccaacacctacgacaactactccaagccttgcatcccaaacttctacctcatctttgtcccttctaggacctcaattctcaccgactgtctatggacctactttgtttggtcctgtcccaatgcagacccatttttttgggtactgggggcacagacttggtgcagcatggctcccagacaatccaaagctgaggtcccaaactctaccgcggggaattcaaagagtaagaggggagataagagtcacaatcgtaatgactcagtgaagaaaccgagaaaggagtatgatctaaagtacaccaagtacacaagtctgatagatacttaggagaacttttataaggcaacatataacatggtccattatcgaaagcccctgcgcatgtcaaatggcagaaggaacaggcaagatcagaacaagcaatgcaaatattatggagaaaagggccacacaacaaatgaatgtgaatagttgaaagatgagattgaaatgttggtccgagcggggcatctggggcagtgggtccgcatgatgcttctcggacagtggggtaccgtaaatcccccgtaaggggttatgcaccccaagatcccataacatcattacatgctcttctaactcgaccaacttctgcttgggtggctttgcttgcttcgagacaagaaactccatatccttctataatcgctctattacccgtggataggcatgttgtaaacatttttggtggatcccacctcgctggaagtacccgtaatgcaaagaagagatatctaaaagaagtggaggagggagaaatgtgtgcactggtgcaatctcccacgcaacgaccaaggatgatgaatctcccaattaccttcacaaacgaggaggctcagaacgttcattttcctcacaacgattccttagtaattgacgcacaaattgccaacaagcgagtttctagggtcttgatcgacaatggaagttctgtcaatattttgttcaagtttgcattccaagaaattcgacttactgaagcggatttaactctatatcctcttcagttttaaggtttcaacagtgacgctctaatgcccatgggtgaaatccagttgccaatctccctctagggcgataacaaagtgagtgcgttcaaacattcaaccttcatggtagttgactgtcctacggcttataatgccatattaggccgaccgattgtggtggactttggtgccgtgaattccatttgacatttgcgcatgaagttcccatgctacaatgggttatcagtaccattaaaggagatcagtagagtgcaaggaactactacaatgtgtcaacccgaactgtattcatggtgagggaagaagtgcgaactagaaaacccaatggatatagatgttattttggaagagtacaaggatgagttagatccaagggtcggacttgaaaggaatttacaaccaatggaagaaatagaggaagtaagcaaaaacgaggaagatcctaccaaaactattagggtgggaaagaacctccctccagccgtaagagaggatgttattaatacggttagagacaatcaagacgtattgggctggagtcattctgacatgacaaggattaatcagaatacaatttttcatgcattaaatatccagaaggatgtgactccagtccgtcaaaaaagaagacctttggatcctgttagagtagatgtagtaaaagcagaagttgacaagctgcctaccaatgacttcctccaggaatcattgtacccgtttggcttacaaatccagtgttggtcccaaacaaggaacatggaggatatgcatagactttaccgaccttaacaaggccttcccaaaagattgattcccactcttgtagatcgatcagacagtagatgccacgtctgggtacaagttgctcacctactctgggtgtaattagattaaaatgcatacatctgatgaggagcataccagttctcaaactgacaagggcatctattactacaaggtaattccatttggactcaaaaattcaagagcaatgtatcattgaatggtaaaccgaatacatggaggtatatgttgatggcatgctggtgaagtccaaaacctcttaagagcatggtcgtgacctagaagaggccttttctataataaggaagtatggaatgaagttaatattgggttttgtgccctaaataaaaccctttaca

SEQ ID NO: 116486 - DNA, 3300 bp, Cannabis sativa
gttatgggtacactgaaagtcaagctaatcacacaatgttctataaacattctgaaggaggtaaaaaaatggcaattctaattgtgtatgctggtgatattgtgctaattggagatgattctgttgaactagaaaaattgaaaggaagacttggtgaagaattcgaaattaaggacttgggtgttttgaagtactttcttggaatggaatttgtgagatccaaagaaggtatctttgtaatcaacgtaagtatgtgcttgattattcaatgagacaggaatgatgggttgtaaacctgcagaaacaccaagtgagcctatggttaaattacaacctgtagacttggagaatatgaaggatcgagagctttatcaaagactagttggtaggctgatttatctgtcacatacacagccaggtatagccttttctgtaattatggtaagttagttcatacacttacctggttctaagcactttgatggagtttacagaattctatggtatttaaagggaacacctggaaaaggctcttgttcaaatcacgagcgcacttagaaatcgaagcttattataccgatgctgacttggctggaagtatagttgatagaagatctaccttaggctattgctcgttcattggcagtaatgtagttacttagagaagtaagaaacgaaatgtgggggctagagcagcgtggaagcagaacatagagttgttgctcacggcatgtgtgaaatcatatggataaaaagacttcttgaagagcctgaagtcatcaaattcatctcctctgaagttgtattgtgacaataagactttgattgcaattgttcataatctagtgcttcatgatcgcaccaagcatgttgaagttcacaagcactttatcaaggaaaagattgagaatggccaagtgtgtatgtcctatattcctaccaaagaacaagtggtagccatctttacgaaaggattatgtaaaagacagtttgattttctaactagcaagccggctatggaaaatatttttcagccagcttgagggggagtgtgggaaaatcttttctctgtttgggaattattcttgtatagctgtatatttgaattccattcagagatattaggagagtagttaataggtttattctcttatttaatgtaattattcatttccctttataggaaactttgtactcaatatatacacagtgtatacaggaaaaatataagacagcaactaccgaatattgtcttcaacttcaaacaaagtttctgtactgggaattgttccaaatggtcttgtagagggtttgttagtttttatgtttattgatgactaaattcctttgttttttcttaaggactctttttgttctttttggcgttaagtaggtgtaacttgtaagtagttcacctgttacaatatcatttttgtgcttttcctcactttctccgttgattttaacaaactaaagatggtcagtgtcgtgtcctctaaaatatgtcttgtatatgcaatgcaatcaattgtatcgttatgtttctttgccttcagctctttacatggccagtttgtttgtccttctaatacaactattttgtattaaactgtagggtttggatacgatgaatcccatgttaaccataggtggattgaagttggtgagttaatcatttgtctaagacatgcctctattatctttgattatgacaagttacagtctatcttgttgaaagtgaagttttatgttctttttccctttatacatctcttctgctttcatttttctctaccctcccttgctgtataatttcttaactagaattcagtcgaaacacttggtttagtatattggctctggttttgagagtttggacctgactcaaagtactttttgttcacagattggagaatatgaagaaacagtaggcacatgccttattttcactgaaaaaggtataccatacagtattttcttctgctttaaaatacttgtaaacaaatcaatgttataagagtggtgtcttctaattaatttcttgttccctgagagtttgagacaatattctaaatccttatgttcagtgtctgctccttgaatgatctgttcttatgtttagagggagaaccctcttcgggctcttacaaatgaaaagcctgtaattttttttctgaagcacttgcatatttgcaagtatttctctgtcatacttaagtgtgttcttcttcatactcctctttcattgtttatatcatttgagttcttttaaggacagtgaacttgtttgctggttaaaccaacttgatttcctttgcacatttcgacgctatcgttgacaaagttgacacttttgcttcaactatttttaatacgatgttcttttattttctttttttttctagatgctgaacctttggttcatgaagaaacaggaccatcagaggaaaaccttttctcaggcaaatgcattatagatccaagtgaacctccgacgaaacaggtaaaaccgttgaccagccttcataagattcttaaattcagattgaccattgaggaaactccagatctaggtgcccagaaaattactccgcaaaattaaccacccgaataatattaaaaatctacccaaacaacctgagttttaacactttaatactattagatgggttttggtagaccaactcaagctatttgatgtttacctctactactaaagcaaccaaacaaaattttcttctagcatttggtgatctacatatatgagttgtaagtatagctttatctgtcacaatctcatgtattgtaaggttcatgaagttttctttttcaagtacaaagattgagtttgtggtcctgagttactgtagagacgtatatatacatatatttatacacggtgtacatgtcttttttttttttggtgggggagtgttaaagcattttatatgcctttaggtggaaaatgaaagctcttagacacaatgatcaggccaatgaaataaaaataaaaattgaaagaatgatggttataaatacacccatctttagaagattttttcttgcaattagattatttacattaaggaccaaaaagaaaaagatggttgtacgagtacaataaatacattaatttttcttctttggatcattgtctcactcctaattatgcatagaaaagataataaagcccatttaatctttcttgtattagactattagtccttgaatgcggtcttaccaattatgtggctgacaagtttgactcataagaacttttgttctatttttttttttttt

SEQ ID NO: 116487 - DNA, 1385 bp, Cannabis sativa
  modified_base (58)..(62): a, c, t, g, unknown or other
cgctcttccgatctctttattgatatttaaataataaagattatattgaaatagagtnnnnnttagggcataaaatccaacataatatttgtagtaagtagctcggattgggccaagtcagtaggcttgacagccttctcaagtcttgtgcgacgtctcttagaatcatttataaagttatcctctaactcctcatctaatacatccacatgataagctccaccattattggaaatatttccaattaaagtccccatgatttcttcagtccccgtaattccttttgacttactaggattgacattatgctgagttaatgtgccccgatcataggatgttgattgatctgctgctgcctattcacactagtgattaatccaccagcatgagctgtatcttcatcctcaccgtttctcagccactgacttttgatgagatgatgttgacgacggggttgtgccctcatccacgaaccataggtgggtcatctgctggttttagtctagtaaaaacgaattgtatgtggttgaatatccacaaacttccttcaataatccgattcagatcaagttcttggtaaaattggaatagaaaacgatttggctccagttgcttcacatacatccccttccctagctgccaaagagaagccatcatatggcgcatcacgtcataatcgactgctctagatgtgagaaaacgactaacaatacatagttcaacatttgcaatctcagttttgggctcctcaaaatcaaatgttgtaacaacatcatcttcttcttcaatctctatattatcatagagatcttctatttctttcactgaataattactagaagccatgaacatagacaaaaaaactgtaacagaaagactaaagaaacattctcaccatgtcaaaagataagacactttctttgatgaaatcaacaatttagttcatagctttcttggaactattgtgtttgggttccttgaaaatgaaattcttttcactcaaattatagtaggggaattagttttgaccgaaccacacttctcaaaccaaaccattctcagttcacaattcaaaattcatcgtgttaagtgtgtggaaaatctgagctttgtccattgaagtcattaattcttttacaaatagtaacacaatcattaaaagttagtaaacatatcaagattttaagaagattcatagaagttggattttgatgtggagatgagaaggtgttgttgagtaaaaaagaaaagattgtgtaataaaataagataataatagtaaaagaagtaaaatagtaagtagctgtgtataaaacgaaaaaatatatatgaatagtagccgcacaaaacctgagacgaatgtatacctgggtttaggtgtgaat

SEQ ID NO: 116488 - DNA, 4361 bp, Cannabis sativa
  modified_base (4327)..(4334): a, c, t, g, unknown or other
acaatggaggttcttctgttgccaacaatggaggattgttttctcactctctctcaattcagttggatgaatccaactaccttccatgaaagcagcaagtgcttgctgcaatcaaaggaagtcgattacatagatttcttgatccgaaccttgctctgctccaatatctcactgatgatgatcgtcgacataacagagtgagtcctgaatttgaggattgggaacaacaagacaacatactcgtatcttggcttctttcgtccatgtccaagaaagttctcatcataatggttggatctaattctgctacctagatctggatcaagctgcgtgagtactacacctcccttaatcgagccaagattggacagtacaagactcttcttcaaaacaccaaaatgcagtcttccctaattatcttctcaagctaaagagtatcatcgatactcttacttcgattgtccattcaacatctcctcaagatcacattgaagctatctttaatggtttaccagctgaatacaatgtattcatcacatctgtcaacacgaggacagatgcttatagtgtggttgaaatcgaagcactcttaatggctcaggaggttcaacttgacaaagccgctaaggatcttgacattgccaaaaacgaagctaatctctagctcacaataatgctgaaacaggcaaaggaacatcctctacttccccaaacccttcccctcttggatcacatgtttaaaggtaatgcaccccctttctctcaatctaattcctctcaatctagttaatttatgcttgtttctagaggtacagggtcctccactcgtggtcaatttggcaatttcaggtgaggtgtctctcgtggtcgtggcatctccaccatttggggtcaaaaacctcaatgccagctttgtcataaattgggacacattgttcagcagtgcttctagagattcgacaagtccttcactggacctgaatcttttcaaaatttcacaggacatgttaatgtcaacatagcagagatgcaagcttattatgccacacctgatgttgtcaatgatcctagccggtaccccgattcaggttctatcaaccatctcacaccaaatgagcagaatctttccaccagtagcagctatatgggtgaccagcaagtccacatgggtaatggtacaggtttgcacattcaaaacattggccaatcttcttttgtctctctttttcatgatcacacccttgtcttgaacaatcttttacatgtgccacaaattacaaaaaatttgcttagtgtatctcaattttctcaagataatagagtcttttttgaatttcaccattttcattgtgttgttaaggaccaggttactttgaagactttaattgttgggaagcttgacaaaggtctttacaagtttgattcaaaccaactcaaccttctctccataagcaagcagccatcattatgtttacacactactttcgagtctaatactgctgtcaaataatgtaatttgagtcctctgtcaacacaatgtaattcgagtactctgtcatctacttgtaactcctttgctttgtggcacaaaagattaggtcacccacatcataaaatagttcagcaagtgctaaactcatgtaatatccaaacaagcaataaaaacattaaattttctcatcaactttgctctgcttgttgtcttgggaagcatcacaaacttccctttcctaaatccactgctgtttatactgcccctttacaacttttacattcatatttgtggggtcctgcccccatcaattcctcgtgtggatatcgatactatattagctttgttgatgccttctcaagacatacatggatttacatgttaagaactaagaatgaggctctttccacctttatcaccttcaaaaacccaagttgaacttcaacttggtctaccaatcaagcaaattcaatcagattggggaggtgagtatcaagcattcactcacttcctccaacaatctggaattgtccataaagtctcatgtccccacacacgtgaacaaaatggtgttgtggagagaaaacataggcacatagttcagagtggcctaactctgttagctcaagctagcatgccattaaagtcttggaatgaagcttatcgtgctgcagttttcctaattaatagaatgcccttacctcagctaaacaatatgtcacccattgagatactcttccatatcaaacctgcctacacttctttaaaggtgtttggctgcctgtgctaccccaacgtaaggccctacaacaaggttaaactccaatttacatcacaccatgcacttgcctaggctggagtttggctcataaagggtataagtgtctctcaaaggatggaaaagtctatttatctagggatgttctatttgatgaattaatctttccatttgctcttgaagcaaataacaactcatcccaaagcccctcaaccactctcactctgcagcatggccctgctcttagtcttcgtcggagactcagccaacttttccctcccccagagtctaatcatcctcctcctgcttcacctagcccaagtcctactaatgtttcgaatgttgcttcacctactacttctgctcctattaatatggtttttgtagataactcaccacatgttgcagatcatgaagtttcatcttcaacaaatgccatatctagtaattcaattagacaacaccaaactgagccacaaaacactgtcacacctgttgttgttgctagtactgtaccagtagccatgcctacccctatgcctgcttcagatcagattatcactatagatgctactagttctaccaacttttttactccactaattatgcaaaatactacttcagcctcacctgatcaatctacaccagtagtcaacaagcatcctatgacaaaaagagccaaatctagaattaagaaacctaaagtgctaatggcttctcttattcccacatcagtcaagaaagccctcaatgatcccaaatgtctggctactatgtttgaagaaaatatttctctcaaaaagaacaagacttacacactggtgcctcttcctcttaacagagagccaataggctgcaaatgggtctttaggatcaaagaaaactcaaatggatcagttagtagactaaaagccagattagttgtcaaggggtatcaccaacaagctagatttgactttcatgaaaccttcagccctgtagtcaagccagtgactattcgtgtcatgctcactattaccttattaaaaggttggacatgttagacaactggatgtcaacaatgcatttctcaatggagatctacatgaagacatttacatggtgcagccacctagtttcattgatccagatcacccaaccaaagtgtgcaagttacacaaagtaatttatggactcaaacaagctcctccagcttggtttgagaaattgtctaatgttttagttcaacttggttttacccctgccaaaacagatcactccttgtttactctactcaccactaccagcatcatttatattctcatctatgtagatgatattttgatcactggcaacaaccacaacctcatttccaatctaatctctgatctcagttccaaattttccttaagggatcttggagtcatggatttctttcttggtattcaggttgtttctacataaaatggcgtatatctttctaagaaaaagtatatccaagatatcatctgcaaagctgaaatgcaaggggtcaagacacaaagttctcctgtgaacactgggcttcgattatctagttttggaagtgaacctgtagctgatgccactgcctatcaatccttggttggtgcattacaatatgctaccataactaggccaaatatagcatttagtgtcaacaaagtgtgccaatttatgcaatctccattgcaatatcatcctgtggctgtcaaacgcatcttaagatacttggctgacacacttgacaatggcttacatctgaaacgcccaacatctatggatattgaagaattttatgatgccgtttgggcagctaatcctgatgataggcgatcaacaataggttattgcattttcttaggtggaaatctaattggatggcaatctaaaaagcaacaaactatctccaggtcttcgactgaggctgagtatcgtggccttgcaactgtggttactgaagttaattggcgtcaatcctttctatctgaattgaaacaaactccagctactacccttgttagatggtgcgattgttggaattattttatcaggatctnnnnnnnntaacaagtatgttattaacatcctcaa

SEQ ID NO: 116489 - DNA, 1938 bp, Cannabis sativa
atatttacaagttatctgatccacgtgtccctgtttaactggtccacgtattttgggcgaaatcaggggcaacaataataaagtaggtggtttatttttctttttcttgttttgttttgggtgatatgaatgttgttgggctgatgtgcaagctcagtttatttcttattttgactctattttcctaatactgcctacttccatgaatcgtcttcttcatttggttcctctaaaagtctctactgatatgattttatgggagcttcatagtaattgcattgtattttaaaatacaaattatgtttggaagtcaagtggtacatgtaaatttctattatcatatttgacataataaataaattaatattgtgtaatatttataatttttattattttgtaacaaattttaaaaataaattttattaaaaatatttacaggaatttttcctattataaccaaaaaaagaaaaaatattataattttacattgggtcgactattttaacatttatactacccatataaacaaaattacttaaataacttttacacaaaaattcaagccatacgacccactcttctcatcctcgaacccttcgtgcaatcaaaccaggatggcaacagcaaaacaacctaaccagacgaagattcagtgttaattccaataacaagacctaagaagaagagaaaattgatcaaaaaatcaatcattaccgattggtaaaaaaatatgcagtttgaaacacaaattaaaccctcaattacaattcaaattttacaaaactaatcctcctatattcaaattacagattcaaaaaatataaatttgaatgaataagaactggattttctgaccaatccaaattaagtataattcagaatacacttatcactagaagataatgttataagtgttgcattatatttattttctaaaattttaatcttgtatttattcaattctaaacacaaagataacaagaaattcgtattcatctagcgccacgcatctgaaatatagattttaatttttgtttcttcaaagatgcataagagttggattttcattttattcacgcacggataattgaaataacattaacaacaaaattgataatgatacaatagtttttctcttatttgcagttatttcatatcgacaatacaaggcaccgtgctcgtaaaatatagttaataatatggtcacttttttgtatatttttgattggttgatttaacgttggtttatagtgtttgaacagtttttatccacacacaaaaatgctaacatgcaattgattgttgatcaatgcaaaatgctgacgtacaaacatattattcttttggagagaaatttctatttgggcatcattccactgcttagccaaaagctcgcaatggtcattagacttacgaagctcccatttaagctagttgaaatttgaagactctcttgttgagtcctaaaggtcaagaaggaagcctacgtagaaatgaggtcagaagaaagaagtaaaaaaataacataaacaaataataataaaacaaatattggaagttggactaaccgactgcatgaggtcaacactccttgccaagagacttgtatagtcgctattgttagtcaaatcccaatcatcttgttggaaggtcctaaggtaacgccaattttgcgaagcatattgcgagcaggtctgagaacccttaatacttgcatgttttggcaggggcaggagggttccaagaggaccatctatggttgggtcgcaaaaagcttgacctgatggacagaccctaagggttgtccatctatgctcgcagatgctggtgcaagagtggagttggctggagcgactgcctcaaactcattgatgatgatagccgagcaagtcttcttcctattagcccccttccaatttcttgatgaagaaaccggtt

SEQ ID NO: 116490 - DNA, 1032 bp, Cannabis sativa
ctttataattgctgaatttgttagcgatattttttaaattttattttcttaagttatatgagatttagtacttaattacactaataattgtatgatgtattacctatagaaagtattaggtactaatggtattttttaacaattttttttaaagaatattactagccaataataaagtgtcacttatacaagtgaactcaatataaatatgaaaacattccatagtagaatatgacaataaaacttgagaaataatttcagataagggtaagaaatttctcctttgagaaatgttgagaaagaaagagagatgtagtgtgggggcataagtgacaagtatattctatttgtttcgagcttgtacaaggagcatataccaaatagccgcacaaggttttgccgataactctaagaataaatggatcattcttgttttgttcatgtggggctccacttttggatcctattaaatggtactcctacaagtgttcatatcttgtcgcttaccattcatctatgtctttactctttactattaatgtgctttatttttagaagaataaaaataaaaactaatgtgccttcattacttgcctttgcgtacatgcttaaccagaaatgaataaaaggccaggagtgagtaccacttttttttttcctttattttctaacgtttttaaaaggggtttagtactattcattttatcgagtttatactataatgaactttgtgttcttatactattgctagtttggctctaaattgtgtatttaaaaggtttaggttgaacgctttcagaaacttacaatgtagttaaatttatgtgtaatttgatatgtttgtataattgtgtaattaaaaataactgagggatttcaattactcttcaattctcataatctctcgtgagaatgagaattgaatgtaattatactttgtaattactaaaaaaaattattttaaatataaattattaaaaaatattatttcgtgtgtaattactattagagttcccgctcaaatgattttaa

SEQ ID NO: 116491 - DNA, 2515 bp, Cannabis sativa
agacttttatcaaagaattaattacgaacatcctcaagttcaatatatatattaagaaaattttgcaaatttaatcagagttcaagtaaaattatttctgattattgtaaacatgacaactcttaattatataaatcaaataatgatagaaaaacaagatatcatattatattattataattattttctattttgggaagtgcaataaggactaatttgatagttcatatatatataaatatatatatatatatattatccttttctctcttttttttattaaaaataaatgaaagatatggaaattaattatgaagagtaatatactataaatgtttaagtttagcttacaaatgaatacatctaagttatatttctataatttctttaagtatttgaccgataagtatcaagttaatagttatgtggctgtctttaattaatccaggtcattatattcttatttttatattaaaattaatttaaataatcgataagacaataacatgtggataatggcttgacacgtaatagtgaggtacttacgaaagttctaaaaatataacttaggtatgttattattaaatattaaacttaggtatttatttgtaaataagaattaaacttaagtatttacaccgcaaattactttattattaatccaaacacaaataatgtttattgtataaatatatatttaatatatcattaacaacaaaaggggcggtggcgcagttggctagcgcgtaggtctcatagcttagagtgatcctgaggtcgagagttcgagcctctctcgccccatttttcgcttctttttttacacataatttttgaaaagatttaataattaaaatgatcagaatattatttgtttgttttctgagaggcattatcactattattaattttttttttaaatactacttatttttattaggataattgactgtatgataatttaaaaaaaaaattcttctattattctaaaaaaatatttatgaatgaatgtattttaaaaatttgaccaaaaaataaaataaaaaataagcatgttaatgtaaacaataattaaattatttttttaagacaaattataaacatgaaattcttaaaattaatacaaataatttcagtcagtgctttctcaaaaccgaaaccaaggctaagcaatcaaactccacagcataaagaggaagaccaagagtgtgagaccaatccgacattaccattaatgctaaaacttctacttaaatgactgaaaagtttcctaaaacagctataaagcaaacaataaattcaaaaaagaaattaagaaagcaaaaagaccaactaataaaagaaagatattaacataaagagaaagataaacaacaaagacataaacaatgaacatgcaccggagagaaatttctcccactccatgagtccatcacaagaaataaattacaacatttagcaagaaaactacaatacctaacagtaatattataagcacagtaaagatattaaatactaaagaataataatacttacctaaaaatgatagaaattattaaattaaaaaggtgaaactacttctcaagattgggcaaaacatatgccataaaagggtcaccctttcttaccctcataagaaaaattaccacataaataatcaaagcagaaaagactacacaaaacattaatgttataaaactataccaaataagaatttacatagacgtccgagcacattttctgtagtatctcgaactattgccccaatatctatagtattagaaagaacatttaacaatgcatcaacatttagattaatccatcgttctggagacatgaaatttaactccttagtcataagattggatctcgaacattgactatactcattatatcaggatattggctttacgaccatgaacaatttgattccttcctcccaaatattggctcggcctaattaatggcttactccaattcctctaagaggttccactctgagcaagaccctttttcctctctctctacttctatatttcttaacttagaaaatgagactgaacttcaaaatatataggtattaatctgtaaaaaaaaatatcaaaaaaagcccttagagagacttggtacaaatcttaataacccacacaattcttgcaagttgttagatggaacaattagtaacacaccacacttcttatagttatttgcctcaaaaaaaaaagaaaaaattttccaaaataaaaattttagaaatcttattaaaaaaatatgtatgtattttttttcttttaggctcttgactgccataaaaacaaacatggccggctttgtaactcttttcatcttggtaatggtaatgggtacatattaagaaaagggcaaactataacagtagaactaatcctctttagccttaactaatgaagaccatatcaacacttttcagttgtgtattcctaccatatcatacatatttttcagttgtgtattcctaccatatcatacatatttt

SEQ ID NO: 116492 - DNA, 3362 bp, Cannabis sativa
ctctctctctctctctctcgcttagatctttctcttccccttcttcgttggtgtggttctcattgaagacctcaagctcaggccatcaccgacgttgatagtccaaatggaccctgaaagcgagatcttcaaggcctgaaaactcaatccctctccagccatcatcgcattagatctctctctttctctaactctcgatccctctatactctctttggttctcagggtaagcatgaccaaaccagtggctcccatctccaagcgtcactttgaatctgagattgctgccatgcacagtggttctctagttagggtcacagataaagactattcacggtactgatgtctcatttcaagctactattaatattttaaaacttatttttggagtataaaagctaaggggtacattttgtttaccacaatttcattatttgagtttgataatcatttgtgagtagatttattgtacacaaatcttgtgtttgcactgtactaattatttctatgtgttatgagattttttggttgttgtagttttatattgtagtattggactaaaatattatgagaaaatgttaaattgaatgatctttttattttccaattgttttgattaaatctgagcaaaatattctttattattattattattattattattataattggaattttattaaaaaaattcatagagatataatcatgaaactttgcaacccaatattaaacaaaaaatattataattattattttaatataaataatatacaaattatgtaatattataaacaaaattaagtttatagcattttaagttttataatttaggaattactagagactatttttaacaattactttcttttttcggaaatatcccttttagtgtcaattaaaagccgacacttataccaatcagtctcagttttaaaccgacactaaagagaaaaatatatatgtacgctttaagtgtcagtattaaaacgataccaaaactcattcgtttcggtttttaactgacaattaaactctgactttttgtcagagtggaatgggtgtcggttctttgaactaacactaaaggtataaatctctgtttaaaactgacaccaaaagttctgtttgtagtggtggatagctctttctagctattccactaggagaaaaagacagaccaagagaataaattactattttacccccttcttcatccttaagtaaccttaagacttaggggtaaaattgtcaaataccaccacttcgtcaaaacatgatattcaaaatatcaaatctacttgccccgctaaacgtaaggttctaaaccttaccaatgtgactctagtggccaaattgtcgcattttcatcattaccgaacaaaaatcataaaaatactaaattacacatatagcatatataatacacttagagtttaataaaatttctagaattaataaattataaccctaacacctatttcttgtaaataaggcccatataacaaaataatcacatatagtcacataatataattaattaatgctaattgccttactaatctatattctaagtatgcggtcattacaattatcccccattaaggatctcattcttgaaatctaacctgaataactctagatattgagccctgatgctggaatctaactcccaggtggcttcctccaccttactgttcctccagagtatcttgaccagcgctatggtcttgttctaaataacctttacctttctatcgaggatctaaactggttattcctcatagcaaaaatctgactgtagttctagggctttgtaactcaagacatgattcgggtccgatacatacttcctcaacatcaaaatgtgaaaaaaattatgcactgctgacaatgttggaggtaaggctagcctataagctacctgcatgagcttattgagtatctcgaatggccctatgaacctatggcttagcttgcccttctttctaaagtgctttcaactcttcattggtgagactcgtaggaaaacatgttctcctacctaaaactctatgtctctgctcttaggatccacataacttttctgtctgctttacgaagtaagcatccgagccttaattttctctattgcctcacgagtcggttgaactaactcaggacccaaatacttttgttctccagttttatcctaatgaataggagaacaacatttcctactctacaacatttcaaagggagccaaccctattgtactctgatagtagttgctataggaaaattcaatcaaaggaaaatatttactccatgaaccctcaaagtccattacacaggcttgtaacaaatcttctagtacatgaatcgtcctctcggactgaccatccgtttaagggtaaaaagctgtaccaaattttagctttgaacccatggctcttaaagactttccctgaaattgaaagtgaactttggatccctattggaaacaatggattttagacctccatggagacgaactatctccttcagatacaactctctgtactgatccactgtataagttgtctttactggcaaaaaatgtgttaattttgtaaaacgatccacaacaaaccaaactaaatcaaacattcttgtagttttaggtataccaactacgaagtccactataacatcttcccattttcacttgggaagtgtcaaaggttgtagtaaccctgctagtttctgatgttgcactttaatttggtggcaagttaaatacttagacacataattgactacatctttcttcatcatgcaccaccaatagtaaggttttagatcttggtatattttggtggtacctggatgcaatgaataaggtgtagtatgagcttcatccaatgcatcttttctgagttcaacattgctcgaaacacaaacccaagttttataaagtaacaatctattattcaagattgagaagtccttagcctgaccagctaatacctcctcttgaatcttgattaactcaaaatcttctgattgcgcacatttgattctttctagcaaatcagactgaagcattaaattattaagtatgcctaccacaaactcaatacataccttaatcaagtctgacgctaatagaggagatcattatagtattgaaaacctgctggggattttttcttcttaaagtgcctgacactacgttggctttcccgggattatataaatctcacaatcctaatccttgactaacttcaaccaccatatttatctcatatttaaatctttatgattaaagaagtacttcacactcttgtggttggaatagatctcacatttcttgccatacaagtaatgccgccaaatcttcagtg

SEQ ID NO: 116493 - DNA, 1039 bp, Cannabis sativa
  modified_base (1000)..(1013): a, c, t, g, unknown or other
gtcaaagagaagaataaggaggtgagtaaaccagaggcaaatagagggcctgttgtagatgctgatggatttcagaaggtttccaagagtacaaaagagagggggaaggaagtagtttctgcagttcgtaccataatgctttccaatccctatctttgcaaccaggaccattttgtgctgttgaagtagagacatcggatacgcaagtaatctcaatcgggagtcaagagattgcagcaaatgatcatactagaggagggggagatccttctctccaatatggatagaatccttagttggaatgtccgaggactcaatgaccaacagaagcaaaacacacttaagaatgttattcttaatcaaataattgggttggttgggttgctcgagacaagggttaaggcccagaagttgggggctttatatctaagtatgttcagaggttggtgttttacttcaaatattgcttggcatagagggggaagaattatagtagcttggaatccaaatagtttcaatgtaagcatattgaagtgtactagtcaacttatccatttgcatgtttctacagtagatggtaagtataatttctacactacttttatatatgctttcaatgacgctaatggaagagctgaattgtggaaggacctacaagaactggttgtaagagaggaatgggtagtaatgggggattttaatgaaataatgagcaaagaggagagaataggtgacaaagtgaagtacaaaacagcagatgattttatcaatagcattgaagagagtaagttggaagacctaaatcaagtgggagatttttcacatggtgcaaaaaaggcatggcaaggaaggcataattcaaaggcactaagaagctaaagaaatagagttgaagcaactacttgcagcactccaggaagatctacataaagagcccttcaatacagacttacaggagaaggaaaaggacaatagggagtgttggaaatattttaccagnnnnnnnnnnnnnnaccaagtatgtttgattaacatccta

SEQ ID NO: 116494 - DNA, 8167 bp, Cannabis sativa
  modified_base (2549)..(2559): a, c, t, g, unknown or other
  modified_base (3286)..(3290): a, c, t, g, unknown or other
  modified_base (4171)..(4178): a, c, t, g, unknown or other
ttttttttacttttctttttgcttatgactttgctttttttttttcctttcattttgcttttcctttttgtttgcttcctgagtagttggtcatcctcaaaagtatgagccagagccacctatcccttcgaagagtgactaagctctaagggtgaaaagactaaaatgcccttatttccctgcaaagttatctcgtaaccctaggggtaaatggtccaattatattatttcatcaaaccccgatattctaagatatccaataatattgcatcgtaaaatacttgatacaaatttgtgtccatgtgactaaaattgtcattcgacccatttccattgttaccgggcataaaaatgtaaaaatatgaaaattcatagatagcatgcatattacacatataattcaataaaatctctgaaattgtgaaataataatcataacacatattttcatgaaaatagagtctataaagcataaaatacataaataatcacatagtcatattaattagtgctaagtgtcccactaatccatgtctaagtataacggtcattacaatgaagacatggagcaacctaatccaagccccgagagctaaaattacatgaacttgcaacctggtagcaacctgggcacctagggttttacctagggcctaggttgacatccacaactagggtttcagttttcgggaccgtcttagtgcaaagtgttcaaaacatgcattgggacatcaactagacatatcatagacatatttgatgcatcagaatcacaattagagtaagttgattttcgagcacctagtgtcctcaggccctaggcacctagggcccaagttgacgatttgtcaatctgggtgccttccaagtgttcgatcagagatctgacttttgtatcatatttgtcttcatcaaaatggggaaatagatccttttgaaggaaaaacagctattcttgggccaaaataacaggcccaccaccctggttgacacctagggctagccctgcacctaggttgacattttgtcaacctgggccatttaaaatggagtttttcaggaattctttcgaccattttcttcatcttcagaaaatattaagattcaactatttttggagaccaaacaaaatttttcgaaggaacgaaagcgggacctagcgcccaggttgacaccttttgccaacctgggctatttttgatccagttcagcaaaaagtattctagacatttttttcgtcatcaaaagtaatgaagatttaagtaaacttggggagaaaactacaatcctgactccctggaaatagggcccagcgcccaagttgacctagggttgagccgagtgcccaagttgacaatcaacctaggatgctaccctcaattgctcaaatgccaaatccgatgcaaccattgaatctagaatggtcaaaaatggggtaggagacctcgtcctcttgttcagaagccttggaagtgtcataaatgaaatctcataagcttgggagaaaggacccaacgcccaggttgacaaatggcctggtgcgctgggttctgcttatcctaatctgatgtcgttttggctgcccatctagtttttcacaattacaatgatctatcaagtcaagggaatcaaattcacaactttacatttctcatttctagcactcccgaaaatgaagagtttcgagtctcccatttctgcaagcaacaacatctccgagaactggtaaccagctttgccagatcatgtacatggattaagttgtgtcaaactatcacttaggcatcttaaaggacatcccttacatgtttctacacttacctagcatccaggttgacgtcagatgttaacctgggccctaggatgtcaacttgggcattggatgttaacctgggcactgagacctgagctaccttcagttaaatggccataactcaatttttatccaattgatgcgcttcaacttgaattttgaagctatttaagttctctatcaagtcatgtttcacactccatatgtaattttaaagatattttcatcaaaattcaccctaaggaagttacaaaaataagttgtgagttacccgcagcgggactcgccgggcaccaaaaattggccatcaccaccaagagttaattttcaccgttagatcaccatcaacagtcaaaaatatcttatttgtattttgtcctatttttgtgggccttcctcacttataaaaggaaagctcccttagctcatttctcacattcagaaaactacccacaaggtcagagcttctctctagagtttggagtttttgatacttagtctatttctataattaccatctcatgagaaataaaaactcgaagtatacatagtcccattacaatcacgatataaggggtgaactactataaattggttttgtctctcttaattacttaactacttttattcattctcgccaatctagcgattggtgtggcttagaagtctagtctagatttttgagtcaagaatatgatatataaattttattatatagtatatcattttattttannnnnnnnnnntttagtttttattttattatatgtaaaggtggtaaataactttgtaagtataggataattggttgtatataattttgttaatatggtatatataattttatttaataatattatattattttatttaataatattacattattttattttatttttttattgtaggtatatctattttatagtaaggtatatatttttttgttgtgtattgtaaatcattgtttaagattatgtttagtttctttttattatatataatgattatataaattttctagtatgatatacatatttaatagtggtatatatcattttataagcatgatatatataaatatatatttagaatattaatatattaaatttagtattgttataatttttttgaggtatacaattttattactacggtatattaatttttagtgataccatatattaaatactgttgtatatattttaatgatctaatacatttattcgtttctgttacaatatattaatatgcaatattaaaaaatttatataacttaatttaattattatataattttttttaattaatatgtaaaaaaatttaggggttttttttttttatttttacactttagagcatttttttttttttgtatttttacgaaaatccacatagcaactaacaaagcaatcaaaatcaacatagtaacccacatagaaaccacctgagcaacccaaaccgtaaatttannnnnaaaaaaaaaaagttaaaaaattatatatggagtaaattccccttaaatttatcttcataaattttattagttaatttattatatttttgacaattttattaaaaaaaaaaggatatttactaaattaattctcaaatttaaatgtaccacatgtatatctgtatatactggaacatatccacttggatacttaccagagccttttgaacgaaatagtaaatatcaaaatagaagtagagtttagagaattttatcctcaaaaaattaatttatgagattaagtataacaaaatataaattaagtcgtattactttcaatatctcaaattaaatttattgtattataaatttcaaacaatattatatttgacacgaaattaactagagaactaattttttaaatagtgctaatacataagagtacactactgttttagtagttgatggtcaacagtttatttcgattagaaaacaagaaactaaccattcattcttcgtatttcttaagatcttgtctttttccttgttggtgtctttgttgtcgtttcagaattgttgaggtatttgttcccaatgcacttcaatgcaatttcacttcaaaacaaaaatgcttaacatgaaacctaaaataatgttagcatatcttataagcttaccttagatcataaaagagagcattactattttcttccttcgagattaatcttaattttacaatttcacgtttataatgtgactaaaatagattttttctaaaaaaattactaacatagttgatttgcattttatgtgcaacattttatataataagcatgaaatctaacacttttgtattttgtttttaacgcttcattttcaccaaaaataataataataataannnnnnnnataataataataataataatctacaattttttaaattttctttttattattgtttttgttgctaaaaaaaaggcaggttcggaagaaggtagtggaacattgtggagaaaagaccacgtattgccatctttgattatcatcgaacctaatagtatcatcaagatgaagacatgatgagagatgggcttatcttgaaattgctagaattctcttccttaatcttttacctttttttaatattacaattacaataccccaacaaaccagaacactcctcccatcactatatatacccttgagtgtgtttatactccaccaatatccatagtgaagttgttaaatcatcaatttaattatttcttttttcaaaatcttacattttaagcttaattctctcaacaatgtctctcattcccagcttttttggtggccgaagaagtaatgtgtttgatccactctccctagacatatgggatcccttcgatgacatcttcagctctacacgggctgtggtgccttcatcagcaagagaaacatcggcatttgccaacacgagaattgactggaaggagaccccggaagctcatgtttttaaagctgacctccctggccttaagaaagaagaagtgaaagttgaggtggaggaaggaagagtcctccagataagtggggagaggagcaaagaacaggaggagaagaatgacaagtggcaccgcattgagcgcagcagcggaaagttcctccggcggttcaggctgccagagaatgccaagatggaccaggtgaaagctaaccttgagaatggtgtgcttaccgttactgttcctaaggaggagaagaaacctgaggtcaagcctattcagatcactggctagagatgataacttggctcactgagatgtttcctcatactggtttatgttttgtgttgatctaaataatgtcccagtacttgtgctcgtgtgtgctagagttgttttgttgtgtcagtatgatgtgtaatcaaagtgtgtgcgacttgttttttcagttaatgtaatgaatatttaattttcttctaatgtctatgctttttctttagtctaaccaatttataatatactagataagtatataaatatacatactttctctacatgcaaaattaccatgcccagataaaagggtgttcacaagtaaactagactaactagtaatgcacttgatgcgatgtcatccttttgatgatagaaactccttcacattgtgcagaatgcctttatcatatggatttgtaaaccacacttcagtggagccatgccctggatggaaattttatttatttatgtaagggtgaatgtttaaaatacatgatcataacctataattgtgcccaagttagattactgctttgaaaacttgaaatgtttacctggttggtgttgcattattaactggaattctggatacttgttccaattaatctacatggaataacaaagcgatcattgctcattagaatttgcacttcaagcaaccaagaacagattaaatgatttaccagtagagaagagtagagtgtttgattatcacatagcaacttacccactcatcagttctgatattgaaacatatgcaatatgcatgccatgtcaaaaatggcaccttccataccaattgaagaatagcaaagattcttaaactaacagccaatctttcagagagactagcctattcattggtggaacaacaatatattaggcatggaagcattcgtgattgatgctgaaaaagatctagaattgattcagtgcattttatacctctgaactgtgtattcttgagatggtgtctgaaaatgtaacagcaatacaatcaagcaatcatcaaagcctatgttaatacagtgtgcgttctgattcttgaaaatatagatatgtgagtacaatagtttacagaaagtacaaatatgttccaactaatatgctttattcatcaattttgatggaaaatgaaaaagatctccatactttccacgtgtgttcagaacatacaatcaatcataacttacagtcagatgagcatgccagaaatgaagcttcagtaacaatgaacccaagcaaaagagccatgaaaacaaggtaattcttttgacctgcaaacgaaaccggtaaagaatgtaatgtggtttaaaaacaaactcaacatcagaagttgttaaatttagtggccaccttcaaggaaatagcagcatcagaaatttttggactggtttgaaatctaaatgtactacagttatatttgaatcattaagcatgacatctttatcattacctatgcagtttccaaaagcaggacaatgatggtcaaaaccttttatgtatgccgtacagttcctgcaatatctcaccctcctctccaaaatagaatcctaaaagaaaattaagtaaagaacattcagttttacaaagtaaaaataaaaatacacagatgcacagatgcacagctaaaatcatattcgacctgattagaatattttaaactttcccatcaataattaatatgaaatcaatttgaagagtatattccaccacattgcttctatcttcaacattcaccacaacaaaataaagaactgaactagatttgattaatagagatgctgtgttccttcagattataagggactaaagaagattacttcagccgattcatgacttaagccacttgctaaaagctccaggtcctgcatattaatcattaagtcattagtggttgtacaagcctacagtagaatattagttagctcagctcaaattatcaacctcgtccagattatttagttcatcaactgaaccctctgttggtttgtctgaaaaggaaggcacatgccttaccaccccaggatcactctttaacatactgccaataagaacatctacattagtagttcccgatctttccctctttactttacagaatataataacagcaaatattttatattcctattatcttggggcaaggggtacagtatacaacctacacagaccaaagataagcatagcaacttctccattaaacaagatatccataaaaagtgatacacctgcaacaaaaaattgagatcaaaagcttccagattatgattacccagttaaaattttcaattttagcaatacccaaatgaaatatcagcttaaactatacactattataatacagagcctcagaaacgtctaattatatgtataaaatagtatattaataatgaaatagtacctttccggatgataaagacataaaaacaccaaatgaacagtatattgaagaagacgaaagctggggcagaagcatgaataccaagaagtcttctgaaccatcctcccaaacccattacaagcagcagcactagagctgttatagaatatcaaaacgacaattaaagacaattattttcaagtttccttaaaaattcaacaaacaagtaaagttgaaaattgaaaataaaagaggacctgagagtgagagttgaagtagaagagaagaagaattagagaagaatcgagtcaccaatgagagagcaaaataagtgagcaaaaccatgttacatgaaacgaagcagcgagcaattaagctcggccaagccaaattctctcttcttctctgattctgcagttgaagcattttcgtgcaagaaaatactttgatttttgtagatgttttctctcgttgacaagtaccaggtgtggaaacgaagaacaaaagaagtctaatccaaattccaaattccaatttgaacgtacgtcgtcgtttgagcacaattgtatggattgatttctattcattttttttactaaattttggaacaggaaaaactagggatgcacacggggccgggaattggcagggagtgctcccccgtccctatccccgttaagaattttaatccccatccccgtttattccccatcggggatggagcggggaatcccctaatggggcgggga

SEQ ID NO: 116495 - DNA, 1304 bp, Cannabis sativa
gaatctattcatgattttgtgactgatctagctttattagatcttaatttcaataatgatttattattatatactacattaattattcaatatccaaaacagattatatatgacagatatatatttagattaattagaaactattctgtgattatataatttagaattagagggtgagatacatatgtctattattctagctagtatatgataaacatataggtgggtaatgacaacatcaatcatattattcatgaatcatgcgatcttaaggaagtggagtataagtaaactcttgccgactgtatgacttgctgcctttaagagcattgatttcgataaattgtgaaaggaattgagaagcccttcattatttatttgcttaaatattagtttgacatgtgtaatcttaataagaataactaatgaatttttgtttttatgattcctgaaataattatttaaattaaataacttattattataatgtaactgagatattttaactaatacaaaaattgtttgaatagagcagatataaaaactcgtaaaagtaaaagaaaaaaaaaaggacggagacccactctatattaactaaatatttttttcttcttcttttctttttctctttcccccacagtctatctcagtctatctctctcttctctctttatatctctctcttcaaagtttcaaaagaaccgcactatatataaccaccaccggtagtgctccgacgaggctttttttggctaccgtctgaccacacttgcctgagcattagactccccacatgccgatgatctgaaccccaaagcaacacctcttcattcgctaccattagtgagaaatctcgagtcaaagtttggaggttcaaactttgaacgtattttccaatcaacttcagtttttgtttgatgagtcgtcttcaccacaagactcagcttgtcgaggaaaaccgtctacactaagtcatttcacccaacttgctacctttttctagtgatgttttcttagcgctgcccctttctgctaactttttggcgctaccatgtatcatcttgacgaatgatttgcgtgggtatgatctacttgtcaggtagttcttttgatatatactacccctatatgtacgtatttagtgagattttagaattttaaactttaaatataatcatgtaatatgtcattaggctaagtttttaatgtagaattgaatcacgatagtatattgtgttagataaattaacaattaacccaagatctattagtatataacatagaacacaataataagatataat

SEQ ID NO: 116496 - DNA, 653 bp, Cannabis sativa
atatatatatatataaaaataggtataaagccaaatgatggatcttacaaggtatcggctataaaagcagctataaaggagaaaattcgatacgatccaatagtgagatgcgtggagaaggagaagctcaagttaatattgtatgagattttcttgtgtgtggctaaagatggaagcaagtttgaggagtgtgaaacatcaaaagaagatattccaattccaatagatgaggaagagtatgaagcttctacatgcccaaatgatggtacgataatttttcttaagattatttggaaggaggataactactgcaaaatgatgatcatgaaataataataataattaagaaacataaaaacgagtactattactactactgttgttgttgtacctaataagctagacttgttataaagtccagtccagtccagtcatgaacaatcaattaatgtactataatatgtgtggttgttcgtaataataaataagctctcctactaagggcacttaattaagtgtgtacgcaattacgctcaccatatatacatatacatatggtatatatactatataaggaagaggtttcaatggttacatttttattgtaaccatcgtggttacattttttgaagtcattagattactattaaatg

SEQ ID NO: 116497 - DNA, 1189 bp, Cannabis sativa
ctgtctagcttctctttctctacaaggtagtttcgaaattatctcctccttttcttcctcctcacccatcatcgattttgatgttgtttttgtaactatttcttccgccattaaaattgaactgtaacagctaaagattagaattttatatttgcaaggattcaagttatatgaagagaaaataaatggattcccagaaataattttctgagaaaaaaaaactagaatagatgatactttcttgtaggtggagaaattcgacctcggtaatggaggattttttttttttaaaggattaagttcgcgaagaagatgaagaatagtgttgatagtcctttttttttttttatatatgcaatggaatcagtataataacgatattctgttaaaaaatagtatacgtgtattaaacacgtcaatttatttaagagtattttaaagaaaaaaaactgtctacatagttaatagtatttaagtggttagttgagttggcacatttggattggtttaatatattatgggatcttgattcaataagacgttccaaaaaaaaaaaaagttatatttacacccgttataattataactacactcattactcatatactatttttttaactttttttttcttcaaatttacgatttagatttttaaagtgatttctgtcgtggtttctatgtgtattgctatacggattatgattgcgatttattttttatttttaatatgttatatgtataaaaaaaaaataaaaaaaaaaagtaatcgggttggcgggcggcttcgtgttcaacccgaaattcaatgattataaaaaaccaacccgcgaatccacccaaaaatataccgagttggacccgactcacccgaacagaacgagtttttttaattttacgggttaaccaggtcgagtccgagcaggttggccgaattcgaatcaaacccgatcaatatgttcaatcctagcaccgagtgatcttatattaaagtttaataacatatattaaataaaataaatatttttacaaaattatcttttaaccattttttgtataataaattaaatataaacatgatgattgacaacataaattgatctaatccaatgataattgatcgatctaattataattgattgccaaacattaaatatccaattgtgatcgaatcagattagatgttattttt

SEQ ID NO: 116498 - DNA, 1807 bp, Cannabis sativa
ctttagttttggtgctaggtttatcggcttcattatgaagtgtgtcacctcggtttcttttcctgttttgcttaatggggaattcgaagcaatttggtcctaagaagggattacgtcaaggtgacccaatttctcttgatctttttgttctgtgtagtgaggttctcacttgtctcctcttgagaaaggaagagttaggatgtcttattgggtttaaagtcagtcaccggaaccctcctattacacatctcacgtatgcgaatgatacgatggtttttgctgggctaattttaacgagattgcttctattcgagaattcctcgacctcttttgttcttggttaggcgaacggttaaatgtgcataaatttgctttgatttttgctgggctgatttgtgtagctctttattggaagagtttgattttcattttatgaacaatgatgataagtttcttggaattctatcatttttacgaaaaagtaaagttaaagatttcaagtttattaaggataggcttctagaaaggatcgaagggtggatgtgcaagctcttatctcaagctagtataataactcttattagattggtagccttgagcgtccccgtatacactatgtcgactttcatccttcctttaagtatttatcatgatttggataaggtggtttgtaaattttggtggaacatgatttctaacaagaatcagttctctttgaccaacttggattccatccaccttccgttggcggagggtggactcaacttaaaaaaatttgaggacataaacttggcattgatatccaagttcggctagaagttagctacggagctccaaactttggtgacgagtcttccttgctaaatatggaggaggatttaattctggaatattggtggcaatactacccaaactacacatttaattacacttaaccccacaaatctaatttttggtggtaaaaccctttgaacctcactcatgttttgctcattacacctccgccagaaaaccttaattaagtgcgacaatggacatcccacgtgttcactttgtacaagtaacaaatttttagaagtccacgtaatattaattattaaaaaataattttaaatatttaaaaattttaaaaattagaaaataaattaattttaataaatatttataaaaaatatatattttatctttttcttttctttttcctttttcctttttccttttgccttttcttttcttttcttttctcccttgaaaccctaatcctctccaccctaatttcttccttattctccattatcaccgccaccatagtcattaccaccaaagccactgccagaaccaccaccacaaatcacaatagccaccaccaccttaacctacgcctaaatcacaacagccaccaccgagcttaacctaaacccaaatcatgacaaccaccttaacctaaagtcgagcttcaattggctcattgggacccagagatggcttaatcggagccatggagcttcggctctggcgaggtccaccacgaagagagagaagagatggaagagataaagaaagggtctgggattgatgtagagagacaccaaaatggtttgaacccttggttgaagatggtggctcattgaagtcgtaccgaaaacagcgaggaagagagaaggagacaggtcgagtaataaagaacaaaagaattggggtaggggttttgggtcttagggttttttggatattaggtgggggggggtttgtcgatctcaacgatggtggctcatcgaagctgaggttggagagagagagagagaga

SEQ ID NO: 116499 - DNA, 1151 bp, Cannabis sativa
tcaccaacaacatgggctaacacagcaaagaactatccaatcaacccaagttttaataaaaccaataaaacttaatgtaagcccaaataaaagtctaacatttatctgttttgatatttaggagaatattttaatttatattttttttaataattatgtatattatgattatttaagattatatatatttacatattttattatacgtgtggttattttttcttgtacatgtgatcataagtaattatttaaattttattttaacattataaactatttaattttttaaaaatttacaagtgattctaaataattgtataaaaaaaattatattaaaaaacttttctgcaccaaaggagtttactagaaaccctttagatgggtctacaacataaatttcctaattttttgatttgtttttaaatattattttttggattaattaatagttgatcttgttgggtccttttgagaatgaaaaagttacattgtaaaagagaatctcttgctttcttttttatctttatattattattgcccatcatattcttttgttttgttcctttttttttttttaactttatttattaatttataaaagaagctgtcttatatatttctattttagtgtattttttatttcttaaataataaataataatactaagcttgaaaataataaaggaagaacagctgggtcgactttcttactggaattttgtcaattgtttgtcatcatgtttaaaatcaacaactctcaccaaaagaatattctactttttcataataataataataaagattacctaacatttacaagtaaaattcactctctctctccctcactttctctctctaaaaaataaaataaaaataataagtaaatttttgtacatgattgtgcaatcacaatgattcatggttggtgattataaatatagatggataaatgaaaatataagtatttattattgaaaatttgtcattaaaggtgtggttttgtaattttttatttattttgatatctagaacataaatgattgtatatattatgagttcgtttgaaacgtcgtattaagtcgtattgtattgtattatattgaattggattatatatcatatttttgtataatactatgttaaactttaat

SEQ ID NO: 116500 - DNA, 1513 bp, Cannabis sativa
catagttagactgaatacttctcatgtcaatagacttatcttgatttagcattattgaaccgattcaagaaatccatataccaatcaaacaaaaaagtatcattcaattcaaacttctcatttacccatttatttattttttataccaaattccccaaaggcaaactatgagcttttcaaacatacatataggtatgtaatccatacaagaaagaaaaaattcatagatattccaacaataaaaaacaggtacctagaggttgtggataatcatctagcgaacagtcttgagcttatcacagtcccaaagagcgtggtacgatgactcatgacccaaaaagcagcatggacaggccattgctataggaatcccatgatggctcatgctatcataactaggaagccaattgtgagagaccttctaaataaaattcttaacttttggagggagatgtaatttccaaatttactgcacaaaccagagttacccttggaactagatctttgtccaagaccaaggatacgaatagaattccaattaccacttttaactgagtaaaggctcgtactttcaaaatgccacaccaaacaatcaaacaaaggaatgtgatcacgaggaatggcaaggagagctagaacataattgatcattccacctcccattcagcaacaaggaatatacagttgcataaacatgcaagtaacataaagaagaggccttattatcatccaagcttgggatccatcgatcattataaactgaaacttgagagccattacccaccttttagaaaagcctccttaccccataaaatagatcttcaaagaaaagaagtttttttggaagcatcaatacttaacaagattgtattgggatagtaaatagctttcataagtctagcaaccagagaactaggagtaatatacagcctagcagcctgtttggctaatagagactgaatgaaaatggaaaaatccgtaaacccatactattgacagacttgtgccaacacaatttctcccaagtacaccaatgaaacttcttcttactctctttgccatcccaccagaaacgtgcaccaatctatgaatctcttggatcaaggtcataggaagtctgaatagattcatagaataagtagggatagattgaataacatacttgataagaaccttccttcctgctgaagaaaaagatcgaaccttccaatcacagagcttattccgaacctgatcaagaagagattgaaaaatacattttttactttggcctgcataacaagaaagtccaaggaacttctcacgacaagcaaccacactcacacccaaaatagtatccaagttgtaatgaccatataattagacatgaaaattaataattaattagtatgctatggtaaattataagttaacatgtgcaaattagaaataagacctattattaaaaaaatagactgttacgaaaattataaacactacgcaagtatacgcaatcaagtagtaaactcacaca

SEQ ID NO: 116501 - DNA, 1506 bp, Cannabis sativa
gacatttgcaaaaacacggtttttcaagttcaatgatgaggctacgagggatcttattcttaaagaggggatgattcaatttgaccgtaaatcggttattattcgacctagaatgtttgtggaaatggacattacggatgatccacccaaaaccattgaatttcttagtgaacatggaagattgatcgagcaggatgttgaatacgaatggctctcaactaaatgcaagaaatgtggtggttatgggcatgggatgatggattataggaaaggagagaaaactcaatttgttaaaaaggctggtgttggtaaagaaaagattgagttgaaaactcctactaatgagaagcaagaacaggaggcagccccaataaatgagaaagagccacatgataaagaaaaacaagaaagggaagagacaatcaaagagaaaggaaagaagactgttgaatggtagacaccaaaaaaaaaaaaaaatagttcaaagaagatcaatgatgccaaaagagattcagcatgctgaaatggagcttggaaaagttgataacatgaaaaatgcttatgaggctttgcaggaagggcctatggatgaattgcaaggtattccctatccttctaattgattaatggattgttgtaatataatgtgttggaacgttaggagtctggatatcactaataaacagaatatggtgttagatatgtgtcgaattaagaatattggagtagctgggatgttgtaaatgaaaatgtgtagtagtaaagttgagaacatgatattgtctagatttgttgggtggaatgcatattttagtgtggttacagaaggtcgattattgctaatttggaggaaaacttttgttagggttattgttttggctaaaatagagcagtatgtgcattgttacattaaaatggcaggcattgattaggacttttgcacaacttttgtctatgggtctaatgctctaaaggataggaaagagctttagtgtggcctaactaatctcaagtatcctgttaaaccgtggctcttactgggggattttaatacattgttcaattattctgataggaatggagggaatagggtggccaagaaagagctagaagatgcaaataattggttggctatgggggttagttggctggctttctagctctggatcaagatatacttggactaataatcaagaaggcgaagatagaatttattcgagaatagatcatgtgttcaagaatgaggagtggattgataccttccctagttccaaagcttacttctaatgggaaactatttcagaccattgttcgtgtatggttactttcgctcgtcctcaaaatattggcattaaaccatttagatacttcaacttttggtctgaacatgaggctttcaaggatgcagttatgactagttggtctaaacctatacaagggtgatgggctgcaggctgtctatttgaagctcctgaggctaaagcatgtcctaaggaagtttaataa

SEQ ID NO: 116502 - DNA, 1112 bp, Cannabis sativa
aaagtagcagttttttgtagtgaacattgcatgcatacacaacttccaaaacataaagtttgcgactcttaaataaaattttcaagcttttatcatttgtaaatgtttatgatttgacttcaaaatccaagcacaagccacaagcaattacatggttgcagagtaagtctattttttggagaagttaagaattaatagagaataatccaatatgaacgcctacaagaaactgatccaaacgacttgtttcatatagagttcccaaaacttgtgttgagacacttggagtgaagaagatggtttacaggaaagagaatttgcattggaattgttcggggcgactgtgattatcgttgattaagagtgagggggttagattttttcgtttgagaatttggtatagtttaatgatgatgatgaattatatggtgtttggttcatgaaagttcgaagcagaaaaaagtcaaaatgaatcaaacattttatgcttgcttttcatctatatattaacaatccagatgccatcttgttatcactaaattatagtttatacatacatgaagtgaaagaaaacaagaacagatttcatggcagactcccaaaagttagcaaaaactgcaaaaagcagtgctctggttcagaaccaaaatagaaataaagaatcaaaacctgcaaaaactgagctacagctcagtcgagaaattaacaaaaacttcataatcatcaacaacttcactaaacactgaatcgaccattcgatgcccaaaaggaccaatcgaccaacaaagattattaacatgaagaaagcaatagtagctacaattttgaacacacatggaaaccaaccctgattattaacatggatatcaattcccaagctaggcacatgtattatttcattcaacaagaaacttaaccgatacaaacaagaaagataagtaattactccaaagcataaaatatagctacgtacagaaaacataataatgtaacaaaatttaaatagaaaatagagttgagaatcatctgttagaattatttatttgtggactaatataataccataatcacaatcattaactatgtgcccaatatttattcactaccataat

SEQ ID NO: 116503 - DNA, 2107 bp, Cannabis sativa
agtggtggcgagcgtggactgcttctttcatgaggcggcgccggtccttacaccgcctcaccgtatcttcattgtcgagcttcgaggccgcacaacccatctataacaattgggtcgctcagacccaaaacccagaaagacaaagaacaagaaacccctcggtggattcccgaggtatggcgtggcgcgctttctgcggtggttgtgaggaatggggatgatggcgccttgcttttgggctcttatagtagttgtgagtgtgaaatagaaacagagaatggagaaatgagagagtgaaacactgagactgcacagtgtgtgtgtgagtgctttttggttttgggtttttcttacacatctgtattattaattcgctagttcctgggtccttgtcataactaataaaacactattgggttttcttttcttttctttaattaacaattgtttagtctttttctaatattcaagaaaggaagggacataaaatacagaaagttaattttataatagatatatgtgtaaagattattttgtaagagagtaggtgataaatctgatgactgaatacaaactaagggtggcttccttcggattttattattattttaataaattgtgggattaatttaataaaaatgttacttgtatggttcataacataaggctgttttttgtttttgtttagtcttaaagagtgtatgtagagtgctgagactgagcctgtgtctgtgggatcttcctttcacccaattgtgtggtcccacttgttttcatttatccactctatctttgctcagctcctctttctcatttccatttacatttggtgcacacatttgtcacaatagaggctattgtattttgctacataaatttatatgttaatataggaaaatttgagtttttgtacaccatatctaaaaattctcacatcagcaaattttttccactttatcaattataaccctgtaatttttaaacctaatatgttctttctctctctctctcccaccaccatctgtggccattcctctatctctttctctttccatgatcccgatttctttacatgtgacccatgttgtcatctcataaccacgccaaaaacttagaaccctaaccccgaagagccacgaagatacctcaaattatcgttcagctccattagtgtcgagtccaatcaacgtcgagccccatcgattccaatctcgacccctttgatttttcgttaattctaagtttatattttttttttctttaagatattcatgttattgttgatttaggttaaactccatttgggttagttttgattttggtcaaaaattaattttaactgaaatatgagtttgtttgaaattttgattttgggtgtgatctttgtaaaatcttgaaatttttttctattgttgccatttgagctctataagcattgatatgtacagtattatttttttcttattttttttgttcaaactcgattgcctcgataaaaaattgatgctaacacgataggatctattttttttttagcataataggttcgataccatctcaatgatattttgacactagctcaattagattaatatagattcaatataggcttgatgggagatttcattttctggagtgtcctaggttaaggacaagctcactaggtggcggtcttcttcgctgtgttgttttggtgtattgattgatggtactcgatggaatttttttctttttttttttaagaagaagaacatgtattcattagaaaccagaaaaacaaagttcaagatacaaactaaagaaggaaatcagatcctttccataaagcttcctaaaacttagctaaacgatgagcggcttcatttgcccctctaggaatatagctcacagtaactttagggaagaaagacagtaagctttcaatctccgttgtaagcctatttaaatggagattgtgagaagtattgttataaatataatcaactagtattttacaatccgattcaacacaatctggctgaagagaatggtttctgcaccaagtaagagcttggtggagtgcatgggcttcctgttggaattaattttaccaggatctttgatctac

SEQ ID NO: 116504 - DNA, 2448 bp, Cannabis sativa
  modified_base (541)..(550): a, c, t, g, unknown or other
  modified_base (748)..(752): a, c, t, g, unknown or other
tttccaaatttaaactaagcggtttttacaccagttctctctctctctcagatatctctctccatttctcactctaacttctctctctattgtgttgcgtatttctcctgtgtttgacttgtattccccttttttcacacttattatgtaatgagaggagtagttctctttatataggccaagggacccaatatgcaagttatcctttttgatagttaagttagttaaagactaactaactaactaaccgaatcttggttgggggttaaagaataataccacaaattccaccttatttcttcaagcctcaacaagctaagtatatctgtccaataaaggtggtaatgctttcatgtgtagctacttagcaactaaggttgagtaagtcttagcaatgcctaaacttactaagaggtaacaccttagtgctaatatcagcagggttgagtaagtcttagcaatgcctaaacattaatgccatttaacatttttctgtatgacacagactcgcgtgttacgctcacacgcctatttatgtctnnnnnnnnnngacctacgtgttacgctcacatgtctaaatacaataaggccttagaacggttcatctcagttctagttaccgagtccaacccgattatgccttgaacacataaccctaaatcttaatacacacatatatttaacatgacatagtatttacacattaattatcactaggataatccctatgccattaaaccgctcatgnnnnngtaataaccctaatcccagtttctaattactcacatatatcatttttaatataagcgccaccgcacataactctacgtgctaactactgtcttacctaatgtcccacaaacaaggagattccaaatcctcgggtgctcctgaccgagtgctagtaatcttagtcacaatttctaagattcagaagtatagggttaatacctaaatcaactttcacataaaataaaattggcattcaaaatatagataaacatatagagctcaaaacttgctttccaacgatataaagaacatctcaaacggagtctcgagtcaaaagttatgaacaaaagaagttcaacatgcaatttgtccacgcgagcgggccgcggcacctgggttgaaaacccagaaactccattccagtagctcaaaaaatgcatcaaaactcacccaaactcaacccgaacatgcatatatctcaaactcatttctcatataatataactaacataacagaaagctaatacacacatttaaagctctaatccaccacaaacatgcttcaaaattcaaatttaataaatattacaaatgagcttaacacttaagcaaaaatcatcatattctcatccaaaatagttgcacatcaagatctcaaagacaaattcagaacttagcatgctttccaataaactcaaatcaatttcaccaactaagaaatcctaaattcacaatctaaagtatacacaaagcattatctactaactcaaaacataactatgtctacaacaccataaacaacccaaatctcacaaacatgcaattcaaggtcatttgaagctcaaaatcataatattcaacttcaatttaagcaacaattaaagacaaaaagagatagagactacctcaagatctcaaattcacacaagctccaaagatttccacaaatcaagcttgaacccaagctatttctcaataatttcaacaaaacataaagatggattgagagagagagggtcggttttgggtgaggacaaaccagaaaatggttatcattttttgtcaaaaattcctttagttgaaaaataatccaataaagcaaaagataaaaatgccttcaagggccatatacacacccaagcacacatataagggcaacatggtcattctcatcaaatattctctaacaaatttcatattattaacacatcaataaaatgccagtatataattccaaaattgtatttcggcccgaaatactcggttgtgactataccgcaccaacttgttagaacacacctgaaaaaggacaaaataggtttattatataataatatagtccataagtacattataatataaattccacagctttacccttctcgggtcaaaattactaaaatacctctggctcaccaatggggtcttaacatgtcatttattaaattaattcagttataataaattatataattatataatacacaattaactagttagggtttgctaatccattttcttaatcttagggtattatagtgctactacggattggagttgtgatttccatctaatacaatctccattagtttaaaacacataagaggtactataccttctaatatccttgcttgatgcataatcagcatccacatatcctttcaatgttactttctctgaaactctcttgtaagtcaatccaatatccgatgtccc

SEQ ID NO: 116505 - DNA, 2218 bp, Cannabis sativa
aacagatacagaaaatataaccagttttgtcataacatctctagatcagattattattaagttttattatgataaaaaaatcagttcaggatcctaaattgaagggaaagtacctccctaaagtcccagctccagaggtatggtacatgaaaactaattccagacacagtaaccctagttcttaaaatcaaaccatatgcatgcaaagtagcaaatttcctcaagcacaaaactatatttcaatcaagttctgaaaaaacagtttaagtgggaggaaataattgtaagacgggtcaaaagtggagacgatggttgttccacttgaattccattgcctgtttggtgacgaggcctatactagatccaataacaagtcgatagtttgggaagatgatgaacatcaaagaaacacaatgatgaagtcgaaagggaaagggttaagcgttggttcagagaggtgagtaggggctaaagtttctgggcaaggagtttgtctgagaagagttctcccgcaaagggttgctgctaaaatgggaaaggaaatagttttagtcgccaagacccccatttatatgggtggcaatagttcaaatgtttttgaaatgcacggtccagattgaattaattaggggctacgccatccaaaggttggggatatgaaaggtttgcatttaatgggtctgaagaaaaaagataaagtatttattactcatcatttcgtgagaacatccccaacgtactagaagcatggtgtcacttcaaggccagccgtcatttgcttcccccgagaaacacgcttaagctcagagcgtgagtttcacgactccactgaatgagtacaatgctttagcaaattaccagcaatattgaagaacacaacaaccttttagatgcccaatacaatacggaaagtttttcttccatattccaatgcttggtcaacgaatcagagacgtgagacaagcatctgagagaaagctgcaagattctaacactcctaagtttcagaagcttggggtaaataatatctgtgttcccagatgaagtgtacgtggaatttatggaaggatgccacgtctgattacgcgttgttattgtatgccctccgcttctcgcggttacgtaaggcgttgtagtacctggaggcactctctgctagcagaggcggaaagaactctaggattctcattaataatgctgctaagggaacagaagtcacacatgctccagtaactcaacattatctcttttctaagctcaacatcactaggaacacatactcgagctttaaacaataacatcccattgctagagattgagaagtccttaactttaccagctaacacctcttctcgaaccctgattagtttaggatcttccaattgagccattttgattctttctagtaagtctgattggagcgtcagattatgcagctttccaattataaagtcaatattctccttaaccatatccgaggctaactgaggagaaatcattacgacactgaagacttggtcaggaccctttcggctcaaggcatctgccataacattagccttcccgggatggtataaattttgcaatcatagtctttaactagttctaaccaccgcctttgtgtcatgtttaaatctttctgagtaaagaagtacttgagacttttgtggccagtgtaaatttcacattgttcaccatataagtagtgtcgtcaaatcttcaaggcaaacacaactgttgcaagttttaagtcatgggtcgggtagcgctgtttgtaatcttttaaatgtcgtgaggcataagctataactttgtctgcttgcatcaatacacatcccaaaccctgtctgggtgcatcacaatacactacaaaattttctcgatcagttggcaaggctaagactagggctataattaatcgctatttcaactctagccatttctgttagagtacaattctttctttcaaccactccattttgttcaggagttttaggagcagaaaattcatgagaaataccattagatttacaaaactcatcatatatagtattttcaaattcttttccatgatcactcctaatcagaacaattttaccaatgttacaatctttttcaactcttaatttcaaacacaaggattgaaaagcttccaaggcatcagatttttctctcaaaaaattcacccatgaaaatcgagaaaaatcatcaacacaca

SEQ ID NO: 116506 - DNA, 1941 bp, Cannabis sativa
gtttacatttttaaggtgtcgtctgttcagcctcattaaattctaattttgcccatgtggcaatgacaggtcactaaaaaattatcctatgtggtcatattttacaaaataaaaataaaaataaaaataaaatatttaagagtaatttgcggcaaaactctcccaactatcaatttacttgcaaaacaccatccaaccttaaagttttttagatggttttttgcaagtaaattgatagttggagggttttgccgtaaattattcttaaaatttttatttttattttgtaaaatatagccacataggataattttttagtgacctgtcattgccacgtggacaaaattaggacttaacgaggctggacagacgacaccttgcaaatgtaaacggaacagtactttgaagggttttcttaccaaaatatgaggttagatggttttttgcaagtaaattgatagttgagagagttttgccgcaaattactcatttcccaatagaaatagggtaagctaaagagggactacttgttaaaaatattacattttttttgaaagaataaaaagaaaatattacattttgaatgggtagctttctgtaccagaggcccaaaagggggagtttaaataaaatccatgagctgatgatgatatgaagatgtgggtaatgataggatgtgcatgtggcgcacattaccatgagcgcgtagccaagggggaagggggccatcaaaatccaacgttggccacatgatcgttcacttcgtcacctaagctataatattattatcatctcaattctcaaagcataactctctaaattactaaattataatattaaactttgtattattgttgccttgcgtgtaatattgttgtttgaatttatttatttgtcattttttttttggttacttggtcctctatcaatctattgtgtattttttttttattattatttgcttgtaatattaaatttattggatatgcttaactattgcaaagcaagttttttttgactgctgattgacattttcattcagctttgacacattttgcttaattagttaacattctaattaaaatcagtggaacataaaaaaaaatatatttaaaagcttataaggttccctctaattttatctttcacccttaagtaattttaataaagggttaattaaattttttgtccataaactttgacctgtacacatcaggtccttcgaactttgatatatgtactaaattgaaatcgtgtcttttaaattttaatatattctaaatcctgctcttagaactttcatccactttaaacgtctttcagtaaaatgaaacgaagtccttaaatcgaataatctctatagttcgagagaatttttatcaccttaaaaaatttagacacacaatttaatacattatcaaagtttaagacaaatgctttattatttagtaggtttgtgataaacataagaaatattaaaattcaaaatatttatttatttgtattatttttttgtgtcattaaattaaaattataagtaattatccacattttgtcagcccaaataataaatgctaaatatattattatatatcggtaggtacgtaaataaaaaattttgttccgtcagacaatcctggttatacaattgtaatttgttaaggtgggtgttgttcgacattacgaatactgtttttaacaaatatgtgtaactgtattttagttatatataatgaaaattgtaatttactagtattagcattattgataaaaaatgtttaaaattagttcacgttcatgttaatttacacaaatatatatttataaatttcataatttatactgtttgagattattgtggacattgtcccacattgaataaatggtagagaattgagtcatatataagaacatggactactccactcatagccaattggt

SEQ ID NO: 116507 - DNA, 1992 bp, Cannabis sativa
  modified_base (1945)..(1951): a, c, t, g, unknown or other
cccagcgaccatcagcgaccattgtctaccattgtctgattgtctgattgatgaaaccttcgccttcgtctgatgcaaccaccgcgcaaccacacaacagcaaccctacaaacatcgtctgattgtataagtgatagtgtaagaggtattttggtaattaaaatcacataaaaggtatagatgttgtctacaccttatggaggtattttttataaataaagtgtcaatttatattatctatgtaaaaattccatgtttttttttttaaaaaaaatagattttaatttaatttcctcatatgccatggcatgcatcagtctacttggcattggttggattgagctacgttgtcaaataacgggattaggagaacaaaagtatgtttttgctaacatcacagtgattttaggggttttgccattaaaatttaagttttgaagattgaatgcaagtaaaagttttgagagttacgccacaattaactcaaattaacacatagtacttattctaacaaaacaaaaagactttgtgaccacagtgtaccctttgcatagtggatgcggtttggagagagcaaaataggaaaattcatagaggagttgtatctcccctaccacaacttattaccatgattaaaagaaacctgaaggatcactcattggttgctgataactcatttgagcccattttagcttggagacccctccattatcatgggtgtgttgcaactcaaatgtcaaggtgaatgtcgatagttctgtgttggctgttgttatcaagaatgaatggggtgatgccattaaaacagcaaggagccatttcactgaaccattgctctgtgaggctcatgtaatttgccttgcagcagaactcacaatggagcttggtcacaagtgggtgcttttttaatgcgataacattgtggttacaaattcttttaacaccaacaccgaccttgaggtggaccatactctctccacagctagaggacgatttctcaatatttgcagtcagttgagagagtggggagcaattcacatctctagccgctgtaattcaatggtgcataatatcgccaaataggcaaacatcaccaacactttcgaatcagtctctcacgtggggctcttgaccctagcgtgctagacgactatgctgagtggtcttcgagctagttagtggatgtttttcttgtaatgttttactttctttgcggtttttttattttctttgtgttgtactgtgtttttctagtatttgttggttttgtttaattgaagctgggtgttctttagacaccccatttcccataaaaaaaatacacacacttacgttgaagatatgtacataattggagctttgagcaattaaaggcataacttaatataggaccaactctgaattttagtcggccatagaaaaaaaaaaatagacccttatttagaaaaaaaaatgtaatactttttaaaatctataaaaatatataattttaaaagagaaaaaaaaaaattagacccttaaactaagtgagccctaagcttgagagggtcggccctctacagaccaatttttttttttttacgcggtggccctctacagaccaattttttttttttacgcggtgattaaaatcacacatgattaacaaagcaataatcacactcgacggcagtacctcctcaaactaggatagctcattgtatagtaagtaactgtacatttttataatttgtttccaagtgattgactgttagtatcatcaatcatcagtatatataaatgaaaacaaaagaagagtttaggtggcagcctatttttttttcttcctattttttctattttatgatacattctcttaattttttggaaaaaaatacaacacatacaaacaaaaagtgccacatcatttaaaaatagtttagatgttatccatgtaggttataannnnnnnttttattattttactttcttttatctaaaaaatattatttt

SEQ ID NO: 116508 - DNA, 1571 bp, Cannabis sativa
  modified_base (1261)..(1261): a, c, t, g, unknown or other
  modified_base (1388)..(1389): a, c, t, g, unknown or other
attaaacaagtaatgaaattaaatttgtttctttattgataattgaatagaaaagattacattgcaatagagttttatttagggcacaaagcccaacactggtgtcaattagttccttccctttattttttccgcaccttggcttgtgacctgcttgatctactttgaacccatgtcctagacccacttcggacagtacttgattctgtctcttgaggatcttcttgggtaggcctgcacctctgaaagagatttgagacacgatctctactcatgtaggtatacatactatccctttcaatttgatttggaccccatggatgtcttagaggtcgtcttgacccatgttgttcccttagattactcggaattctgtgagtgaatctctagctatcatgtcgcacttgtctggcatatgtattcgcaagatgactttggatcatcagatcatgaattattatgattcatgttaccacgagagggctctcgatcgtcaggtcaagttttcctggtcttagtatttctaggatcctgtggatattctttgtccattagctagaatattctttgtaatccatggttttgtgagattttcttggacattttctttagcaggggcttccttagttcttctggttctcgatcctctgggccttcctcgaggctaccttgtggatgtatttggttgactctaaggcatatcacgtgctgctcttatagcagcgacctcacattccaattcaacattttttcgatttgattttgccaatctctgtcgaagttgtctgttttgcaattccctcaaaggtacatatctcatcgaattgtatgcatcctggctttgccttttggggatctcatcattagttcgtttaaatccctattcaatatttcttctctctgaatgtgggatctcaatagtgttcgttccctgggttcctcacggttcttccaagacgctgagttatttccattggttgattgttgtcctcttgagaagtagtttccatggatggaaaaaagaaaagacttgaatgttatctgtgggaggtaggagtgttcatcaaactgttcaaatcgctcaaaccgctcacaccgcaccacactgcaaaaaaaatgcggtttgaaattctctacggtgcagttgcggtttgaatttttcttaaaccgcgcgttgcggtgcggtttgcggttttgaatttttaatatgcggttcaaaatgcaccgcaccgtataatataaaaataccaatttttatatntatttaggtccaatatgtgaaggctcaacctaaacccactaattattgtattgtgtaaacttgaaactttttttttcatatttattttcaaataatcttattgtattttttataagtgttgctcaanntttgttgtatttgtgatattttaattatttagtgatagtcaaaatcacacaaatcgcataaactgcatcacaccgtaccgtaccatttttggcggtacagtttttgcagtttttttggtttcgcggtgcgggtgcggtttgagaaattaaaaaaaaccgcatgtgcaggttgatttaaaaaa

SEQ ID NO: 116509 - DNA, 2879 bp, Cannabis sativa
  modified_base (1481)..(1481): a, c, t, g, unknown or other
  modified_base (2845)..(2851): a, c, t, g, unknown or other
agagagagagagagagagatgacctgaaaacaaaaagagaaaagcgaggactgtcgtggactgctttaataagaatggcttttagttgatgcaatgaatgattttttttctttttattttttcttgtggttgctttaaagagtactacttaagtatcaatgcttggtggttaaattacttagtataaaataatacaaaattaaacacaatgaagaatgtgttaattgaatagatgaataagtataagtgaacattggatggaaaagggtgagaggaagacatgtttgacttgatcatggattggacgcaaccctatcaactcgtccccttgtaggaagacaaaaagagaggtgcagttacggtaagaagctacgttagacacacattttttattttcacactacaagaaaaaggatttttgatggtgagttttctcgttgcaaaaatatacatatgtcgccaacattatttgccagcgagctttaacgccgtcaataattcgtcgacgtgtaacgtgttttgtcagcgaaacactataactcaccggcaaaactatttatcccaatcaaatagttgccgagtaaaagttcctcgcctgctatgttttgtcggctgaggggtctttgacaaagtttcccagaaaaatattgcaccgacaaaacatttgagccaattcgcgtctaatttttaattacccgcgaaagttttgccggtacaatatttttcaagcaaaacttcgtcaataaaaaatactttaatttttgattgcgagatgtagttcgccggcaatatatatatattttttaaaaatcatgtttataataaaattaaaattaaattaaaaccaaaatcaaactttttaagatactaataaataaatatgttctctcaacgtttgcactctgacgtggcatcacacgatggtgacacgtggaatcaactttacatacctgctcgcaagagatatgccgaacaaagcaccacatatattcgcacggacgaagccttcttaaccgggcagtgagcagtccgaacaacacgccaacacttagcagtttcaacactcacattgtgaatcactgaagaaatccctataattttgggatcatataccagagatatggtaagctatccaaatcccttgatcattgtattttgtattcaatgtgtaatcttgccaattatatctattgtaatcagaagggaaactttcttccccacagttatagccctataaatagcgatccattctcattgggaaaaagggggaaaagtttatctaagaattcaaattcagagatattattgtaagagctctaagaagaggaatcattgcattggggagtaggctattaccgaactgctcagggtcgaacctctataaaactcttgtgtcttaatttattacatctatattactacttgtcgcttacaatttagactcactgttgttggccaaaagcgaggtcaacattttggtnctttcattgagagaagaatcacaggatcgtctttatttcaaatctattcataagcacgatggtggtacagagtcgtaatggcgtggttgatccagcaaatccacaggcagtggatcctgcattgcagaatccagggaatgcaagggttccaccagccacgaatcccgaacaaccatcaactataggtcaaggtgtgacaactcctttgagtggaattgtgcctggtgtgcaagagactggaaatgccagttcggcagccaatcagggcattcccaacactgaagttccgcccacaacaaatgctcgaacaaccattagagatgcaccgagatccaaaacctccgtgctgctctttgaatcatgcaaggtcataccaacaccctgcatcatgatcaggaggaactccgtgctgcggtaaatctcgcgttcaaagagcaaaggcgtatgttcgttgaatggagggattaagaaatagaaacattgagggctcagcaggcagccattgacgaccgaacaaggcaggcccctgtgctgatacgaaaagcctatcaggctaccaatcaacaacctacaactgtcattcccctgggcgagtcagacagagatccaaccgtgaacacttctcaaaccctgaatggtcagccgtccaatccctggtcactggttctgcctgtgggccaaggggtaggcggacagaccttgtctagtaattcatcaagagaagtcatacccaataactccgcgcaagttaatggttccagctagctgatcggccaaactaaccagtcattgagacagcctagtgcatctatatttaatagattgggaacggcccatgatctcagaaatgatctgaataaaaggagagggctagacgggcaacatatcgcgccagccattcagcctggagcccgtgctcaaaatcttgcataaagagatgctgacgtgactctggtcgaccaagaggctgaacaagttaatccaaccgtgcaggcacagttggatgaactaaaaaatatgttccaaggcttgttcggtcagaagaataatgacctcgagctggaccgagcatgtggatcccctttctccctagagattaatatcctagagctgcctcataagtttaagatgccaacctggaagatctatacaagaaagaaaaattccctatcccatctcaaatactttgaaatgcaaatggacctgcaaggagtacgaggagatgtatgttacagagtttttcctgccaccctcacaaaagccgcccagcagaggtacttcaagttgactcccagaagtttcaactcatggaaggctttctccgcagaatttcatgcacaattcttgttggaatttattttacnnnnnnnttagatctactaacaagtatgtttatta

SEQ ID NO: 116510 - DNA, 1507 bp, Cannabis sativa
  modified_base (26)..(31): a, c, t, g, unknown or other
ttaaataacatacttgttagtaaatnnnnnntcctggtaaaataatttcaacactgtattagtcagccccataggtaattccccactatttgacaaccttctacgttttatgtccataatggtgagttcttcttcattaattttattaaagctttcaccatttaaattaatggtatttccctccatagtatcaactagcgtatcattcacatttaaaggttgtttatgttggagaccataattaacaactgtagacatatttccttgattaatgggattgaaaaatagatttttttaatctgttgcgatctggtatgtcatcaatcttggcatcaacattcataccagcaaggctccccgtcgactggctatgctcgcctgatcaccactgtagactgcattcagcttcaagacgtttatcaaactctgtatcctccagtttagtgcgcacccacttcgctccaataagcatcgtctgtcgtcgtaaaggagctttcatgaaagtgccataaggcttgatgattttgtctgcatgagtatcaaacaaatgcatacaaaagtgatccaaatgacccaatagaccacaaatgaaacagaaagtggggacattttcatatttaaatgtgatccaaatgaactctatcttagttttccacaacttcattttacgctgtagtggtttatttagatccatagaaactcaaatttccatataatcccaccataatcctaaaaagtgcttaggatccgtctccaggaatttaccaatataattccccacgttcgtaagtatccgttcagtcatatagcctgtttttaaatcgtgtacttgaacccataaatcaagattatttaatgggactgttcgcgggtcttctcccttcttcaaccttctaataatcagagctttgcgattgaatatccatgggctgccttccaagacacaagatatatcgatctcatgataaaactgaaagcggtatcgaataccaccatcaagttccttaatgtagacccccattcctggtttccaaatggcacctagagtttgttgcgtagctggaaaatcgattgccccgtcatttagaaacggccaaccgaacaccatcgagcgtcaaacgctacactctcctcttcctgcacctcttcacaaaataggccacctaaagcctcgtcatcaagagtaatatccacttggtcttcattaggattactactagatgccatggtaatagtcaaatgaagacagaagaaaacactcagaccaaagaaaccttaatagaaaaaatcatgttagaggacaagactagtcgtatcaagtgctaaacattattagtgtcaaatagtactaagataaattatctaaatgaacataacaatattaggatttgtagtattacaaattattttttggctgagagttgagagagatgtgtaatgaactaatgtcatttttttttctcattctgttactgttggattttgtgccctaaataaaacccattac

SEQ ID NO: 116511 - DNA, 3869 bp, Cannabis sativa
taacaataataccattttcattcctgaacaatgaggaaagcaaaaaagcattatgccaacaaaaaacaattaaaacatcaaataaaggtagaaatgagattgtacctcctccatcgtcgtcgtccatcgtcctatcgatttctgggtacctcccttgcagtcgacttgaagcaactagttttaggtcacgattcaacaacgtgataaacagttgaatcaatttctggggttggatctttgggtttcgattaggctggagattaggggttaacgattcggggggattaacgatttctggtgttgaatcgatttctggggttggagtttttaattttattttgtaatttagttaaaaaaattaaattgtttaaattttaatttggaaaaacatttttattttttcaattttgaaaagaaataataaaaataaagcgattaaatcttatgcgtacacgtgtaccgttagtcatactaacggatgtggtatgaacagacaaacacgaaagtctagcttaggtactattgccgctattttggagcttggggactaatctgcatcaacgtgaactttttggggacttttgccgcaaattttcctaattaataacaaataataaaagtgacatggggatttatagatgttcgatccccttgattagcgggtaatgacatactccctttttagttgtattaatttttgagataatatcacgcagattacaggctggaatcttgtatattctagctatgactcttttcaatgttacaatagtgataattgagtgttacagattcagaacaagtgagactttgtgaagaaaatagaataagtatagtgagtgaatgaggggggtgtgagagagcgaagctatgggcgtgagagactcagagcccaggggccctttctatcttgcctaatgcactttatacagttcagggctcacaaaagatcatcactcaaacaagtaaatatccctctaaaatagggaaaataatatctttctatcttatatttaaattacaaaaaagataagtaatattcctaaagaataggttgatactagtttgaggaagaattcctatctgcatgggaagttaaggttgtttcgtaactaaaatttagctcgtggaacccaccattaatctagcctcttttcgaggctatctacacatgctggccgaccaggcctgtttttagggcctggccaacacataggacttcattggctagccaggtgtggtctggacagggttccctggctggccattttctccttgcttgatcttgcttgattgccttagaacccttgacaattgacatgtcgtgcaaggtgacttttttcggttgttgacggaccatattccacgtggttttgatttttgtctatgtagacatgccacgtcaggtgggtaaaaattaaaataatatttaccccctaagtccctatgaggacgtctgttcgattagggattttttaactctaatcttaactgtaaaagccttaaccggacaactttgcctagttagatactggactcttcagatgacttatctttataacaaaaaatgattttattgccaatcgttatggagatttgtgtaacggtcgtacactttcttatttttgaaattttagtcttcttctcatctacatggctatttttgtggaaaaataaccacccattaagtttttttggggaaaagactttagaacctatataaggttcattttgcttcattttgattcactccactttatcccctctctctctccttcgtactctctttgtaaaaaaaaaaagaaaaagaacacttttcatcttcctcttcaagcccgatacctcaggcacctccattccttgatgtttttcaatttttttcaatgattcgatcattccctgagtatctacatcggtcttcatcggtgggtaagtcttaaaatctcacttcctcattattttcttgaatctgtcattgatgacttaaagcttttttaagctttttgaaatttttgattctcacattgtagtgtagtcttttttacattataatccgcttgatagctttggggacgtataatacatggctttctgatagaaaagatcagattttgaactccttttagattcttgactctttgagtcacgaagaacattgtttgaattttagaaaaatagaactttgattcttttgagcttctggccgacacacatggtctgttcatgaccctggccaatttgtgttttcaatttgggaccatggccggttcgtgactctagcccaaaaacttagtcagttcatgactttaaacctaaaacctggtcagttcatggttttgtacccaaaacctagtcggttcatggttttgtacctaaaacctggccggttcatggcgcgcagtttaacgtcatgagtttggccgattctggccaatacttagtctttgtaaagactctgtatggcttctcgagcccatttcacccttatccattaactttgtatggtatgccttaggtagaatctatctcggccaattagtggcctaaaactcaatgtctatttaattttttgcacctgaatcttgtattttgtcgattaacggctttgtacattagggttgtctggctaatacccttaggtttaggccagttgactcgtgctttgtctaagtctttttattcgttcggttgttcacctccctctactttttttacataaatgaacttgtgcgactttagggaggtgacaaccaaattggtgaagacttattcagccttctctacaaagaccatcgtccagtctagacagttagttcttcttatgatggtttttcggatagttccttgagcaattttaaggtcaacaaggttctccggaacttgagatttagcaccaccgctattctgagcgaataggcagtgagttctatggtcagttcatctaggaactgaactaggaagatttttacgtggttcaagtgtcaattaaccttagtccacgaatcaaccattagcctttaagggtagtattgatgaatttacagtattttgcaagaaaccctaactctttacctttagtttttcaaagaagaagaagattaagggcaatttcagcagagtttagctatgtatttttggcttgacccaattgcatgaaaataaaggggtatttataggttaagtggcgagtatgagtagacccatgatccgcgtaaggtttctacttaaatccaactattgaagtaaattacatgcaatgtagagctgactggttgatcccgtgggtcgtcttatgcctgtgcctatagcaattgaataatgggaaccattttgtactacttgaacacgtatcacacaaaggtttaacctttaaaagtgagggacacatgtcactcaaagcttgctcctttatgggtagaagtctacattgtctgcctggtaaaaagatggtagcgatgcgtacactaccatgctcgattgtaggggataagatctgattctgtcagtaaaagcataatcgtcacttttgtgacttgtcgtatgagaaaagtcgacatctgcgattcctcatgagggtcgatattcgcgttaggcctttctagtgcgtatttgggaaccaattgaacaatccttctagccaagcccttccgggtctgagagagacacttttcatcttgctctttgggaagcaagagctgctgcaagtaggcttccgcgtatccctttgcctttgatgcctcttagttcggggagacccctcagcaacggagcgccttttggatgatgtttattaaagtggaaaattttaacacctttacacaataagaaattatattgtatatgttataaatattaataattatgtggat

SEQ ID NO: 116512 - DNA, 2872 bp, Cannabis sativa
tgaaaagaaaaactgaaaaataccatattttattagcaatattctttgtccacatttataaattttcttttttttttttttgaatttaccatattgctataaagattcatcacttttttcttcaataattttttggcataattacaccacatactgaaatttttcaactttttgttacttttatattgtgggtagaatttttttttaaaaatattgtgtaagttttatactgtgtactgtgttaaattttcactgttgttttttagttgttccactgttgttttcagttgttctgttttgtgttccactgttactttataaaaacacagtatttttaaaaagatttctatgtgacagtatttttgtaaaaggtaacccaaatttcaatatttttgtaagtttcttttttttttaaaataatacatccaatagagtgaaaatgatatattcacaataaatcatttgaaagctcacatgcaaactatttagctttttttaaattttcaaaggtaagagaatttttcttgaattcaaataatatatattatttatttcttaaataatattttttttaattattattttttatattgattatataaaaattaatagctgaatcaataagaaaactggtaggctgttagttcttttttgcactacgattctctttctcatgaaaatcagcttaggagttaggatggtgactgccaaactttgacagtttaggacacatttgaaaaaagaaaaacaaatagtcaaaagactaatttgagaaagagaccctttctgttgaaaactccttaatagtgataatgtcatacttatcataccaaaggaaataatttactagaagaataatccggtttttgtgccaagtcagacaagattggcaatttttttttttgaaatgacaaggttggcaatttaaacacacatatatagaaaattacattgtatatccactttactttacttgttttaatttttacctctatttttatattttttagatataccttatgtctccattagaccctttaaattatctaaattatatcctagacttaagtagagagtgagaatatattaggtaatccactcaaaaaaataggtatattttaataaaaaataatattatattattttttattaatagataaaaaaaagtattttctaacttatccctcatatatatatatatatatatatatttatatagtaaggaaattggaaagaaagtccaaattgtcatagagttcatgtatggacactatcatgggcccttggagatctagaaaccgaaattggttatttataatgttgagcccatccatttatttttattgttaggctatttacaaaattatgttaaaaaacagaaagtttatataaatatggtattaaacttaaccccacgtatttcttatccaaacaaactaaatatatgagtatataaataaaaaatatcataaaaatcattaaaaataaaatactattaaattaaatttagtttgattaaaaaatacaacactttattaaccaatgacataattatttgtttaacattttactatttttttaatgtcatttgttttttttttttctattttaaatttattacaaagttatttctcaattaaaaaaaaaatatctcaatataaaaataattaaaataaagatatattttattacttcaaaaaaaaaatatattatataaaactagttttattttagattttatatatacatttataagtattttatataattcccaagcttattactacttcatactagttttaaagaataaaaatattgctaaagtacaatataaaattaatttatcctaaataagtatgtatatttactttttttttgttgtgtatatatatttttaaattaattaacaagtgatttgtgttgcattatttaagtttatttatttatttattgaggttgttatattttttaacgcacattttcgttaaccaaatttgagccgaatagtgataatctcacgtagaaaaatgaaagcagtaaaataagagagatgaacacaaggaatttttttacgtggttttgcagttaaaattttgcatagtccacgagtcaatctttttagatttctaatagcttttcagggcccttttcgtatgattttttcgtccattttttgagctaacttcccaccatttataattacatagtaggcagttaattacagatttaactgtaatctttacaacgtttatcccctgaaattgtggggtttgattacatatcacgaagtataaatgcggttattatttgaatatcacacagttgtgatttatctgcttttactgggtcaaaatgatcgtgtgtttaaacatgtcttaaatcatcgcgttctaggatgtctcgataggaactcgattctaatgaccttgatagcgagctggagctttttcccctatctttataaggtcgacaatgtacacctcgttgcttctttgtttgaaagcttaacacttcattgtgacaattgcagttcttatttacaaagaataccttagcagtccattgaatgttagcttctgactcgtcaagactttaagtcttgctgaaagatgtttgaagttgagtggtgaatataacaggagtgctccttcctatagcgagatgggagcctcgcctattaggtcttgagttcacccaactgatatacttagtttgtatattatacgctaagtgttttcacaattgatatgcatcgcttttgtcttcctaggtgaaacgaagttgatgtctcgctttatgcatccaataacatatggtttcaaattaatacacgaaacaacagtttgcatatcttttcctcgcataagacctt

SEQ ID NO: 116513 - DNA, 2116 bp, Cannabis sativa
taaaataaagatgaaggatataaatgtttagtttaccgtgtagtggtatttaggtaataaaattatcattttatatttttgatgtaaaaatttcttaattttaactaaacaattaagagtaatgtgattcttacttaatgatatatataagtggctaatatttatgaatattatagtgtgaaataagtgtgtatccagaattatatattgtctcctcaattaaatctcctttggttagaaaatcatgaatttagactataatatataagagccttatctttaagtttattattgaaaaaattcaataatctgataaattccaatttcttaaagtgaagttattctattttgatcatatgtgtgtgtatatagatatatgttacatcatgtataaaaaaaagtgtacgtgcatgcctataatatatatataaatacataggaaaattttctatccatgcttaaaatgaggttatatggtcttttagtacgtatctcaccttaaaatatataggggtttaatactttaaaattctttaaatcccaaaataccctcctcatttaattctaactctttatctttctctcggctatctctccttctctctcactctaactctcaccaaatccacccaaaaaaacccacaaccactgcaccatcgccgctcagcctcccatctggacgaaacccactcttctctacccctgacgaaacccaagaggccatcgcaaaacccactcttcttttgttgtttgtggttaattataagaaaatttatttagattaggttcgattttggtgttttggttgattttcattgttttatgttcaatttttggtttttcgctgattatcgacatttatcaactttgttcgcgatgtcttttgactttctctaaaatagagtaagatatggtaattattttacttttagcgatatttgtcgacatattatcgacctttgtcgacatagtttggctaggctaggaagctattataattagcgacattggtcgatacagttcgtacatctcgcgatattagctaagttattggaagttaagacacatagcgacatgaagcgatatgttgtcaacatagtctacgactataatgtcttttgattgcatatgaaggccttgctgtagttagcgacatgtggcgaaacatttgtcgacatgtcgcgacatattcattggactatttctaacaaaaaatgtgtatgatttagcgattattgtcgatttatggcgacttagtttgcgatatttgacgatttattttgcaactttttgcgacactgttttatgtgttttagtagtttctcttttttttgtcttttttttttgcagatggttcatgaacttaagcttttgatttttgagcatttcactgtcgtctttcctaatgtcgtaaatttcattgcaacatgttgctacatgtcgttaaaagtcatctagcctccaacgcactctactcatgtcgctagatatcgatagcagcatcacaaaaaattgctaaaattcgctacatgtcgttaaaagtcatctctaacctccaacacactctaatcttcaagctcaatctgaaccaatcattccctgatttccccaaattagccttccaaatcaatattcagaattggaataaggttacttgagctttttgaagatgaaatagaatcccctttcaaaactcttatccactccttcagagacgatttaatctctaactgttgcgttagcaatttctttggttgcgatttctctggcgattccagtctctattcgtctggagcttttttctcaatctcatcctctgtttcctcatctacatccagtttgaaatcaataggttccactcgtagaatcttagctatagatttgttttttttttttttactggatctgaagatgttggccctctcttcttcctcaccatgatcttattcttcgcaactttcgttctccccgccattagcacaagctcaagctgagagaagagcaaacatttttaactatatatatatctaaaaaaaaacgttatttttagtgacaatcttttagtcataacataaattttttgtgcctaaaagtcacttttagtcacaataaaaaa

SEQ ID NO: 116514 - DNA, 2123 bp, Cannabis sativa
cattaaacggatagtaattgcacatcatagtaaatacatgtcaaatagtaataagttaataacatataatttcttattttcatgtttgacaaaagaataagtaattacacataaaattaacagtgtaattattattttcaaaaaaaaatgttaatatttggtaattacacattctcatgaggctatgggaaatggggaatcagaatggtatttggaaactcttaattacctcacagattactgtgtaataatctagttaaacaaacacgtcaaacctaataattccttcgaattactctcaatttcagttacagggtgactttccaagtgcatccttagtaattgaaggttaacatttttccaaaacaatgtaaatttaattattctagataactaaaatatgtctactgtcagaagctcccataagggtgccttttttaacaagtagaacaggttgggtggctcttctattgtttaaaggaatttcataatgcaagagcatcatctagtttacttggtaaattcactttgtttcataagaagggtgcgtgattcaatcctactttcactaggtttacaagatttaagtcacgtttcaaagccaacaaaatagctcactgtattgtttcaaaagactattatccaatgtaaatcaaagaaaacataccttgcaatgcaattgaaatatagggaagacaacatcatcttttaccacaacctctgcatgtttcctggtcaaaacaacccactgcagaaagggaatgcaacaaataagaaccagataatcattaggcacatcacattaggaattaggagataccaaacatttcattcattttttaagcctttttgccaaagatatagtggttttttatattttaacaaagttgaattctacctgagatcccttcctccagttatgaacaggaataacaggatccattttgggattgtagcgaccctcctttgtatcagcaaaactattccaaaaacggattgttaataacaacaaaaaccaagagttaaacagaacctatcacatatttgctaacagtgaacagcatatcagcccaacactgacatttagaagacataaacacccacctgtgtactaaaaacattttctctagaaaaaacataaggaatccaatccacaaaaaaccccaaagaaaatttacaggggacaatcaattgtttattatccatgatgacagaaatctaccagtgtaatataagtcaactcactcacctgtcaacaaaactggttgatgttgacatgatataatcatatatatagctgaagttgtgaagagggatgcagctgcaaagagatgaagaaactgaaatgttgttaagaaaatcacacccgaacggaaacatatacggaatttttgtaataaatagtgtttgtgtatatataaattaaaattgagattacttgtaagcaacagcaaaaagacacaaagtacaattcaaggatatactatatagacaatctcacctgtctgaaagaaaaacaaaccgtttgttgtcagtatctttaagtgcatgtttaagtaatatacgctctgcctcgatcatagttgcttctccccaatctacctggaatgaaaaatacaggaaaccaaaactattgtactgccaagaagaagaaagaaaagaaaaatctaaacccaagtttttatgagaatactttgcttcatatttaggctacttttcttttttagtcaaaatgcacaatgttatacagtataactgtataagaaatgaacaaaactaacgaattcatgtacaaataacagacaaaagtttagaatttgagaattcaggtcaagaacagcacctgtatactatcattaacttgacgattcagaaaatatgccgatctagtggtcgccttgttgaatagaaaaccaggcctagagtgaacatatactgaaaatttgttctcccctccctgcccccaaaaaaataaaaatctaagatacttgagcaaacaaaacaaactttttttaggctcataagttatcaacagaatttattaattcctcaatgtagatttttttttttttttgacagaacctcaatatagaattttatcaaatacacaatgtttaattgtt

SEQ ID NO: 116515 - DNA, 2513 bp, Cannabis sativa
  modified_base (1942)..(1943): a, c, t, g, unknown or other
tccaaatcgttctttttttttttttttttttttaaatcatagttcttcattcaaaaaaatatataatagattaagcctgtttcgctgaagtgccagactctcacaagggggattaaccccataactttgtgtttattcaaagcataaatggctaattatgtacttttagcttggttttatgtatattcatgttaattatgtttggtgttcaataaataatctaaactaattaattaattatttacatagttaaaaccatccttaaaaaaaatataatgtaattgaaatacgtacaaccaaaaaaagaaaggaaaatatacatacatgcatgatcatatataagactctttcaactggatcctaataatatatattatttatacatggtaataattaaaatggaaacttaatcacataaactatatataatgcttccatatatagtctacaatatgtatatatataatgacttaattgtgtgttgtttcaaagattatttgggcggctatatatgacagtaacatctctctttattattattatgaattaataattaataatgtatatatatatatatatggaagaagttagtttaaaataatatatatgtaggttacaagatcttttagcagttttgtaagttaataatgtatgaaattatagtacttactcttgcatgtgtatatataatataatatatatatattttatatatgcatatgattaacaataatgtcaggggggatatgcatgtgaatcgtatctaaactcacatgttcttacttaatataattaattaatcatattatatgtaaaaacatttatacatttgtatatatatttatttggggtttttctttggattctttttcctatcgatcgaatatgtgtttttttttttttttttttaaagcaatgaataaattcatcgaaaatataataatgttatacaagctagttatgattatgttcattaaataaatactatacatgtcatgattattacgatatttctatacatccaacaaaaatttagatcatcatatatagtcaaacaagttgttcattcattcgaaaagcatgtacaactaatccatgagcaacacagattagggacactcttggaaattcggatgacaaacttgtaaaaacttctagcaatgatcttaaaatcattagagtagggaaactttattgaaaaataaatcacagttgtaaaatcttggtaacagactataatccaatgtcatcagcgtcccacaatttgttttaaaaagttgttatcctttctctaaaagcttgaagggacattagtattttaactgcacataaacaaactatacattgatagtgagatgaagcataaaaataataaataaataaatattattgtaaatttattcttttaaataaccaaaataagcatcaatagataaaaattatagaaattacaaacaatagttaccataaataaaatatttccaatcggaaaaaactaaaaagaaaatgtgaaaataacttatcgtgttaaatgcaattagtgtctgtagtagatccacgagcattcagtcaatcatgatcaaatatatgtttcatttttttaaaaaaaagagaaatgctaaaagggatatctattgctatttgctcaatattttttataggtgacaccctataattaattagcaatattttttaaaagttattttcttaaattatatgagacccgatacttaattacagtataacaggaccggtctaagctttaggtagtttgagcattgcacaagactctagtccattttttatgggaaaaacttttttattattattattatataaaaaaattataattaaaagtctagaaagatatctttaaaaaaaagaaaaagaagtaaaaatcatggaattgtggtcttatgtacaaaacttttttttttttttnntatatatatatatataaaaagtttaatttaatcttttgcacatgactcccaaaatatttaggccgatattaaggaaggtcctaaacaccgataatagtttttagtattcttttaatataataactcttaaaaaataatttttttatattttttaatttagtaatcaagtaagaattttattactgaaaatgtatacaatcaccaattacacagccgcaaaagcctatgtacaacgttactatgagatctaatcaggaccgaccttagattcaggtgggttagatctgcatttagagctcactcattttaagggccaaaataaaaaaaatattttttaaaaatatacatatttattttaataattattaaaaatactatttatctttataataaaatctaaaaaaaattattttaaaatgtacatgttgtttatcagtagttgatcagttgatcagttgatatatattagtaaactgaataattgtaaagaccgcatacgaataatacgttgaattatttaataattaaagtttatgtatgagattttattattatcaataatattatgat

SEQ ID NO: 116516 - DNA, 4365 bp, Cannabis sativa
cgaagtaatgaatatggatttcttggctaaatggggatggaaactacttacaggatcccaatctctgtgctgtcaaattctaagagctaaatacctgagaggaacagatatgcccaagtgcaaggccaagtcttctaactgctggtttggaacaatgtcgtaaaagctaatgatatcctgagatagggtgtctgcaaagtcatctttgatgggaaagatacaaatatttgggatgacccttggatcactcatggtaagaatttttttccaaaggctaagggggtgcatgttcctttgtctggaaaagtgattgatctgttaacagataggggagtgggatctccagaagctgcataacctgtttgataatgaaacagttagggccttttttaagggggtagacctacaaggcgggggaaagatcattggatttggacgaaggaaggtaatggtcagttctcttgtaagtcggcctatcttatccaagccctcaataggaacccccactgtcaagtggctccagttctctggaacaagctttggaacagcaagatccttgagcatcacaaggttctgtggtggagcattctctttgatgcgctcccgacctggtcaactctaattaaatgtttccttattgaggacacacgttgcccaatttgtggaatggaagatgaattgactgagcacttgtttcttcactgcaatctcccttatcacctgtggccctcgtcctcgtggggaatctttcctatgactgacaccgagattagagtttgggattgggttaagttcatttggaatcttcagcacaaaggtgttaacccggacgaggtgttcttatatgcctctgttgttgtggacacaatatggaaagttcagaatgataaggtacataaacataaaatagatagcgcgaagcaatgtattgactcaatttctcactcttttgcatattgcagatcttcctttatccatcctcctccccttagtcgatctcttacttggtgtctgcctccctaagacttgctgctaaactacgacatcaaagtaggttcagaacacatgtgcattgcagttgttgctagaaatcaccttggtgaggtgatttgggtgacctcagcaaaattggattactttgacgctctttgcggtaaggcggcagctgtttgcttggctttagaggtggctttggaacaagaattcaaatttattatcgtcgagagtgactctaatccagtagtcaattccatcactagggtggaccctaggtgggaaatttaaaattactcctccttttttaatagagtcatgtcctcttttgctagttgtttattttgtaatatttttagaacttataattttatggcccataatgtggctaagtgggcgtttacccacaacttatttggtcgactttctatcttattcctaagaacatattatgtaatgaccgagaggtctaaattctctatttaatgaacgtttattttttttaaacaaaaagccttctcatttttttcatcacctgaatattgcttgatttgtgggctctcttgtccccaactataatgcacgtgctattcacgtgttactacttgttaccttttttttttctaatacagaataaaaagaaaaatggctcccaccttatttttgctattcaaatgatatttatttattattattatttaaagttacgttcaaatgatattttttgtttaaaattgaaagttagttcaaataatatttaaagattgtgattatttgatatttttttccatttaattgttaagaacttaagttaactttgaaatagtttgcaaagtacattactcataaaggttgcatatctcatcattgtttcgaaaataatttgcctaatatttttttataagtagggatacacatgatacaattcgatgtaattgaattgaactaattcaatttaatttaattataaaaaattaaatgtctaattacaattggaatgaattcaatattaaaatttaaatgtctaattggattggataggttattaaatgttaatgtcaaaaatcaattaaaaaccaattcaatacaattacaattaatatatattataaaaatatttatatatagtaaaacatttaaaaagaaaattgtttaattatattttaggctctctttatttaccaatacatttgattaattagtattcctaaaaaataattcaactccacctaaaactaaaagaatagcatgtttggcttattgtatttttttcaaacaagtctatagtcttaaatccctaggaaaaacctagtagctccttccttttctcttaaagtgttttcaatatcaattaggtttatgtaatttttttcatattttaagtttataaaaaaatttagtgtgtaattacgaaattgatccaatccaattagtaattgattaggttggattttgaggtcaaatcagattggatcggatgataattatataaatttaattactaattagattggatagaatgagaagaaaaaaattggattggatgagatgtccaatcctatttgtacgtatagtaaaaggactaatgattgatacacttaaattatacatcatttttgatacatgatatgtaattaattttaacaatataattgtaaataatgtgatccttatgtcgaacgaaaaaaaaaattgttcccacttaatgctttttatgattaaaattaaaaatatacattattcgatataaaaaatatgtaaagatatcaaatatgtcatcaataattttttcacacgaagtgggaaaaagataataaaaatttttccctctcccttcacctagatttggggtttagatttttttacttcacttcttctctcgactaaagtgttgatagcctaggtcatccaactagtgttattagctaatcagaggtatctaatggcgcctaggtttgggaactcctctctttatcggcttcaatggtggctcctctcagttgatggcttcaataatcgtgtgccttgcttcgaggatcgtccaaaatagaggtctttaaagattgctgggaggcagccgaaggaccaagggaaggttatacgcccaaatccactatatcagctcattctgacaacgtgcaagagctgcttgatggtagcgtcattttctctccctagctttgcaattagttgtccttcgaaactcagacctgagcattcaaggtttcttcgactgggatcctcaagtcttgagtttttggggttaaatcgataaactgcccgtaccacacaacactgcataaattgtccgcaccacaccacaccgcataaaaaatgcagtttgaaatcctttgtggtatagttacaattcgtattttttttccaaaccgtgcagtgtggtgcagtttgctgttgaatttaataattgcgattgaaactgcactgcactatatattataaagttactaatttttacaatatgttttttattcctttttcatataagaataaatatatgtatacattacattatttttttaaaagacaattcaatataatgacttgatgattagtatatatgttatgatgtgaaaactttaatgagattttttttattattactgttaaaactttatagattgatttttaaatttttattataatgttcaatattgatgatagtgtaaactgctcaaaccgcaccgcaccgcattgcatttttgcgatgtagattttgcaattctaagatctcacggtgcggttgcggtttgagaaattagaaaaactgcatatggagtttgatttgaaaaaaagcatacaacatgcactacctgcatcgcaaacatccctatatataaattaaaaccaaaaaagattttatttaaataaaaaattgaattcaaattaattaaaaatcatatttaattatttgaataagtatttataaccaaatcagttatagatatttattttgaattaaatatctaataactgattgattgagacaatctctcaaccacttgggagaatctcttaactactttgaagtaatatctcaaccaacttaaatatctataactaactttcaaattcaaataaatatctatcatttcaattaattaattatcttaaaaataaatccaatggagacattcctactattaaggacgcctattgttgtgtcttaacacaatgtaagtggcgccacctttgtcataaccagacaatggtggtttctattgtccaaataaattttgtcttttctctaatttatttaattaataaatttaaaaataaattatttattacaaaatatataattactattttgaaaaattaaaataaatttcccgacccttgacattatttcaa

SEQ ID NO: 116517 - DNA, 4069 bp, Cannabis sativa
tgaatttgataataaggctagtcaatttaattaatgggattgttttttcagtactttgcgattttatcaaaagttgttgctcaaggctcgtctaaattttataatatattggagataatcccattccccaccctatttttcatgcatccttgtactagtttatacgtttgattcagtgaaatgataaaaacaggcatttaaatagatgttcatatttagaaaaagccattgctcactgccaaataaaacaataaaaaataatcaattccagaaaattcagtattagattagatccttcatcaaatcccttacagctactgcagttgcagtgattcatttcaattcaataaatttcatttcatttattacgtaatttgtagatactgcattagccaggctaagttatccctcattttttatttgtaaagcaaacaaaatcattgcagtacttcagtcataaaaacagagccacatacaaaagcaaacaaatgtggaaaactttgagtccagcattctccaaaacatgaacgtcctatttgaatacgctatgaatcattgagacgataaggttactcatcatcttcatctgcatttgcaattataaagcaaaaatcaaacagtggattatgaatcagattgtataacaaagtaataataattagtgtcaatattattttagatcatgtgttttgcaattattactgataaaacttctgttttgtcaaatgacaaatcattatattttccaaaatagtgcaaaataatagttcaattttgaatatttcgcttttagtataactaaacagaaaccagccataacatctcccgatcatattatgtattattaagttttattttgacacaaaatgaactcagggtactattttgtactatttaaaaatacaaggttcgatttgttatttaacaaaataaaaagtctaatcagtaatttttgcaaaacacagaatcaaaaaaatgtaatcaatatagtcataacacttttaggtggcgtttgattaaaggtaatgaaatagaatagaatggaaaggaaactatttttatttggttgcatttaaaatcattagaatacaattttgatggaatggtctttccatcattttggtggaatgactattccatcattttgatggaatgactattccattttgaaatggaaggaaagacaatttgaatgcaagatttgaaaaaattaataaattttttcatcaatttttttttatgcactataaattttattccattccatttctattccaattcctaattccattcctattcttatattttcattcctcccaagttcctcctaaaatgtgaaccaaaaggaattataaatcggattgtatagcagagtaaagttaataataattgtagatagctctccgtaagtgttaaccagaattagaagcacaataaagaaattttaagatgaagctcctataaagttcttgacacataacttacacccccaacaccaccattttacggaagctaatttatttgtgatgtgaaggaaaaagaacaacgagcaaacagtttaggcaaagaagtttatccatttgagaagtaattaaaaacaaggctccacatatgatcgaaagacagatcattaataaaaaattgcagtaacaagcataaaaatgaaacaattcagctcttttggcagagcttacagtcaaaaagcttaaaaactagattatgaattagttatatgcttcaatatatttttgtaaataaatttcaactagcttttgaacaagcaaaactggcgttgtccaatataaagccataaaggtagcttcttcattcactattctatgaaaaaagtgttgatgctcagaaaagtatgaagacaatagaggaagaaatattttaatatataaaattctatcttatcatcagttttaaatttgcccaattgactccatactattgcaacaattgatgggtgttcagaatatcctaatgacactatcaattatcaataaccaccaaaaatactagacatcataaatctctcaagtacctccaagtccaactccaccagtccccaaatatagaaaaagaagaagagtagattatctcagtaaaaaattgttttgtaatatactaaagagttgcgggaaaaacccactcagatgaagcataactagaagtgcacttaaaacttgcaagagaaagaactgacagctatctgttgagatctcctgaagtacacatttatcaataatctaccaacaaaaaaaaataatggcttctaagagaccaaagcgaatacattgcagtgtcgtatacaaagatacataatttactactatagttcacactaccgctccactattcatagtaaacaaacaaacacacacatacgagcagcattaacaaaatgcagatgggtgtttaaggtcgcgcttttctaaacaactttgtactcaaatgaattatgttctattcttaaacccttaaaagaccgtaacttcctcaacacttttaaacattgtaattgcaccctaaaagacattcttcgctactagttgacaaagttcgatagtaccccatagttactctttgacctaaatataaaagaagataacaaccactgaattacgattcttatgtcatgattttctatacctatgttgacatattcaaactgaaatgtaacaacaaaaagttatagaagaactggtaataaaactaaaactggataatcaatttcataccaaagtaacggcgttcgttggcagccttggccttctcgagcatcttgtccaggtctacctggagctgggcgtcccatttcacaagctgatttacaaacacgacaccgattcccatgcccaaaacgtgttcccaaggatctgcatcaaaagtaagaaagccctgattaattggatttttttctcaggaaacaaacggaaaagggaaactataaaaagaaaatgggaacaggaaaatcaacacacggcgcatgtaagggagcttgcggagggcattggagtacatctgggtgcccaaacccaaaagggctccgatcgcggtcgtactaagcggcatcctttcgtattctcttctactatttttttttttttcttttcaggtactcactctctccgcctccaattataacttcgccccatttaactcccaaaattatttcattaataataaaaagggatatggcaaaagtgcccaaattattgattattagcccttttgactctacatatcccgttaaaatatacatttatttgtactcaaggtcccaaaattatacatgttttaataaatttgccctcaaattttatttttttagataaattagtccctaaactataaagattttgacaagttggtccccaaactttatattctgataaattaatctgcaaacttttatttctttagcaacattaaattcccagatatttacatttttattatttattttacttactttaacttatagttatatgttaagtttaaataattttatttttttaaaattttaactttaaaaaaaataattatattaatattttttatttattataataatattaataagttaatactttaatttattatattcatctacattaataataataaaaaaataaataaatactagcggacacatataatagctagaaagaattttaacccctcacatttttatattttagcatttatagtatattttattgttaattaatgaatatgtggtattataattttaataagaaaaagaacaattgaaaatgcttaaataataatattattttttttataaactacaaaagtagattatattttaaaatttatttttaacttatgtttcacaacgaacctatgaaaatttaccatcgttgatgcaaaatttaaataatcaataaatatatatgtgttaacgcagatttttgttaacgattataagcctattttcgcaatagatttcgcacataaattataggaaatttgaaaaaactaatagaaaacaaaaataacaccaggtttttacgtagttttgcagttaactctgcatagt

SEQ ID NO: 116518 - DNA, 2165 bp, Cannabis sativa
  modified_base (2136)..(2137): a, c, t, g, unknown or other
tagcggccgaggtccgccgctattgccctttagcggccaaaaactggagcaatagcggccgaggggcccgccgctattgctcctgaatgttgtagtgtccatcgctgcaatttctattcaaaaatgaccgtgaatcagaaaaaatgaatcccactttcgttgattgaagtcaacaagtatcaaattctttactcttggttactctcgtcaatggccgaaaaattcttactcgtgtactgagctgcaaaacatcctcaaggttgtagtctattcttgaacctaatttgtatcacagattgaggccaagatcgatcaatatgcaatagcgttacaaaatctcaagaaaggttctcttactctcaatgaatatctcctcaggattcgttcactcattgataaactcagctctattggtcacaccacctccaccaaggaacatatagctacaattttttgtggattgccttcacccgactatgacacgtttgttatctctgtcaactcacgtgttgaacttcttagagttactgcccttgaagccctctttttggctcaagaacaccgcattgaatgaaaacataaggatcttgattcagcttcggtgaatcttgtaaattcaaatttcaaatttggtaacaactcttcttaccaatctggaaaagaatattggaactcattttttgtttgtggaagatcaagcaataatgttaacaactaccctacaaacaacaataatttttttgttggcttctcatctcaacgacttgcttctggaggaaagagcaaaaacaacaatttcaattcttttaggcatgtaacaacaacagcctcccatagcgttctatatagcaggttaacactcaagttcaaagatgctattttagcaacagcaaaaatctcagaacccacttcttatgctcaagcctgcaaacagaaagtatggaacacaacaatagatgttgaaatagatgcattgaaaagaaaccacacatggatagtagtgactttaccagatggacagtatgccatagacaacaaatggatatacaaaattaagtataatccatgtggctcagtcgaaagatgtaaagccacattggtagctaagggctacatacaaaacccaggcattgactattttgatacctatgccccgtggcaaaatttaatatgcttaaacttctttttgcccttgctaccataaacaattggcacctacatcacattgacataaacaatgctttcctccacggagaattgcatgaggatgtttacatgaaactacctcaaggttacaccctaaaaggagtgatacctaaaaatgttgtttgcaaattgaaaaaaaagcttgtatggattaaaacaagcttcaagacagtggtatgctaaacttaacaccactctacttcaacagggatttattcaatccaaatgaccataccctgtctaccagataacaatcacatgtcttcattgctttactaatttatgttgacgatatcatcattgctactaacaatgttgcatcatgacatacttcacttcaagctcaaagatcttggagacttacacttcttcattggccttgaaattgctcgctgcaacaaaggtatatcagtaactcaaagaccattcatactttagctttttcaagatacaggacacctagttccaaactcgtcaccacaccaatggaacctaacatcaagttaaacaacgaaactggcaatgtgctgcaaaatccaactcactatcgaagcttaattagcaaattaatatacctcaccattacaagacccgacataagttttacagtcaacaaactcagccggttcctccaagctcctcgatagcctcactttcttgctgcctataatattctacagtacttgaaatcttcaccaggacatggtttattttttttacaaagcttgcccctccccacctcaactacaagcatttgctgatgctgattggggaacttgctcagatacaagaagatcgatttcaggctactgtgtatttcttggtcagtccctcatcccatagaattcaaagaaacaacccatggtttcacgatcctcaactgaagaagagtacagggctatggcaatgttgggctttgtgccctaaatnnaactctatttcaatgtaatcttttctat

SEQ ID NO: 116519 - DNA, 1889 bp, Cannabis sativa
aaactaagaaaaaaggaaactaaggaaaagaggaatgttgattacaattcatggtaataaataaaagatttggacatctacataattattaatatttataacactaatattgaatcatcgtggcatatttatactgctttaatgattcaactcatcaccaacaacaataatccacgtcatcttgaaatgcgcacttttagtacgaacaatttagaagcattgcaaacacgcaagcctcctgaatatgtacatggcttccttccccagatggactttcaagactgacaataggtacctttggattagtaacaagttctcagggagagacattccatacacggtacaagctaattatctagaagaaccttccggactcaacaagaccttccgcataggacttttagatccacacaaagctttcggtatctgttctctagattcacagcttccaatcccgaaagacaaaacttgtaaccataaccaacaataaatgttctcccacgaatttaatctattgttgtaaatgaatacctctaatttataatattcaaatatttctaaaaaaaatgcataaaaacctaaaattataatattttttttctaacaaaaagaaaaattaaaattgtaagttagatatatatttataattcaaatcataaaggaacaagattacatgcacttactaatttggaatcttggttttgaaaggtcattggtagttagttacaaattacaatcatctattatggtactatacttcagtcatgctagtatttctgtcaattgttgacgcataataatataattacatgtgttacttaccacaattatcaacaaggactatatctgtattagaattgttgaaaataccgtagtacagaaacaaaattatataaatgttgattatcgaaatttgattagaaaaatgccatattgtaaaagttgggttagagaaatagcatcttatggatctgtatgtttgaattcaaacaagcacattctgtaagcatacaaagtatctctataaaagaaaaggaatcgttattggatcaaatatagggaccaaaaactagacagtgaccacatgcccacagctacagtaatgtccattaggcccttcttaaagtccttttggctcttagaaaatggaaaaccggctattcattgtgttcaaatttcatcatcaaaccttttatagagtagaacattttacgtaaatgattctatgtatcataatgatagacccacttttgcaaaattccaaatttattaacgcgtatgtcgggtttcggtgtgatttcctgtaaaatagattcatttatgcaaaaataccaaatctatttgaaaaactatgcacgtgcttgtcccatgcgccattatacgaaatcacgtttagttttttttttcttttttagttaaaacatgtataaatactattcctcgtggtcaaatttgtcattttatcgaggtcaaaatcgtctttttgttggtatgccacttgcattgcaatttctatgggatgctttgtcttttgtctgactagcaatgcccggctagtggtttgatgatttggagtgaacaaaatgggatgggagagtcaacttgtaattattttatttaggttaattagaattgttgccccttgaattttaacatgtacgagatcatgtcctctaaacttttaaggtcgtgacttttatctaaattcattcaattttactatttaatgattgtttatgtactaaaccatgctgtccagactttgatatctaccaatcatgccactcgaattttgacctgtactaaattataccatctgaactttcatccatgttagtctttttactaaattccccctgaactattaagattgttaaatttaaggattt

SEQ ID NO: 116520 - DNA, 5478 bp, Cannabis sativa
  modified_base (5404)..(5431): a, c, t, g, unknown or other
tctctaattttcttacagttctcgaatcttataatattttattggttgccgaaaacttcggtcaacagatataataaataataatttttaaaaaatattttaatatttaataatactgaacttacattatttagtatcatattattattattaataattttatttatatataaaaaaaattctttataatgtaagaagaaattattcttcaagtatatccacaatattattaatattaatgagaattattattatataaatatttttatcatttttatgagttgataaagttctcttgctaactaattattattatttattaatataatatttttttattaatatgttttaaaaaaataatttttaattgttaatatgaaaataagttctaatttaaaaaagatcatttatgtgacaaaaaacaaggataattaaaaaagtaataaataaataaatagagtgttgctgaaaaaaagtaaaatgttattattattattattatttagttaaatactcttatgcataatgaattatttttatataattcaaagtcattgttattatatatttcccttgatgttatcactatctcacttataataacgatgatcatttttttaaattttcttttataaatttatttgtatagaagtatattttttggaatatttatttatgatatatatttaatttatgaattttaatataatttaatataaattataaaaataaaaagaattaaggagcaaaaagaaagatgctttggatcaattttaaaaatgctatgtataagagttactgtcatctgtgtttccaataagggacacatagattccaggtcagcaccaaaagtccatttgtgggtcataaaaaagataatttgggccaagctgaagtcacacagaaccttccaggaatacaccttagctccgtgactagatgagtttctgccaacaataattcgtatccaaaagcagctccagtatcatgatgttggagggccaaacagcatgttcctagaagacaagtctgattttccttttttttttcaagcgcatagaataaggaagtaaatgatcctcagatctcgacagaagatcgtgttcgttaacacaaatttttgtttacctaaattaattagctttcacataataaatactttatagaaataataataaataatttagaaatcaataactccagatatttttacatggttttgcagttaaaatttgcatactccacgagtcttttctattaatgatatttgttgagtacagaatacaatatcaaaatggtagtattttctctcaatttttttgtccccctttttctgtggaatatgaccctatttataggagtataggttgacagttattcttttgggatcagttcaaatataattgttcatgaaacgtggatagtccccacgtttcattcaatcacatgagggataatatctaataactactcaaccaccctttgtttttatcctttagacagttattgctgacttggaagatggtatctcgcctaacatgagttatcctccttgtctaacttagtaaggaaaaaatgctaagtgttggcaggtagtttgcctcgttaagtttcttcatttgagttaatattgcgagatgactatctcgctatatgtaatccgaggttgccgtatgtgattatatttattctactcgaacgaataaatatcttctttttgactatgtattctgagacagacgtatgtctcgtcaatattagttcaatagtttttatccttatctcgcttaagactatatattagcgagttttgaatatttttaattaaacttttatttaataataacgagttattttattctacatttaatgatataaactttattatatcattaaagttggttcatattctatttgtaggacacgggttagcttctgaagtgtagccgaattttgggtataacaattgcaatctaaaaagagaaactatctaaaatagagatcaaacaattaatttgtgattaattgcccacaattataagacacaattttgacaaatttaatcgtatccaatctgtctatccaggagatcgactccttcattggctggacttcacgagaacaacccaaattatgtaatttgatataaactccccattagagggaaaatagaaactaagtataattctctaaatactataaattcccaacaaatccttcagattaagggttgaattctcttacaatattcgcttaggtagaaagagacaacttatgctcattgtattaccaaaggcttttccagcttaagataaggactaaggctcgtccacaccccaaccatgtaaaaactatgtgtgttgttcttatttcttattctggattatttatttcttcaactttaatttattataattagttttatagaaaatctcagtaaatattttagtgctttccttgagagatgaaggaagcagtgataccatctgaagattacactcagtaatcatggtactcacccaaaacaagtcttgtcttcacttcactgatcttaatgccaaggcagaagatacagaagatcagaatgaagaaaccagccatcacaaggatcaacttggcaaagacatagatctagacgatcttatttaaagatgatgattcagaagagaataattctgataatgctaaagatgatcctcaagatacaccgaaggatgatcaccaagacaagattattgaagatgacactgggggaaaggataatctgacgagtcagatcccatggttattatggccaaaaaacttcaattaattgagagcaggttatctcgctaggaccagttcaatgagatactgctcaggaagatgacgagaatggaagatgtgatgacagccttgactaaagggatccctaatgtgcaaacaactccaacaacaaatgctcccaaaagagttgatccgaaagaacctggaaccttaaatacctgtaaggataaagggaaagggataataggtgaaacttcaaagaagactcctttgaataaacagtaaaagaagtctaaaactgaagaccaacctcaaccgaaaaagaaaggaaaccatgcttcaaggtagggtgaccaaagggatccctaatgtgcaaacaactccaaaaacaaatgctcccaaaagtatccaaaagatcttggaacgtcaaatacccgtaaggataaagggaaagggataataggtgaaacttcgaagaagactccttcgactaaacagtaaaagaagtctaaaactgaagaccaacctccatagaaaaagaaaggaaaccatgcttcaaggtagggtgactagactaattttaaaggcagagtcgtaaagaaagataagactaatgtcagagtcaaaaagtctacttctcgaaaggacaagcatcgtcacaataactatagtaatcaaaatgatgatgtcgatgaggtatatccaattttagacggcaacaatgggagtctttccagaaatgatcttcgaagaagattaaatgaaaagaaagagaaagctaaaacaaaaaaaaagtcagaccccatggggacaatttgagaaatcacatcaatgatcgtgttcgcggaagggaatcttcaagtgataaaactaaacccttggaacgtaaagtcaaagagttaatgaaactcacagagaagatctccaaaaagaaaaatggaattgtgtccaattcagaagaagaagatacaaaaccatgtgtgaaaagaattatagatgcaccactgctagagcgcttcagaatgccccaaatggaattttatgaaggcaggacggaccccagggaccacttgtccaagtacaattgcatgatgcaagttgctaaagccagtgatgatgcaaagtgcctttgtttttcactaactttgagcaagtccgcgaaagattggtggaaaaggttatctataggatcgatccacaactaaagggacctacaagcaatgttcaaaaagtaatttgtagcagtgaaggcctttgacttggaagctagttccctgaccaatgtcaaacaacaactaggagagagcctgaagaagtacattcagcgtatgacggacgtagtaacaaaaacaaaagttactaatgatatgaagacggtggctttgacattaggactagctaccggatctttgctatggggagatctccaacactaaagagcagagactttgactgatttcttgataagagcccaaggattcataaacttagaagatgcttacgcccaagcttacagagtaatgccagtaccttccaccaacatagcaactgcccaaacttcccagatgattactccatcaattttccgttcgacaactgcctttatgactcctactgtttacagaccaagtgcttccgtgcagctagctggacaagctagtttttttagattcagagcaatacaaaccggatatagtgttgctcccaaaaaataaaccaaaaagcagaagctccagagtccgatgtaagtcaatcatagagcaaaagaagttccaagggtccaagtcggaataattctacgaagaaaggaaaaactcaagagtcaagatactccgagtacacaaaccttgttaatactcgagagaatgtctaaaggaaacttgtaacatggtccattacaagaagcctccgccaatgtacaagggtagaagataaaaaagatatccaaacaagaggtgaaaatatcacggtgatatagggcacaccaccaaagagtgtgactatttgagggatgaaatcgaaggattgctctgaaatggtcatctattcaattaggtaaggataccggttatttatcctggacagggggttagacacggataactttatattcttggacaatatggaaccattaatcctccttagcgagtaggccacccacgagctcctaaaattcaagctcccaatgtacaagccctttaggtagtgcgaaattctccatcagcaagacctgttgtagctcccagttctagaaatccctatcctcctagaacagcctagctagcactagatgctcacgtagcaaccatttttggtgaaccacacattgtcgaaagcacctaaaattcacaaaagaagtacttgaatgaattggattaagttgaaactttcaacttggtacaatcacctgctcagtgtcatcgaatgatgaatttgcgaatgactttcatagaagatgacaccaagcacgtatatttttctcacaacaaccctttggtgatagaagctcaaattgcgaataaaagagtctatagaatccttgtagataacggaagctctattaacatcattttcaaagatgtcttcaaagctattagtcttgtagaagcaaatgtgttactgttgggttttgtgcccnnnnnnnnnnnnnnnnnnnnnnnnnnnnatttacttattaataaagatcaggaataacattttatgttgcatggt

SEQ ID NO: 116521 - DNA, 1727 bp, Cannabis sativa
ggtatctacacattatttccataacaatttaatgatacccataacataattggtcacttaaatttgtatcacactttataatagtatatacattatacatatatatgtacccacaatagaatttttttaatccaacatcttgatccatgttaatctccccaccacaacaaatatattgtcaccctaatcgcccctaattactacaagtcccctctaaaaagtcgcatctaataattcaaatctaaaagtattattagaattgtcgcccctaaaagtaatctacaaaattctgaactttatttttagggaccacataatacccataaagtcgaccctaaaaagtcttgtcagaaaagtatttttgacttttaagggcgacatataatatacatttaagattaaattaatttataataatttaataattcttaatatttcattactatttaataaataatacaatttttttattcgttgggttcaaaactaactaaatattttgaaaataattttttttttgtactataacattttaatttaatttttttcctattgcattatttttaccaaaatttcgattaaaaatcatgaacccaaaacttttaaacattcaaaaaaaaaaaaaaaaacataaacaaacattctagaataatttatgcacgaaaaaaatgattcgtctattcgaccgcagtatatttaatcacagaacctacttcactacggataaatatttaagatattcaaatttcactataacatgcataaacatattaaataataacataaactatgaaatttctaatatagaaaaatgctaacttttgaaatacaaaaacaacacaaggcctatggtgggtagcagtgatacggggtagtaaaacaaaggttaatttaaaaaaaccaaattaaaaaaattactatgcaatcaatatacacacatacacataaacatacacacatatataaacatatacatattcatattcatattcctattcacacagatatgcatatacatttcaacatatttatatacaaatatacatatataatcttacacatacgtacatatatattcatacgtatatatacatatatttacacatatacacgtatataaatagatttaaaataaaaaataaaatgttaaaaattaaaacttaatttatatctatacatatatatacccaagaatatgtccacatttttataaaaatacaaatattggtgttatgaaaaaatatctagaattcggtggtggacggtgatggtgcggtggtggatgatagtggtgcaatgagactgaaaacagagagagagaagagtgtacggtatggtgctgggtgaaaattcagagacagaggaagaaagaaagaagaagaagaaaaaaaagaaatggttggaggcttcggccccattatttatatagattttttccgacgcatttcgttgtgctggaaaaagttataaaacttaccctatattgaaacacagcgtttggaaaaacttttatcggtgcacatttgtgccactaaaagtattctcacctaccatatttttatgcgagaattttctcacattttttagaccttaatttcccccctaaaaaccaatttttttttcctgatagatgtcgtgataaatccaacacgcaagtatacgtatcgttttagcaagtaatactccggtaagtgagatcgttcctacgaggactgtagctaagtacc

SEQ ID NO: 116522 - DNA, 1380 bp, Cannabis sativa
aaatgtgatcttaaaaatcaatttaaaaagtttaaatatcatttttttgagaaataacttgttgcacaagttagtgagcgaaacttttaaacttataaaccctagtgtactatgcaaatcactttaacaagactaaattaaacttataccacttgattgtatgtagtcttgatgtagatgagcttcctagcttgatttgcatgttttgatccaaagttgacttttctctgagagttgactttgactttcaggttgacttttgactttgagcttttgaagtcctctttttggatagggtcttgaattcttgatctctcgatgaaactttagctcttatgaagtatgaagtagttgatatacttgttgaatctacttctttaattatgtttgactttaacgagcaaatattgatactttgtgattcgcttgcaaaataatcaagaaaagattagtaacaaataataatcaaatatttttttatcatcaaaataagtgagtgattgactttaggtcaacatgtttgtcctccatcatgttgaatgaagaaagagcctattttaggtacaacctgttcaagattgtaccactatgtccctcttatccttttcaggcatatctcaggcagatatttttctccaaacaaaacctcatacaatccctgatgaactagcgaggcctccatcttcatcgtccataactcaaagtcattcgaaccagtgaacttttcaatatcatacttaatagtcgccatgattttaagaaccttactctgataccttttattgtgattcaaccaatatgtcatcactagaaattcactcaaacacacaaacactatcaagaactatagctaaacaattgaatataattgagaagaaaagaaatgtaaaaaaactaaaaaaataacaccaaaaatttacaaggttaaactatgtataatgctctacatctcgtaaacacaacagacataaacatctttattaatcagataaagttacagagtttataaaaaattcttgtcaagaatataggtgagttacaagggttgcttatctcacttgtgtggaactctctctcgatctctctctattttataagtacggattagattagaataaaagtgatgtgaaatggtatttatagccttggaaatatctcaagacttaactgatttaactaacacaaaaccgaactaacttaacttgtccaaaattattactaactagcttcaattatattcataactggtaacttgtaaccatattcccataacaaatatcccaactagttttaaaatggagagcaatgtctatataagggtaaatatcattttagaccccgtgttttgcaaaagttaccaattggaccctgtgttttgtt

SEQ ID NO: 116523 - DNA, 3446 bp, Cannabis sativa
  modified_base (3331)..(3339): a, c, t, g, unknown or other
taaaataaataattattaaatttcatattttttttttaaaaaaaataacttatattttatattttttttttatgaattagagaattatattgcacaaaccaatttacatcctaggagcactcctaaaaatagaagcctcaagtttgaatctatacatactttgtatttacattattacaaatcataaaaccactctctatctttacaattcaatttcttgggcaaaaacatgatgatttggcttttgagtctccatttcaggttctctatcaacctgctacaatccaactgttcaccttgccaaataaacttgtttcgagcctcctaaatactgtacactaagcctgtaataatagcagcaagtacattcttcctaaacctactcacatttgtcctacctatccaccttatgatctgtggcaggtctgaagttgaggttctccaactcagccaattcttggctgcttgtagacattggacagcaaaagggcacttgaagaacaagtgttgtgtgttctccttttgtgtattacacaagatgcaacattcctccacttgtatactaaatttcactagcctttcctttgtctttagcctattcaacattgccaaccatagaataacactatgctttggaatgttcaatcttgccaaaacttcatggctccaagacactcggttaggactaggtttgaacaaagtatatcctgctgaaatgtggtatttctgtacctgaaatatagcaggatcttgtattgttttgaggttgtccttgagagctacaagcttcttccaatgccagctggagtggatagaagccgagtagcgctaccaatcctctctcttgatgtaaacactatgaacccatcttagccataggctttcttgtttgttcgcaatagtccaaatgtatttacacatagcagccttattccattcctctattcttttaattcctaatcctccatcttttttctgttggcatacatcatcccatgccacagcacctgccccatgaaaagcagcttgccctttccaaaggaaggctctacatatagcctttatgttcttcaagatcttcttaggcataatcatcatttggctccaataagcttgaatagctatgagcactgagtttatgagagttattctacctgcaaaggacaaatttctcgagctccagatcttgattctagcagtcatcttttcagccaacaattcacaatcctttccagatattttttttagatgaaattggaattccaagataggtaaaaggtagtacctgttattggaaaccagatttttccagcaaccattgaacttcccttcgagacatgttgctgcaataacaagctgttttgctaccattcgaatttaatcctgatgtacttgagaacagtttcagtgcttgtaacatgtacttaatgctcctcacatccccattacaaaataaaagcacatcatccgcaaatgcaaggtgattaagctttaactttgagcagccattatggaatttaaagtcatcattctcccccaatccttctcattaatctagacaaatattccatgcctaaaacaaacaaaagaggagacatagggtctccttgcctaagccccctcttagattcaaagaaaccatgcaatgatccattgaacataagagaaaacttaggagttcaaacacaattcataatgagaggaataaaggccttaggaaatttgagtccatcaagcatttcctcaataaagtctcactcaacagtatcatatgccttttgaagatcaagcttaatcatgcaacttggtttgttagctttccttccataatgtctcaccaagtcttgacagatcataatgttatgcctaatatatctacctttaataaatcccccttgggaaggagaaattatttcaggtaaaatatttcggattctagagctcaagagcttagttgcaatcttataaataacatggcaacaagcaattggcctaaaatccttaactgtgtttggacatttcaccttaggtaccacggtaattttgtagaattgatctcttttaaaatgttagtctaatttaggaatgataagactgctttggtaaccttctccccaatgatctcccaattatcttggaaaaaatagctcgagaatctatctggtccaggagatttagctccagaaatactaaaaacagttgccttcacatcatctttagtaaactcttaaatcagcatgtcactttgctaattggataagcaagggccattagcaagcactttaggatgagtcttccttgtattgtctaacctggaaccaagcagctccttatagaaatcaagaaaagctgctgttatttggttaggatcatgagttctactcccatccctctgttcaatagaaagaattcggttatgtctcattctttgcttgatactagagtaaaagaaagcaatattgcaatccccatcttgtaaccaagcaatttttgctttttgttggaggaatgaggcataatttttctatgctaaaatcaggttttcccgagcctctctttcctatccagtcagtgttgtattcatcggctgctggtgtatttttgtctgccattcatccaattccagctgaagttttgctacagtatgctgcaagttattaaatcttccttgttaatctcgttcaatttgatctcgaaatgcttgagctttgtaaccatttgaaacataggagagcccattatcttttgtgtccaacactctttaagacagccatcatatcttgaatgtgatttccacattcaaaaatatttgaaaggcttcttgcccgaagcactattaggatggagtgtaagaacacctggagagtggtcaaatagtccttcattcatgtatactacttcagcatggtcatatctatttaatcaagaatgattggccaacatcctatcaatgttagaaaaaattctatcctctccttgttgcttgttagaccaagtgtagtagttcccactagtcttaatatcttccaattggcattgagtcacacaattcaaaaaagctgaatccgggtagtacttcaccttattcccaattctctcttctttagctagtatgtcattaaaatcccccatcaggcaccaattttcattagtatttacttcacctaaactcttccaaagtaaccccttttcatttcgattatttgaagcatatatcacagttatgaagcttgaaaaaaatccatctattgttgatacttttagatgcataagttgacctgtgcatctaattatatcaacaataaatcttaggataaataccattttggannnnnnnnnttgcaaaagttacagattggaccaagtattttgttaaatgacaaaatggaccctgtattttttaaaatagtaaaaataggaccctaagcttaatttttgacaacttt

SEQ ID NO: 116524 - DNA, 1200 bp, Cannabis sativa
caatagaaaaaaattagaaaacataacaaaatagagaaaatagagaaatggaaggaaaagatgccacatcaatgctcttatgctttcctttatttagatatatagatagattagcgattttttttttgtaatatttattaaaataaaaaaatactacacactataaataagcgtcttcttgtatgtctcttttaacaaactcttctacaaatagactatttcacaaattattaatgctctgctctctaaattcataattactgaaataataaatgcttattaactaagagttattgataattaatactaaatattgctactaaaatccttgaaaaaaatcaattttctcattaattaatcaaaaactaagaacaaactaccaaattttgttaggctaaactaggaaaaaccaaaaaaataaaaaataaataagttaccgaacatgcctttagtatatacgtatctcttaaataatttattgtttaaaatctaattaaatgaggcgatatggatgttttcaaaatgaatagaagactaaatttattaaagcgacccaaacaaaaaactaaaggtgtatataattaatcaaaagtcggataatttattgctaaagataacgtgcaaaatttatgttgatataatttaaaattattgtgtcgcatgtgaactatgtgctatcctatatgcatgtagccttgtacaaagagcaatacaatattattattttatttttaattgaagcgtttatataatttcctcttttagctacttgagctaataatatgaagtaataatacaatactcgatagtcgatatggtgatagtaattttgtttcaagcttatgaatactacaaggttactttaagatattaagttaacaaaatttaatatcctctcttacagggatggagtcagagaaaatttgtgagtggtcaatgtaaaaaaaaataatttaaggggccattaaataaatttttaataaaatataaaaaaatacaaaattataactaataaattataaattaaaaaaaataaaatttttacatcaaaaatacaaaatgcaatctttattatatcaataccactacacggctatattaacttttttactcttcttctttattttattactattttaccacatgcacactcattcaaagcatcaattcacgtgctgacctataacccctatcaatcaa

SEQ ID NO: 116525 - DNA, 1822 bp, Cannabis sativa
ggcaaacctataaatgccatatttttctaacttttgtatgaaatctcatatttcatgtaattttcacaaaagaaaatatagtactttttgaaaaaaaaaatctgctccaccataaaaaagaaaaaaaaaatgaaaacttcagtattgtggtgtacaaaactcatttacttattaccagcatatatccaaactttttcataccttaaactaagaacataccaacaagaaattttcatttttttttctttctattttgtatgaaaaatttaaaaaaattagaaaaaataatttggagtaatcaattattcttagataaccaattaccttcttgcggtaaccagttactttatactattttttcttttttttccataaaataaattttcatatttttgcacaaattgtataaaaactttcaaatgtataattttcaccatgcaatataattctattttcaatttttcatttggtaagttactgattggttactttttataaaagaaaaaaaaaacagcttaatttttagacaattttatctcatatacatatttggtacttttctattaattattttttgtaaaaaaaaaaaaaaaaaactatagtttcaattttaggctatattacattatattgttgtttaagatacatttaggttactattaaacctatttaggttgagcaatgctatggagcactaaggtgcctagcatcactacgaggtggtgtccaaatattagttagcaattattaataattaataatctttaataaagtaaactaagtgagacttgatatagaattgcatcattagcgatattatatctcataagaatatatgaacaatgaatgccctttagcaattctcatttaggttatattgtgttttcttaatctttaagatacatttttattaccacataaagattatttaaaaaactaataaataataataaaaaactttgaagttaccatataaattctttggcgggcctcacaaatatatgtatcgatgttttccttaatattttttgacttttagagtaatttaactcgacaaaaatgagggtcaaatattttattgtaagtgtgtctcttttattttaaatgcatgtgaaatagattatgaggtgtgttgtttatcacaacaaatttaataatgttattatttcaatattactagttacttcaatataacagtaaatacagaccgaacaaactagaactataattaatttattattcaatatgaaacataaaataaaatgagagattttgagttcgcaaataaaaaggaaaacaaataataaatgacaattacaattataattattaaagcagataagaattattctctactttcaataatcaatcaaaaacaataagtattatttcttatttttaatttgaactattaatcctacagataattacttatcttagtctcccaattaaaattaattacggtaaaatgttcaataattaaactttttactaagcaatagatccatgaagcatgcaatttatttacttagaaaaaaatattagattttatgaagacaagttaatctatgtaacaaattaatgaagcatataattcatttaacataggttgtattcttcatcacaattaacaatacgtgtcacaatactatttaaagtaattgggatagtggcggaaaactacctgatgttgcggattaatagacctattcaagatcaccataacaacaaatttaaggacaacaatgacagtgacacaaacattaatgcagaaccaaaacttaataaaccatttgaactaaagactaaagatgaacaaaaa

SEQ ID NO: 116526 - DNA, 1717 bp, Cannabis sativa
tctctctctctctctctccctagtctcacacgccacacacagtcaggtgtggtgtgagtttgtgatcaactctatctcatcacagtatctcataagttgagaatatattgtgatatagaattatactcattctataaaatctaatagctcactctattcttgagtgtttaggcttacttagaagattgtggtgtgaactcttcagcaaagttcttagattggatattcgattataatactaaaagatagcacggattctgtgataggctttatgagatattgtctctctattcattagtctagatttaatctatattatgttgagatccttgagcttatggttcatattagataaaattattttgttatcaaaccagctttcacatttccaactctgatatggaccataaaaaccaacacatcccatttcaatcatgacacgtagaattatagaactcacatggtcatctagtaaagaatcatcaaaagattctattaactaagtttttttttatcaatttattagtaatctttagttttgctccaatatatagaaaatagaaatggactaagcacatactttattatctttaaagtattattgataaatgattattctattgtaataatatgggttacaactagttggttatgcaaatgcagaatatttatttgatattataaggccagatctcaaacaaactatttgtgcatatttggtaacacttctatatcttagtatttaacaaagtaaactttggtagcgacttccttaaataatgttgagaaacttgcgattcacaaggcaactcgagaatgtatatggttaagatcagtgacacaatatattcaaagatcgtgtggatcaacatctcataaagaggtaccaacaatggtgatatatcaatgttcaataaaagagctagaactaaactcattttacaaaaaaaaaaaaaagttatgtacacatgatcttcaagagaatggtgatatcgatgttgatcaaaaatttgatcaagtgacaatcatgaagacttattcacaaaataattaccaacatcaacattcgagaagatggtacacaagatcagaatgtgccgattaaaagaactctaataatgccaaaatgagggagagtgatttcatactacactatgtttctcttgaccgagtttttgtcccactgagtttgttagacaagatttttaatgacgtagtattatgtgtatacaagggtagtattatataaataatatatacatatgtgaatgtccaaatcacctaatcaattacttttgaatgtaattaccattatttatttatttttaatatcgtaatctgtctcacatttttgtataaacactataaaaaaactgctacttttaatgacaactatttagtcacaatataatttttttgtaactaaatgtgacttttagttacaacaaaatgttgcttgtgactaaagcataatttagatacaagttttactaagttaattttaatcacaacaagtattgtcactaaaactacatttcgtcacaataaattgtaatttttttgactaatacttttagccacagaatttttaatcacaacataggaatggtgatttataattagtcacaaattttttttacttttattcacgagttttgttgtgactaaaagtaaaaaaaaaaattatagtgaaatatgttggactttgtgccctaaa

SEQ ID NO: 116527 - DNA, 1819 bp, Cannabis sativa
aaaaatatttttttatttataattctttaattaaattaatttttaatatttttaaataattttacgtggatcgataaaattgtgtcacgtgtacagtgtccaatccaacatggcaatggaccgaaatgttaaattgttaacagaatagaagtattgagaattttaccgcccaaatttgaattttgaaaattaagtaaaaccaaaataaaaattttagatattttgccgcaatttacccaaatatatattatattttttctctttataatagagacaccagaccaattcatataccaccaccaaacacaattgtgtcttttccactgacattaccacctgcatagactcttttccttttctaaaacgttttaaccaaaattggcagtagtactatatacattattcaaaaagggaaaaagtgaaatatggttttgtttgaatttgacggtagaacaataaatttggttgatgatatttgcaactgtaagcaaagttatatatgtaggttttattttttagcttctcaactgattaagctcctcggtttaaagtatttttagaattttagaagcccaactaactaagaccaaatgtagcttacttggcttggagtggctatagctacaccaaactgaaatatttgtatataataagaattgcgtgtcaaccatggcaagctaacaagaaccaaagttaacaagacaaaaacaaaagagctatatatgctttgccttatgtgagaagcatattaaccaatgcccatgcatgtagggtgtcccatcattttctcttgaacaccctataattattatatatttatacctacctacttcattaattagctttcatcaaaatcataattatatgatttataatgatacaaaattttattatttcttctaaacaaattaaaataccgcataatttttcaacactacgtacacttacgtcgtgcgtttctaaatatatatagcttatatttttccttttcacttttttcttttgcctttttctttttctttttgctgtgtcaaactatgaattgtactggttttgtctaccgacactttttttttaacaatgtctaccgacaattttattgaatgaaaattcacccaaaacttaaatatgtacgaaaaattacgtatagaatgacacatctaattttggattgttgaactcactttctcactacaaattataaaatcagttgatttatcattttcgaaataaattaagcaaaaatacggtctaataaagggaccttccaccctctttgtgatcctcaaattcaacaaacttattattaatcaagctgtagtgattccatatcaatctcaagaacaaaacaaagagtactggacaacaattaatagacagaaaattaatcaaaatttaatttaagcaaattaacaattgaattgaaaaacaagattggaatttttcagataatgaaaaataacattgaaaagctatgagacctttattaataattgaaatgagtccaagagagatccactcgagaagattaattagcttctgaattacacaatatcgcgccaatgagggatcaagatcagaaaaatatttgatccgagtcacaacccccataagacagtctgtatttctctatctattgttctactaatctcatcatacaagtaaaatgtgtgttgatcaatttatagaattaagagagttaaataaaactattattactagggtccatttgtttgctcttacaattagttatagtatgttggttatggttacaagttttatcatctgggatggaagctgttgattcagagagccacta

SEQ ID NO: 116528 - DNA, 1532 bp, Cannabis sativa
  modified_base (1474)..(1482): a, c, t, g, unknown or other
aattcctcaattaactcataattatctaattacgattttgctaatccttttcttaatctcgggtattacatcaaatgtgaagttatcgatctcaatttttaccccaagggagttacaaaaataagctccggcttacttggagtgggtctcgtcgccgcggcccaagctcaaaaaattgactatcaacctcaaaagttaattttgatcattagatcatcatttacagtcaaaattaaccaatttatatttttttaatatttagaattattttttcttattttcaaggacctccttcaccaataaaagaagagctcctctaactcatttttcatattcaaaaaactacccacaaggttagagcatctctctctagtttctctctctaaaaattagagctaaaacacttagctatttttctgtaataccatctcgtgagaaataatacctcgaagtagacgtagccattgctgtcgcgatacatggagtgaactactataaattgttgtgtctctcgttatttatacttaacaaatattttattctcgtcaatctagcgagcaggtatggcttaggaatctttgtctagatttttaggtcaacaattatatacaacaccattatcgagatgtccatctatattagaaatctgaatcaaaattgaatgcacagagtaatgggcattaatgaaccatactagcaaccgttgattaaaaattccaaacttcaatatgttgctgactattttattcatagctcatgaccttaattctttgtactatacaaaatcatagcctcatatataaaataggaattttctgatatttataaacaaattattcaacattcaaatatatatataaaattgtttcacttatatttataatctaaatgtctataacatcttttcaaagtataaaccctaacattcatattgtaagaacctgaacatgtacattacactagagggtcaagaggaatgggacaaggaaaaggattccacatactatgttttttggaactccacacgatctcgtcaacctaggtcatgtgtttccaatcaagataccaggtaggattgacttgcaagaaatacaagtcaaactcgtcctacctaatactagaaaaatcctcaacatgaggagcatagattaggagtgagggtgatttaccttgccccaaaatacttgctctaggagtctcaacatttgtgtgtttgtcctcgagcattttttccaattcaacagatctggctctggcctccctgcacttgcgagccacttcttccttggcactatccctctcgattgctttctccacctctttcgtgttaatattgaccagctcttctagcaaagctggacacttctcaatggccaaaccaaaaggctcaaaggcttgatatattggcgattgggagttagtttgaacctccaaaaattattagtacttgatgttgggttttatgtcctaaatnnnnnnnnntttcaatataatctttatcctttaaatatcaataaagaaacataagtatt

SEQ ID NO: 116529 - DNA, 1582 bp, Cannabis sativa
  modified_base (1485)..(1495): a, c, t, g, unknown or other
accttttaattttacctttttgtataaactcccccctcaattttatacttaagattaaaatattagatatccaaaaaaaattgaggttgtaacaaaaataaaaataatcatggattttctcccccttttgattcatcaaaaagggtggcaattcgaattcacaaaataaagagaaaaataaagaaacacttcgcatgcattagaaaaaaaaattaaaaccattacatccaataatgactaagacaaataacattcaacaaactaaaaaaaataaagaaaatacaatccaacacaaagtcaagaggcattaagcctttgcacacaaacaaaacaaaatgaaacaagagtaaagatgcaaaaaaacaaatgcaagaaaactagtttggtggagggccaaaacgatccatgtataccctccattgtgccatctcatcttgaatattttcaaacccatggaccatgtcactcctcatggtgttgatataattattgagattggtgaattgagagttgatattattcctcaatattagaaattgagtgtcacacatatcaaatcaatactcatcatagtgagaaagactatgtagttcagttcaattatcatcagaaggagagcccaggttcaaatcttgatcatactctacgacgaaaaggatcaagagttagagatctgaacatacatgtttatttgaacttgggtaaggatttcgtaatcccttatatgtttatttatcctttaggatattcatatttaggatgttagattatagttatgtaatcaacatacatgttagtaaatcaagattctagtaaaataataatttatagtatatatacaatgtacatacactatatatacaccatatagatactatatatactatatattatataatatatacacacataggaacacgaagagacccttgacccgtgagggtctttgttctctaacatgacaaagatagggacatgaagtcccttagcatgttctgcatgcttcgaatggaccgatgggttctaaggtggtttgaatggtggtcaaaccactatggtcttcgaccacttgaatggtcaaaacgaagacccaaatgggtcttaatttattgtcccgtccgcacgttagagggactaacatcccatgcatgcttcgacatgaaatgaggaaactacctttattgtcattgacgtcatggatggtcggggtccttgtaactcgagctccacacggtggtaaaatggcagtgcacggctagggctccatagaaccggagctccgtgctagcgaacattaaaccgtaaaagttacgtaaaaattattttaaggaataaattacataaaattcctatgccatattatggcttacacaatttttctataaaattaaaaacaaatcctacacccaatttttaccatataattaacatcaccatctcacatacattcataatattataactgttaacgcaaattttcgttannnnnnnnnnngcctcacgatgataattcaacacaaaaaaataaaagctatagaaaaataatatatgaacacatggttttttacgtggttttgtagtt

SEQ ID NO: 116530 - DNA, 3388 bp, Cannabis sativa
caatagggaaacaaaattaaacataccagccgaaaataataataaataataaaatatttttgtcaattaaatatgctaaaaatggaattaacaatctttagtctacgagttggtagtattagtcttctagggtggatgtatgagtattacaagtgtttacaataataatctctgtataccttttgattttttagaagaaagctctctaggaatttcagcagagtttctctaagtaaaaattgttcacccctcgctcataaaaaatagaagtatttataggcactcatggggatgagggcataccctttacccacctagggttttgtactctactcattgcaagggtcgatactataataggacaatctaaccattagttgctaagaaccttcttcatcgtgtgccgtatagctgcagtgagggatttcgtacaaacaagacacatgtcgtgcaaaggtctctcctttgcaaaatactgtctaaccaggcaattgggtaaaagacatgtccagaggtgcgtgcccgcactaccatggcctagcatgggggacaagatttgatcttgtctcagaaaaaggtataaccgccttaagagcgatttttatatgatgctggcgtggtcattgaccatgagactactaccacatctcgggaccatcaccagagggatttccattcgggagccatctatctgaactaccctctgggtttggaagatgttacttgtctatggctcgtctcgtcaggtgtctagcgcacatttctaggattgtcaagatgtcccgtccgagagaccttatgaattattttgattaatcatttcagcttataatctcatagctagattattagccttaagtatttttaatttaaccccacaataaattaaaaaatatcgcttaaggtatctatacatttagcccttgatattttaatacatgtgatccttaaatagcaatacaccaatatatatgagcttatattaaggattttaattcacgtcttcttaaaatttatcaaaagtgttaattttaggtattcactcgggctattaggtttgtccctttgtgtgaaatttaatcatactagctagcacttattcttttgataatacgtcttgttgtcaggcaattatagaattagtcttgtgttcatttttaattaagagtgaagatttatacaaattttttattagccttcgatccaatccttacacaattgtataaacaattatcattggtacttttttgccataattattatgccttttttttagtaatgtatattaattttgtttctgaaaatattaaaataaactattaattagctgttcatgatcaaaacagtaatgaaagaaaaatcattactagactagtggagtgttatgaaagaaaaatcatcatattctatagtttcggagctgtctaataaattgtaacaaatttaattaattttttttttgacgtgacaaatttaattaattgatgtacataaaaaagaatgagatacccaacatgtatagcattacttgtttgcgccataaaagtgttttttttttttttctaatttaagtattccacactacataggccaagtttagttttaagttatttttagtttttagaattaaaatttttagtttttagaattaaaaatatatatatttagaattaaaaatatatatatatatatatatatatatttttaaaggtgtttcaatgaagttgtttttttttttttttttttttaatttataagtacttttagaacaatttaaggtgtttaaaggatttttacccctaaattttaacatgtatcaaatcgccccttgaattttttggctgttaaaaatttcttttgaactattaaaattattagatttaagttgtttatttaatttcattcattcaatttttactatttcagtaattgtttatatattaaataatgctcctcaaacttttatatttaccaaatcatgttcctcgaactttgatatatactaaatcatgtcctttggactttcatccatgttagattttttttactaaaattagataaaagtctttttaaatttaataatatcaatagtttagggatatttttaaagaccttaaaagttggcatgattttgtacatgtcaaacttcagaaggtaaaattcctaattagtctataattcctaaattacttacacaatattgtttttaatgatatctaaacattttaaaaagtattcttcatttaaaaaaaaaaaaattatctaaacagtaaaaataagtcaaaatttatttttattttatgcttttaccacaagcttgattactgaatctcttgaagattgtgacaatgtagcttacaagttataagctatatcatatccaatcaatttaatttccttatagaagatcttaatattgtgcaaaacaatcttttttgtttttttataaccaaaaatatatttatcttttgagtgtggcataatggtattacaattattttaataacttaataacctaacggtcttgggttcgaacccataaccactctatttttcccatctctctcttaccattaagctaactttagtgacttaaccaaaaacagtgtaaatatcatcaaatctacctttttgaattgcttggtgtatgattagaaaatgtttcctattttaatttgggatgatgaccaaccaattatgtaaaattttacttatctaactatttttgtgacaacgtaggactataggaggagtactttcttgtcattttgttcatagtgcggacaacaaagtatgtaatatacatacttctcagctttacaaaagaggtagctatagtatgctttgaaaattatttgtttgtaactattgattttgtataaatatattaaaaagtatgaacttaattttaaaccccaaagatatatgcatacaaaggttgcgtgaatatagttccttcgtacagacaactctgtcacacattggtaataatttgaagctttgtcgaaccccaaatgttaagccttaaacattaaattaaataacaataataaatgattatggaaactaaacagaatcaaaccaatccagccacacactagtgtctttttaaccgcctatacgttcttttttgaattattctttcgtttttttgtgtcataactttgatccaaagtataatatttcgtaactagattcggtttttttacatgtaatatttttgttaatcaacaatgtaccagatttaagagcaataatgtagaagattccttgtggcttgtacaaagtaaaaaaaaaaaaatatgggagaagtttgagaatgttttttttggctaattagcaatttttcccctcgaactttgatatataccaaatcatgcccactgaa

SEQ ID NO: 116531 - DNA, 2846 bp, Cannabis sativa
  modified_base (2193)..(2208): a, c, t, g, unknown or other
attataatatttacaaaggattcggggccatcaccaatctccaattcggacatgggacccaaaccccgacccagactccaactcggactcgggacccagacttggacttgaaccctgacccggacccgagacctgaactcgggacctgaatctggaccccaacccggacgcggacgcggaccccgaccccgacccgtaccccgacccagaccaaacccgaaaccagaacctgaactcggacctcggacccagactcgaactcggacccggactcgggacccgaactcaaatccggaatccgctccggactcgaacccagacccgggacctagacccgggacccagacctaaactcgggactgggaccataacccaatacaatacaacacaatctattaatacaagtcaataccaaacatagtatttgtattaaataatactaatacaatacaatacaacgtaccaaatgaacccttagtgcctaataatactcttctcagtattatattgttattgatatataattaagtatcaagttccatataatttagaaaatagcttttagagaatatcgttaaccaatcatggagcgccacctataaaaaatgttagacactattaatgcccaataacaatactcagatatattaaaattttatttcttaaattactatacaacataatgttgtcatgggaggccctatacttttagtaaaaaaattaaaatatatatatatatatatatataatacttaaaatggtacctatttttttttttttacagtttaaggacttttattttttatatttttacaaatttgtaatttgttagaggagaaaaaacattgttttttatgttgatgtaatattatattatatttccataatgtgtaaataacagttttttttagaataattttaaaacaatggtctgtaagaaaaaaaaatcgtaaaaaatattaaaacaaaatagaattttgtaaaacgtaaatttttattatttttagatatgtatagttctagaaaagtatgatatataataggcacataaataattaggtcatatcttcgattcaattggtaagtaacactaaaaattttaaatacttatgccacaatatttataagcacgataaaattatgatcatattaacatattttttttatacacaataatttagtattaccattcatattttttatacacaaagtagaagaaaaaaaatcttgcaaactacaatagtaaggaatatatatatcaacaatataattggatttaatttaattaatagttattagtagctgcaaagtaacaataataaataaattaatagtcattgacttatgttttagtcaatgacaaaattaattggacagaatgacttgtaaattgaacttaataacaatgcaagattttcttatgacatgacactatataatttatttcgaaacacaaagaataataagaaatcattaaaactcagtgaattttcttaaagttttatttctcacaatattaattttaataattttcaaactttggaaaaaaaaaaaaaacaaataataatggttgaggaataattctgttatgtaatatgcttttggattgattattgaggactattagaggcttctgttttgagatattcaatgtctgtttacattttgttaagttgtctgcaattcgcatagttcatctcttagctcgagcttcagggtcatatgttgattgcatagcaatgctcaaattgatattttatctgccgttttaattagttgatatttaattaaagattaacatactattttatatattgtattttgtaaaaattactgatcagattttttatttcgtaaaataaaaaattagatcttgtattctttaaaataatacaaaatagtacattgatctcaatttttcgataatatatttttaatataaccaacttaatttttagtacgaacagatacagaaaatgtaccaagttttgtgataacaactctatcgagtactattttgtactattttaaaaaatataggatccaatttactataggcgtggatcattaaacgtacctattcgaactttaacaaagttaaaggtccatttaaattttttacaaaatatagggccaaaatatttaccatttaatttatacaaattttggtattcaataataataataataatnnnnnnnnnnnnnnnnataataataataataatgtataacatgagactagggttactctttctttcttagtaaaagtatgtataggcttaataataaatatcttaattaacttaacattattctcactaggaagagatcttatatatatgctatgcatattctcttattcattgcattatgtatatatattgttgatatttttgagaaataacacaccattattaattgttaatggaccactaagaatattatcttattctttgcattatatgcactatatcttgctaattttgagacctatatatatataacaccattgttatggaacaagactcactagctagctagtagtacaaattttcaatcacaaactacttttggacaacatgtgcatgatatagtagaatatatttatatatatatatatatcatgatcaacttcataagccgagtagacctaataatatatgtgcatgcatgcaccaaatattcatgtagcaagcatttctaagttagtgggtccatatgtacatttgaaaagacttgctatacatggagggttcatttaaaatatagtattaaattgtattgtattatattgtattatattgaattgaattatatatcatatttttatataatactatgttaaa

SEQ ID NO: 116532 - DNA, 2692 bp, Cannabis sativa
  modified_base (2432)..(2442): a, c, t, g, unknown or other
gtgtttaatttcatcgtattagaaaattcatattgagggtgttaatgaacatacttgtttgtaaatctagatcctggtaaaataaatcacaacaacaattccctaaaatagatttctgcacctacagaatcgtgagcagtaagtgcgactttccttttatagaaaaggaaagtcttgcttcggttttcttcacaagaaatctgatcaaacatattaggaaactcacagaagattagattaatacagctggatagatacaaaaagaatgagtcatcaaatttaccctatgtgtcttatttttcataaatagaaaagctagacatatatccttccatatataaatcaattgatacaaaaatatgaaaatcaaatacacaaaatatggaaagtaaataaacacctcaatcaaaattaataaataaattataaaatatttttgtcaaataaaagatcctaaaaatagaaataacaatttgaaatatctcaccaaaattacattttatttgttttacctcatatttttacacaatattatatatcagtaactttatacttttctctacatcatttaaataatatattttttatatctttatcaattaaattaatatataaaagtaataataaataatgataaataacactttatttatttagagagtgaatataataaaaatgattaccaatactattttttggttgagttccattatttccacaaacaaattgattatgacttaatttggttaagcttctagttttactcatagtattagataagtataagctttgtttcacttttatcgtttagataaaagtactttagataactattatataaagatcttttttttttaatgaaaagtactttttttttaaagtgtttagatatcattagaaaaatattttttgtgagtaaattaagaattatgtaaattattttaatttttaaaatagcttctcaaaagtcattttgggagaagctacaaattctatattcttccaaaaagttttttcaattaaaatgacttttttattttttattcaaacactcctggaatgacttttgtaatcctaaaaactaaaaacgagcttataaaaggtaatctattgattttttgttaaaattataagactaattaggatttttactctgaactttgacatgtaaggtcgttaaaaatttcccctggattattgagattgttggatttaaggatttttattcaattttagtaagaaaaatctaacgtgaattaaagttcagggacatgatttgatacatatcaaagtttaagtgacatgatttgatagatatcaaagtctgtggagcataatttagtacatgaacaattatcaaattagtaaaattgaatgaaattaaacaaaagtctttatatccaacaatcttaataatttaaaaaaaaaaattaacaggtaaaaaaatttaaaatacatcatttaataaatatcaaaattcactaaccaaaaatccaaactaatcatataataataatttagcaggataagttatatcaaattaccatatatatttttatgaaatatcaaattatcatattaactgaatatttttttaatatttgtatttaccaaaataatttactcttttgactgttttttttttttttggaaagctctgttgacttttctttgaaagctattatcatttaaatgaataagaaaaaaaaactttactttttgtccacttttgtagaagaataaaatgaaaaatacattcattatatatttttgtgtttggtttgatatatatatttcaataattaataaaattatttaaactttttcttttcaaataacaaaaaatatctaaaccttgtggcactggattgatttatttttcttttttaacaagactgaagtagtatttattcatttaatggagctttcaatttatttatttttatccacatgtgttacatgttatatttaccttctaatctctagtctctgcctggtcattttctctgggaaattaacaaatattttgtcttcctatatacccccactaaaaaaaatctcttaattaaaatgcttacctacccaaaaaataaagtgcatattaaaggagaaaataagaagaaactaaatagattaaatggctttttaaaaagacaaatactaaaaaaaaaaaaaactctcttatatatcattatcattattagttcaatttaatattgagtctcatatagttaaatataagagtaatttgcggtataaatttttaagtttaactcctgattgcaaataaatacctaagtataatttttagcggcaataatacctaagttatatttctagatttctgtaagtatctgattattaagtattaagtaaattgccacgtggcaatttctgattagtccaagtcatatttttttttttaaaaaaannnnnnnnnnnaatataccaataaaaaaatggcacatggataacttgacatttaactgtcagatacctacagagttccagaaatataacttaagtattattaccgccaaaaattaaacgtaagtatttatttacaactgagagttaaacttaggtatttatgctagggttgttcatataaatcgggaaaccgcggtttaaatccggaccactacaatcggaactattgtaaaccgtaaccggagaaaccatttttggtggt

SEQ ID NO: 116533 - DNA, 1449 bp, Cannabis sativa
accctcttcttcttatcagcaattctagccctcttcctctgcaaagtcaatggagtaacaagcctctgaatcttaggagctttgctagccttcttcccagacttggttgtaaaggacctgcgataagtgttcacatacttcctaacatcatcatccttcgaaagattaaacagcttacggatttttgaagccctctttggacctctcattctaggtttctcggtatcagtcaatccaggaagatcattctctcctttcttcacaataaccagattcaaaaccgagagatcttggctgacgatgcatccacggactgatttcctccttcgctctccggtacgccttccgaaaccacggaaacaaggtgttccacggtggagcaagagacggactcggcctggagtcaacactccctgcttcattgggaaaccttgcttgtcacaacctcccatgatcttaaaaacgtatcctttgaactcttcgcccaaagaatcaccactgacttcctgtgaaattctcttgtcgaagaatgctctgagtttctgatcatcatcgatttcaagcttcttctggcaaccggtggtcggattggcgatattgaatttcatgtttgcagagtctgcgctggtctctcttcgttagctcctgaaattctcaaaccctaatcgttgtagagaaaccctagttgttatagtaacaaatatatagaataaagaagaacaacaactgggctgggctggggccttcggcccataacgataattttttatttattttcttttattttaatatattattgcaaatatctaataattaaaattattctactaagccaataacaccacgaggggttattaattagataaatgctatatttttttgatataattatatcaaaaagaaaatttatgagtgtgaataatttgtagtatttatattacacttggttactaaactatagctcattttgacaattaaatactatatttgcaaaattttattttgattatttagttgtaatttttatactttaagttttggtaaatatagctaccttggccaatttttgagtgatctgctattgtcacgtaagtaaaataagaatttaatgagaatatatagacgaaaccttaaaaatacatacagattagtattttggagagttttcttaccaaaatttgagattgtaagattcattataagtgaattgagaattatggggatttagcctcaaattactaaaaaaaaataattgaaaattacaaattattttcaacaaataaaaatatatacataattaaggccaagactaattcaaataacaatatatacttaataatacttatatagggaaatttacatagtatactaacttttgctatttttttacaaaaatactgtcagacgaaattttttacttttttactatatttttttataagtttcata

SEQ ID NO: 116534 - DNA, 2515 bp, Cannabis sativa
tgttaaatgatttgagagatgtttgtgtcaattttattagacgttctgcaaatagtgttgctcacttcttagctcgagcatcctatttagttgttaatagtgttattaggagtagtgatattactacagattttaatcatgtaatcactatggattgcaattaataaaaataataatttttttttaaaaaaataacttttagtttttccaaaagctgtgtcaaacaggccagtcccatactaaaacttcatcatgccaagggtattattggaaagataaaagcatatataatagtcaaaatttccaagccataaaagccctaacttaagaagagcggcgacgagaaaaagacagggacaaacaatgggagtagagaaggaaattcttaggcctggaactggacccaagcccgtacctggtcgcaaggtcactgttcactgcactggttatggttagcccctaatttctttcatatccattacttcattaattgatcgatgttatgcttatggggcttgatatgcatttttcattttctttaggcaaaaatggtgatctctcccagaagttttggaggtaagaagtggtttttgttttggatgtttatttatttttttttggggaaaattgaactaattttagtttcaattggttttcttagcactaaagatcctgggcaggagccttttgcatttacaattggccaaggttctgttataaaaggtaaacaaataattaataaataaattagtttacttgttttggctatggtatactcagtgttacaagaatgaaaaatgatattgtgtgattgctataatttttagtactggaaaatggaaatggattagttttgaaaatcattatgtcttttgatattcttaagttggtttggtaaatcttggatttttgaattggttttttttctgtctaggatttttttgtggatgtgaaaagtttagatatccttcccttttattctaattctcttctttgctgacaattgcaggatgggatgaaggtgttcttggaatgcaagtgggagaagttgctcgcctgcgggtaatatatcaatttttatgataactgtatctatgttttatgatgtgctaagcacaaaataatatagattagaagtgattttaagtgaaatagttgtgccagaaagtagatggatattggagtgttttgataaataaaaaagaattagtaaaataggaaatcttttgggaggaaatatgttttgagttttgacagacttaaacaattttcttggtttcagaaaatatgattccacattttctattcagtagataaagtggcccatggaaatagtttctaatcatgcagctgacttgtgtggtctgcactgcattagcaggagtctaggagatcttgcaatctcttagtaaagaacacatccgtagaagtcacgtactcaattttttatgttttgtacatgtcttgttacacttgtatatgtttctaaatttggttaagtgtatctagcatatccctgcttttgcttcttgactcaaatatattcatgaaattagcagaactcaattccctcagtgctccacaaagcatgatcgattttgattttgattttagttttgattcattcctctttctgcttccatatttcaagtttgtaaggatgtacaaagtgctgccattaaaccccccttagctttgctttttgttcaatttgattttgcattgaaaattcattattgtaagaatgagctttcttgcatcttatgttttctttgatgggattgcagtgcactccggattatgcttatggtccaagtggatttcctgcatggggtatacaaccaaattcttctttggttttcgagatcgaagtcctcaaggtggagtgaaatttggacagtaaaaagctatgcagaacaacttattgtgttcttgccaaacgtatctaaattattattatgtgatacgaataataatatatttggaggcttgcttgatgagtacttataagtcaacccttctcctttgagtaaatgtattctcactattttctcatctttactgcagactgaatttgttccttaaaagcagtcttattgtgtggtgttgtagttgggatagatgatttgattgaggaaactatgcttacttgacacccaaatatctaaactctatgcttctattgtacaacacatgttttctatatttttggaatttagaatgataaaaacatctcaaaaattaaagaaatatatgagttcctaaaatattgcacacttcaaagaaatgtatttttttttctttctaaataatgattggcttaaaagtaaaggtggggtcgagcagtggtgctctagaacaaactaaaaccaagtttttggatgtttaggagtaagcaaaatcatagattgctcgaagaaaatggaaaacacataaattatgtttggaactttttttttttttttttttgggtaaatactattttgaaccatgtgtgttgcaaaagttaccaatt

SEQ ID NO: 116535 - DNA, 3040 bp, Cannabis sativa
attgtaacattatgtatttttaccattaaaaataaacattaggtatttaagtgtataaaatcggaaacattaaatatttatgccgcaatttaccctatattttactattataaaagaggtatggtaacggtaatgatgtctatattgccataccaactttacccctaacaacattattaaattacaattaataataaagatgaaaagcaaaacaaaacaaatcaacatagtcttctagacttttctaattagtatttcttaatttcaataagtcatttatatattcaaagagaaaatatagaattacaatagtgaagataaaaaggaaaacaaaacaaaacaaaccaatggacttttagacttttctaattaatataaatatatatatatatatatttgaggtgttatattttctaattttattaagtaattatttaatatatactttctagcaaagtatattaattaatttataatttataaataataattattgttaattattttattttatttattatatatattgcatttaaaatatattttaatattattttgtctaaataataatttttttttgaataaagataaatcttcattaggccaatgccaaaaaatatcaaaaaacttacacaaaattaaatatatctagccatcaaactctcacaaagtcactagagaaacccatcttgacaagattataagcaatagaattcgaagaacgattataaaatttaaaagaatcataacaaaagctacaaaaaatattgtaaatatcttacaataccattccaaattctactaagcaaagttctattttcaaggagcaatagccaccctttagcagtccgtttctacttccacctctttatagccaatgcaaagacataagagaagaccatggaaaatggagatagcttcgacaactggaggggtaaaggtcccaatatcaagagtaactgccgaagttagacagaaccccacatgatcattaataatagccccataccccatgcaatgagacacctctggcagtccagcatccacatttagtttgacatgacccaaagaaggtggaacctgagggatgactgcagggatagaagcaatagaccgagacccaatcatagaattattaggagttgtattcgcatttaattctttttgggcgaatgagagagaccacccaagaaccccttcagtattaagcaacttatggttatgagcccagttattatgaggataccagatgtgccatagaaggaccaacaatttgtccatatcaaacttggagagatgcacctcttgttccttaagaaaagtgtagagagtgacacaagccatagaagaagacgacctgatacaatcagtatacttcacaatggattggagactccaacacccccaaagagcatggaaagaagtctcaatctcatccccacacataggacacaaggaatcagtcgagaccttacgaagcttcaaattatgagaggtgggaaaccaatcatgacaagctccccaaataaaaaccttaaccttaggagggatggaaagattccataaatatttgcagcaagaagagggtcctgaaaaagatccaacttgacctctgcttaataaataaataacattctaatatccattcttaactgtgtaccctcaagaagtgtcgtaatgcccaattaatctatccaaagattggaaacatttgggaatggtcaaaatctatctagcctcgtcagatgaaaaaagctcatcaataagaacaatattccaatcaccattggaaagcttaagatcactgaccctcgaaataagaggatggcctttgaaagagtatgagagtgaagccgaaagtttaggaatccatacttgagaacaaatatccataaaacgaccttccctaataagccatcgcccaccctccacaaacagttccctaccccaaggaatactcttccaaatttatgaccctttgtaagtttcagtcgcttgtaaaaactcaccatgagaaaagtacaaacatttcatcaccctagcagtgagagactcaggaacagaataacgtctccaagcttgtttggccaggagagctttattgaagacaaataaatcctaaaaatccatacccccatccatcttgttccaacataatctctttcaagtacaccaatgcatctttctatcatcatcatcatctcctccccaccagaatcgagcacaaagtcagtgaagctcatcgattaacttcactggcaacctaaagagattcatagcacaagtagagattgcttgtataacaaacatgagaagaacctcacactacccggctgaaaaagatttttcctccagccaaataatttgttccaaacccgatcttgaatagattgaaacaaactagatttactacaagcaacaaaacacgaaagacccagatacttctcatggcatgaaactctatgaacccccaaaacattggccaaagcatcccgagcccctctagaaataccaggggaaaaacaaactgaagactttattagattaacaagttgtcccgacgcactctcataccaccccaagataacttaaaattgggcacaattgtcaagggaagctcccaaaaagaagaaactatcatcaacaaataataagtgagagatattaggaccacttctaccacacagtagcccttgaatacccctaatctgacactcattcttgataatagcagaaaaccttcaacacaaattaaaaataagaaaggagacagaggatcgccttggcgtagacctcaggaaggttgattagaccccaccatattaccattaacattgatggagtagaaaaccgtggagatacaatgaaaaaccaaagacacccataactttaggatacccaatcttctcatcataccacaaacaaaatcccatccaactctattgtaataccctagaattgagaagtggattagcaaaaccataattagataattatgaataattgaagaattatattattatatagttcaatatatgag

SEQ ID NO: 116536 - DNA, 2373 bp, Cannabis sativa
agtggcaaactaattatataactataaattttaattagtgataattattatcaattatcctatagtaaaattttagtaatatttagtgtaatttataaaaagaaaattattattatcaattttttttgtttaaatacaatattaaggaaatatttatatatccacatcagtgtccatttaaatattagggagcttgggtcattgaattatatatacatataaataaataaaatagttaaaaatgaaatcatatatagtgttaattatgtacataatttttttttaaatataaagtgtccactcttaaatttttgcacaaatataattaatataacacaattaccattcacaatatattatatatttgttgttaaaaaacattaacataatcacaaacaaatataaatatataaaaattatcaataaagatttctgtacgtactttgtgactaacgatttcattctctttccatctaacaactatttatatataaatatttgttcttttataatagatatattataaataaagtgactaatttgcttattaaatacacacaaagatttaaataataaagtagaatgaaaacgtaccaataaaaataattgtataaataaataaataaataaaataagcatgagaagaaagataataaatagatagatatgatgaaaattaaatagaaaaatgaagagagttcgagaaagcatttaagtaatgtaatactgtccatatctttttaatacattatataaagaaaatacattttattaatatagcatgcatatatgcatgttttaaattatttatatttatatattatatgcgtgttttatgtgtgaaaatgcttataaataagttcaaatttagtcattatcataaattttgtttggtccacaataagtaatgactagattgatcgagtttttttttaaacaagtaaaaatcatatatcatatataaaactaaaacttattaaattaaattaaatttaaatctaaataagtaaaaattgaaccccataataacaaaacacaataaagaaaatatttagaaaaggtcaaattcataaatttttggaaatataaaaattactttttattagaaatagcatataacttttttcttaaaaaaaaaaattttccaattaaaaaaaaattaatatttttacccctacactattaagttatgtcccctaaattttaatgcttgttaataatacctctagaaatataacttttacattaatatggttccatcacattctgttgatttttttcgtgaaataagtgacacaatagataatgattaataaatgaatataaattatatacttttcactttttatactaaaataattaaaaaaactaaaaataaaaatattaatttttataaaaataagttttttattctaatatttattgacgtacaaagagagagaattatatagtttgcatagctatttgtcaactactatttttggatcattatcactcatttcacaaaaaaaaaaattaatatagtatgaaggaagaactaacttaacataaaagtaatattttgagaagtattattaacaagtcgtatatcttaaggggcacaatttagtagtgtaaaaaattcagaaaataaaattattaattattctttcattaaaaggcacaaaatgcaaaaaaaatgctcaaaatcaaacatttagatacataaagagcctaatacgagactaatctaaaataaaaaaacaagcgtcctctttactataaaatgagcaataatattgtaatgagaaaataataataatctaaaaaaataatatatcattaaatacaatacccaacttattatcacgaacaagttgactattattttgattagaaataacatataattgatgaggtcttttatagagaaacattattattattatggttattagttaaatttattaatagattagatatatattcatttatatcttcatccataaagtagtagtagtgtgtatgtgtgtatatgcaaaaatgtcagttgtggctgccggcaaaattagtaatagcttgtggcttttccactaatcacattttgggccgtccattaatattattacaacaaccattgacatgacttgccgactttgtttttttgcaaattattcttttattttaacatatataattataagaatttttttcataggagaatatatatattggtatttagagaaagtgaaatgttaaaaagtattattggtgtctagcacacttttttcagtgttgtttaagcagggccggtcctaaggtatatggggcctaaggcgaaatcatattttgggtccctatatatataatttaactattataaaaatgataatt

SEQ ID NO: 116537 - DNA, 1635 bp, Cannabis sativa
cataataataatctcacctataattaataatattttttctttaatttttaattgtatcactttcaactaacataaaaaaaactaacataaaatttagtatacgtgtctcgcatataactttttactcgtgtatatatatagacacacacaaatataatgtacagatcttataatttataaatttattttttgaaaatgttacattgaaagtagtggtggatatgtagcttcgagtaactatagtttgtcactatctttgtctgcttagattgaaaagttcaggctctttacaagtagaaaattaaataattaaataattaatattctaaaagtgtaattttttttttttttgtatatatatattttttgtttgatggctttaaatacagtcaaaagtttctatttattaatacgagtttatcacctgatctttttgcatcacattttttccaccaaaacctttttctcagaaaattcttactaaattaagaattatccgggaaaattccaatagtggaaaatcaatcataagagatctaccaaagatctaatcaaaatgtcaaatgttcatcttcaatgtatatagtaaaatttttaaaatactttagtataaatttttagttaacttttatgtctgaaattacatatcagaatatgttttttaattttttcatagcgttattcgttatagttacaatatcatttttgtaaattttaaaaaattctgaaaagtttataataccgaaaacaaaattcgtgatattccaatttaccacgcgcgcgggttcaaaaaaattcaaacatatttttagcactgtaaacaactcgaattttttaaaaatttataaaaatgatattgcaaacataacaaataccactatgaaaaaaaattaaaaaaaaaaattatttcgagatgtgttttcaaatacgaaagttaactaagagaatgtgataagaaattatagtaaaactactcctcaaattcctaaaacaatttacaacatgaaaatgttgctcaaatcaacaagttactgaaataaaataaaagttttgaacatttctaacaaattaacaatggattaatcggctgccctatgatattttataccatcattaattgaaaataagacatatatctagatacatttctattgttataacactgtttatgaagatttgacaaaaaagaattaactcttactataaaaaagggtttattttaattttaaaaaaaaatataaaagcggcttactacgtaaagtaaaggaaattaaggaaaggttagttatatggtttttaattattgaaaataacttgaagtgtgtgacttcctaaaaaaaaaaaaaataagccactaaggctagcttagtggtgagggagggaagggaaaaagggagaggtcatgggttcgaacccaggacctttaagctattatgaaaataatgttttcaaacaaatgattttgttttgttgtctccttttgaatagattggcaaaaattttggggagaaaaagcagggaaattaatttgatttaaatagaagagtgagacatgcatatttgagtgacccaagatgaaaattacactttatattatttttatattgtcctcttttatttttaccctctttttta

SEQ ID NO: 116538 - DNA, 1451 bp, Cannabis sativa
  modified_base (1348)..(1368): a, c, t, g, unknown or other
aatattatttaaggcataaaacctaacagcctttacctcccctgttgtttcgtgtatggctcatatttgaatcttgaacttccattattgccttttttgaagccacactacatctggtatgttttgctccatacttggagaaatgggtctgcgtaggtgcgggacctgaagtagtgagtccgctaacacttggaaaaaattgagttccaggaagaattaaagttgcggctgggacttgaggaacaaaattggatgcattcgtagaaggaactagagctggagcgactacaaaagctttttggtaatcgtcttcaaggttaatgatgccttgggcttttgacataaattcaggtaatgtttcagctatcctctacatttctccccatagtaaggacccaacaattaatccaaactaaagagccatcaatatcatgtcattattgactttggttttggttgtagcttccatcatcctctgaataaaagccttcatgcttttgttttcttgctacttgacgttggtgagagagccaacttccatgtctagattgtgtgcagcaataaactgcttgcagaaggctgactgtaaatctttctagctatggatcgatctgggagccaggcacttccgcaaacttggtcaacatcagggagaaccacaagcacttggcttcatcgctcacacgtgccatttacgtcatcttgttgtgttttgccaagtgggttcccaaatctatccttccttcatacaattcaatgtgtggcattttgaagttttccgagaacagggtctctgggatcctactatcgcaaggtttttggtcctcatccttagaattcgagaggaccccactttgctttttgatgagcttggttagagctactatttgctcctctaaccttttcatgtcactattaggaagatcacatcctcgtattttttcacttatgtgatttccgaggtccctccatgtggcctctctttttaacttttgtaattttcatacttggcgtccaatcgtcggtgaaggtctacgatggaccaactgtctccagagtgcacttcagtcgtgcctctgtcctggttgacagaatctctagggtagttattctgtcccttgggttaggtgctttcgtacctttccctttttgcacaaccttgcctcctagagtagaaggtcgcctaggcttgaaaggaccagtggacttttgcatcctgatgggctgactgaatggattcatgccttttgcaggaagtctaggagcatacttttctgcaggttcttctaccttgcgtttacctttatccaggcagggatctgaggtttttgttgggaatattttaccnnnnnnnnnnnnnnnnnnnnngtatgttgattaacatcctaaatgtgaatgctctaaaacaatgaaataaacacataaggtttttagaaaaccttacattgatt

SEQ ID NO: 116539 - DNA, 2247 bp, Cannabis sativa
tctctctctcactctctctcactcacacacacacacacacacacgcataggcttgttctctccctcacttaagacttgccaactccattctcatattgtaatcttaagagagctactgcagattccacaacacttgtggtctaagtagtattatctttggtatcaatacaacagattagggagtaggtcattacccactaaataagggagtcgaaccattataaaatctcgtgtcttatttatttttttactcttattttgtaacatgtggcaagcattagtaataaatacgactccgatgtcggttggctaaattctaggccaacaatactctcattcaaaattgaaatctatgtatactcatttttagcataatcaaatatcacttctcaggttttgattcgatttcatagatagtgtgtaagaggtgcacaatcaataacatacacaataaacatgaattgagtaaactttagatgaagaaggaattggatattaaattaaactatatgtgagtttcaatagagtcaattagaaaatctaaatagaaattagttcatattaatcattaagaactctacaaataagatatatgaacataaactataaaaataaaatatatatatataagaaaataactctaaacgctagatcctatcttcatccaaaaaaatgcaaagtgtttattttcagttccaaccatcaaaagttgagtctccttaatcaaaattgaaattaaatcttaatctcatcatttttcccaagtgaaaggatataaataggatttgttaaaaatttatcccaatatacatttgtaaaatagttgcgcagccacactaaacacttgcatggtcgcacaactctagaaacatcaattttaagtttttttgccttttctttggtatttttgcattgtatcaactccaagtcatccaaaatccatccaaacttgaaaacacatcaaaacaagtgtaaactcacacaaccaagagctcaaactcaagatgcaatagctagaagggttcattatatagtggtggtgtgaccggagttaatccaggatgttcactgaagtttgaaaaatcagggttggagttgtcttcgtgagcaggtcgagtattggtgatgacttgttggttgttattatctctggtaagggtgaaagtcgtaagaatgattaaaggatttaagggagcatttggtataaaagaagagttgtttgacaatgaagtttggccaaaatttcttgaactagtagctctcattctcgccatggatgaaaaacaaaagtgataatttcagagagaattgtaaacgtctaataccatattagaaggtaaaattgtaatattattatgtaataaaagagtatatatacaagtgcaatagccaaggtctgttactaacaaaataacaaaaagtttcctctctctattactaactcctaaccaacataactaattatataaaataatggattctaagaccttttttgacagagaagaagaataaaagtggaatgatggagatgatgaattaaatagacgaataagagatagttttattgtgtatggtagaaggaaaaggagaaaaaaattaaaatagaggaagaaagtaaaaaaaaaatgtgaaactaaaagaatgaaaagatggaaaggaaaaaaaacaataagaattttttatttctattagggttgggtacacatcactcttttgtgcgggcacgcgatttgctcaacttggcaggtgctctctgccgatgcgggtgcatagacatttggtgccgtcgcaccacttgcatagattttcaactttctttatcacatatttttcgattcctcattatacagctagcgatcaatataaccaaacctgtaaaagaatataaaataaataaattaagtccccaaaaaattaaagttttaaattactaaataaaaattgagttgcattcaaaaagtactttgttttacgtccactactccacaatcaattttttttttcaaaattcaaatcgactcaagtccaccccggacatccttaaaagctatagtgtcataaaaggaagttatgatattgtgaataaataaagacatccatcgctcgtggcctttgagcctttctaggaaagactcctaaaaatgtttctttaggggaccgtcgctaaaaaaattaagtaactgtttaaaacggtcgagaaaaattagtattcctgacggtttttaacagtaattacaggaataggcg

SEQ ID NO: 116540 - DNA, 1608 bp, Cannabis sativa
tgtcgcctgaataccaaagcatagccttggtggtcggagtcactggcatcatcggcaacaatcttgtcgagatccttccactctttgacactcctcgcagaccctagaaggtttacgacattgcccgccgcccccgacagttgggggtcatatagaatactagttagtgcttagtaactatacttgaatttcatattaaagatttcatactttaatacactaccaactagttttattcatatttatatatattattaagtattttttgacaatttagttaaaatattatttattttaatgtaaattaattaaatattttttttttgtgttaattttgtggctttgattgccttttttttcttagaaaacttatatttacagttgttcttttttgtttaagaaacttgtcttacaagagaagaaattcttatagaaagttgcatattttcataaaactcgactttcactttgtctaaatgttaattttgattttgttatgtatatattaaatcagataatctgtatttggcaagtactgaagaccaaatcgtgatcttggttctattttttggaaagtttcccaatctgctgtagcagaattcgaataattgcccaaagaaaaatgtggagtaaagtatgtagttgtagcagtagattatttcaccaaatgaatggaggccgaaccattgacaataataacatccaagaaattttttgcttttgtggtaaacaatatcatatgccggtacgaactttcataaaaaattgtttcaaaaatttaaaaataatttgacagccaattcacaaacttctgcacgacacatggaatcatcaaaagtttctcaacagttgcacacttccaaataaatggacaagtcgaaactgtcaacaagacattgaaagacaccttgaaaaagcggcttgaagaggccaaggggaactggtcagagcaactatcagaagcacgttggtcgtacaaaacaacagaaagaacgacaaccgggcagacaccttttgccatggcctatgactatgaggcaatgctgtctgttaaattagaacctccacccagagaagattgacttacgaccaagggactaaccatgccctcctgacacaatcacttaatttagttgaagaaaaaagagattgagaaaatctaaagttattagctcatcaacaaaaaatggctcgatacttcaacaaataagtgagagaattgaagttttttatgggagatatggtacttagaagagtgttcttgaacacaaaagttagtgtagcaagtgcacgtgcttagacctaattgtgaaggaccataccaagtaacttagttacaaatctggagcatacaagcttagtcaatatgatgaaaatatggatttaattctagtactaagatactggaatggtgaatacctaagaaaatactatcaataagtaggggtgtacatcaaaccgcttaaatcgcttaaaccgcccgcattgcaaaaaaatatggtttgaaattcttcgtggtgtgaatttttcccaaaccgcgcggtgcggtgcggtttgtggttttgaattattaaaccgcgattcaaaccgcaccgcaccacatgtttt

SEQ ID NO: 116541 - DNA, 2450 bp, Cannabis sativa
  modified_base (45)..(65): a, c, t, g, unknown or other
ttaaatgttatttctgatctatatcaataagtaaatctgattatnnnnnnnnnnnnnnnnnnnnnggcataaaacccaacaaaaaattctacccataccctactcgggtaaactattattttttacgggtaggtacaggtattacccatgggtaaatcctaccctattaaattttaagaaaaacaatttaaaaagataataaaattatgttcagtgacataaaatattaccaatatatatgtaattatttaaataataagtattaattctataatctgtaaaattaataaaaaagtataattagtaataattaaaataataaagtattaaattaattattttaggattttattttttatgtattttttaaatatgaatggaatgcatactattcaaacttacatataaatataagtatataatcgagtaaggtcgagtaggatgatagggcaagatacacttagtagtctccatgtttgtgtgttttcattatattgtgatatgtataggaaaatttgagaaacaatgctattgcatggtcttataatattccaccctttaagcactacactaaatatgatactaacaattttcagttccaagtataccttcaaataataaaactaaaccttactctctcttttcctttctcattctcatctctctctctctctctctagaaagttacacacacacatatccttttccagagtccatcaacttagcttgacaactaagtgtgtaagagcaacccaaactttcttaccaacataattcttgaaaaaaaaaaaaaaacaatggtatgtaagtcatttagtaattattgttggatttaggtgtatttagggtgatatgaatagatctacgcatatccttctttttatttggttgttttactcttgaaatacaaattgctcagattctatgttttttggttttttttttagttttagcaatttttagcaatgccgttatcgatatatggaaacatgagtatgcgctggaggttagaaataatttttaacgacatgtagcgacatgtaacgatgtaactaatgacatttgtgaatattttttagctacttataattttagcgatgtttatcgatattgtttgcaatacgtgtccatagttttagaaatagtgtttaatgaagtagaaatgtgttacgatggagttgtcgatatgtttcacaacatgttgtgatatctcttgcaatagttattgacatattttgtttctttcctgaactactatttttttttttttcatttttgtttgcaaattcaattatgtttgtagttgtactggacagttgaaaatttcaactggatattcaataaccaaaaaagtaagatattgacatttgaggcccctactaatatagatgagcataaagctgataatacatttgatcagtttgatgagtttgatgatcccttttacaacaataatcttgtggtagatttgaacaaggatggtgatatagagttacaagttgatgaatctatagaggtacctgctttgaggttaaaactacctccaaaggaaccagagtgcaaagaaagaaagaagaacccctcgtagtgaaaattaccaaacaccaagcactagtagtaatcggtcaagtcctcctcgtagtattgtacaattagattttgaagtttgtacaaaattcaaatgtcttgtgtggacaagggaagacatagaggaaaataatatttatacagcttctcttagtggaataccttcaggagaaatacacattggcaagttttacacaaacaagactaaattgaaaaatatagtggaagtgtttgcattgaaaatgaattttgagttcatggtgaggaagtttggcaccgatgtaatttatgtaacttgcaaggattcaaattgcaaatagagattgaagggaggaagaaggcacgttgtgacatgtttgaggtcactatgttccacaacgaacacacatgtaacatggattctagaaatgctgataaccgttaagcagcactgtgggttgttggccaccttattaaaggaaagtacacatcagatggaactaagtacaaaggaaaagacatatagagggaaatgtttaacgaatatagaatcaaaattagttatgagaaggcatggaggtgcatggataatgcacttacatatgttaggggtacgccagcacaatcttatacaaagttacctggttacttgtacatgctggaacagaagaatccaagtactattacagacatcgtcatagaggacgactggttcaagcactatttttggtcaccggatgcttgtaagagggaatttaagttttgtcgtcttgtgattagtattgatgacaagttcttgaagacaaagtatggtggcactgttgggttttatgtcctaaataacactccatttcaatgtaatccattttattcaacatcaataa

SEQ ID NO: 116542 - DNA, 1437 bp, Cannabis sativa
tcaaaaacaaggaaaaatcataaaaacaacaagcagaaaaaaaaaaaaaaaaagagtaagaactcgatgattagaatgaagaagaagaggaagatgagaatgatgtataatatgaaattcaaaatataatgataatatcgagggactgggttagataatggtaactggcagggaagtgattgaaatttgacatattagagggaaacatgtaagcagttaaatgataaaaaccaaaaccgtacatgatgtaattttttaataagtaaccgtataaaagttttaaaaaaatggtaaaattgaaaactgaaattatggtaccgtataaatgttgaaatacagaaaaaaaaatggtattttatgtaaaaattgctatttttaatttattataaatgtttttaaaataccataactagttgggggcagcattaaacaagtctttaattattcataatgcattgcaacttggtatcacaacatttttataagaaaaccatagatactttgaaaaatctatttaaaaaaaaaaactaacctatatgagaaacagaaatccaaataaggattttatgattgtgtaccatgcaacagaggggctcgtgaagcaagtattaataatccgttccaatttgtagtatttttcaatatttttgaaacagagaaacgacaaatttgataaattgactgaaaaaaaaaaaaaaaaacagaaaggacaaggctatactttattaaattaatctaattattttgcaccataataattatttttattaagatattctttcaagagaaaaaaaaatattttgagcgatgaccatgtatacaaatcacaacatgtggaaaagaaattaatagtgataaagtgggattacttttttatgaaaattggaatcattaatttggacatacacaattggaacacctaaaaacctataatcgtgatccattttattatttttcatcaacaaaagaaaaacaatatattattaattataatgatactcaaaatctatatcttccaaccaatttggatatgtcgattatttcaaaatctaaccttgtattttctttttatttgtatatttattgtgatatttataaggactaattattttatatcaataaatatatgtattgtattttaaatgtccaccagggtgatcagcctgaatatttgcataaaggtttttcttttaagaattcataattaaaaaggattctgaaaatgttaacatggctattacatttttccctttaatacaaagtttaatctgattatttatagtactagctgaactgaactacaagttgcttatgtggcataatttaccgggactaatataatattttgatataaacttgatgataaaatacaaataatatacttctattaatatgcttaaataaacactatataatttatagagataaagaaaatta

SEQ ID NO: 116543 - DNA, 1798 bp, Cannabis sativa
  modified_base (1752)..(1756): a, c, t, g, unknown or other
tggtaaaataacttccaacatagcagtactgagtgcattggtatagcgtacgatgtttaaagagtacagtacggtgttaccaacactagtacgggcaggtacgaagtgtatatggtataacacttagtggtactcgaggtacaagacaaactctaccaacactagtacagtagtagtacgtaatgcatgtggtatagtggtcgtaccttagtaaagaacgttcttacttatctgataagccttatggacaggtgtatgggcgcctagatacaagtcgaagatatattatttgttatatgcttttcttactgagtctgttgactcgcagttgttactttcatgtgtaggtaaaagaaagatgaaggctgaacaagagtgagctccgagtgtggatggtgattgtacatgtcgagacgatgcgacctggagtgtttggtctcgggacatcttggattatattttatagttgttgtgcggcaagtttgtaaatatattttgaaaatatttgtaaaagtttaaacgcgggattccgatttatgtaaatatatatttatatgtttataaagtttaataatttaaaacaaaagttttaatttgacacgattttttaggaaaacccttttattagcaaaggtggcgcgttaattagaaaattgttgtagcacgcctaagtatcagggcattacattactattttcatttttcttaattgagcgggttgcacttagatttttgtaatccgatctttacattgggatgaaaaaaatatagcataaactgactaaaccgaccaatgtacaccaataattaatagtagttattttctaaaaaaaagtaattataattattttattttattttgataaaatataattaagcaacattctaaatggttttaaaacttaaaatctaaccacacatgcatgtatatttattgttaaaaaatattaagtacacatatcaaaacattaaaaaaaatcacattaaccataaatttgataaaattttaagaaaaattaaaaaagacagatgaaaaaactcaggtcaaactttgataagactggaagtgttgtattaataggtgaagattacaacagaattgaatacctaatcattaaaattgtaatccaatctttatagaggaaaaggaaagaatattctaacgctacaaaagtttggacaaagtttgtcaacgtttagggaccaccaaaagtttgttatgccagcaaatctcttctagaagtaataaggaaaattttatttcttcacagcccatctcaaacttagtggtgtctcaactacaccaagtttgtcaaccaagaaatgaaatatatgattggttaagtttttggttaggcatccagcaatttgatcactttatgggacatatctgattttaagtgttttgttgatgaacttgtctcttaaaagtgtatatctaatttgatgtgctttgtgtgtgcatgataaaccagattcatagccaaaacacgagcctccatattgtcacaccatttcaatgatgtaagttgcaaaggaaattcaaactcatatttagcaactttgaatccatgacattttagcagccacttgagcaagggcacgatactagaattttgtactagatttggacatcaatgtctgtttcttagatgatcatgacaccaaagtatctccaaaataaacacaatcagcaacacttcttctatcattggggcagttgttgaaacttattttaccaggatctagatnnnnnaacatgtatgttgattataattttataatctaacaccctaaa

SEQ ID NO: 116544 - DNA, 1468 bp, Cannabis sativa
tggtaaaataattccaacaatcaatagggtgttcaaggattttctcgataactgtgtcatggtgtttatcgatgatatccttgtacactctcaatcaaaagagaaatacgaacaacatctttgaatggttttgtaatgacttagagatcacatgctgtatgcaaagtttaagaagtgtgaattctggttatcacaagtagctttcctaagtcatattgacagaaaggatgggattatggttgatttgggcaaagttgaatcatttaagaaaaggttgagaccaaggacagttttaaaagttaaaagatttcttgaattagttgggtattatcgatgatttgtggaaagattttccaatatctctttgccattgacagaattaaccaagaagaaccagcagtttttatggtctgacaagtgtgaaacaagtttccaagaactaaagtaacgactgattacggtactagtattagctttgccatcagatcaggagaaatttgtggtatattgtgacgcatccggacagggtttaggatgtgttcagatgcaagctgacatgatcattgcttatgcttctcgtcagttgaaggagtatgaacaatgttacctaactcatgatttggaacttgttgctcaatatttagggtgttgacatgccatttatcaatagagaaactattaattttgagtttgagtccccgaaaagatttaagcaagttgtttacctgttttgcgtgatagtgacatagggcctctgttcagtgcgtgaatttccattcaggttggctaacacacttaaatatagaaatgaggtaaaattagtataaaccatgtatgtgtatatgtgtatgtatgttatgtgcatattgtgttatgtgatttatatactaccaacactagtacggttgcaatacatagtgtattggtacaatgtatgatgttaaaagggtataacagtgctaccaacactagtactagctcagtggtactcgaggtacggttcagtcctaccaacactagtacaagacgcgtacttaatgaatgtggtacaggggtcgtacttctgttaagaatggtcttgattcatctgaagccttgtaaataggtgtatggatgcctagatacaagttgatattatattatatgttttatacttttctttctgactctgtcgattgataaatattgtttgcttgtgtaggtaaatgaaaggtgaaggttgagcaccagtgagcccagagcttgaggatgattatacttattaggattgttagacttggagtgttcggtctcagaacgacttggaccttcattttgtactcgcaaagcgatacttttataaaatgcatttgaagtaatgttgtaaacttttaagacagtactctgacttttatgtatgtgttgtgataaatccaacacgcaagtatacgtatcgtcttaacaagtaatactcaggtaagtgagatcg

SEQ ID NO: 116545 - DNA, 4180 bp, Cannabis sativa
gaatgattaagaaaattaaaaaagtaaattaaaatttttaaactaattaagtaatttaaaaaattaattatttttattaaaaaaaatctatttagaaataaaattgtatattaatacaaattcaatttttgtaaaaattaaattttacaagaacaagtttgagcctattcttttctccaaaaatctaaattttttaagtaaatgtaatatttattttagtttaatttctactttttttttaaataattttatatttacattgaatttttaattattttttttttatttttaagatatgaatttgtaaatataaaataaacttgattttctctacacaatatctaagtttgtttaaatataattattgaatttttaataattttcgtttaattttttaagatgtgtttataaataaaataaagtttgaaaatattttttttagaaataatgcaggttttttaagtagacataatattttttattactttaatacttttattaggttttttaaactttttcagaattaatagaaaattataatttttataattagtttcttttaataaaaggggaaaattttagtatattggtcaaagttcaaagaaaaaaatgctaatttttaatggtaaaagaaacgaaacctcacaaaggggatataattatgtaactattaaattttagggcaaatttttaacaagtcatatattttaaaaagtatgattaggtagtgtcaaaagttcagggggcaataatactaattattcttaaaataataataaaatattacaagtaccaaaaatatacaagaaatatttcttttaagatgatatgagactaataaatgatgacatgcttatgataaatggttgagattacttatattgatcttgaatggtgacaatcaatttgagagatcgaatacgagtcgttcgatcagttcttggtgctttgataatgacaaatcacaattcaaaatgtaagacaatttttgataagaaataagtctaattttgatatgcatatgagaaattcatcaaaagattatttaaatagctttctagtttagttggaatcacataaacctgagttgtattgattgagatactaccaaaacactacaatgtgtgcaactgcttttataccaacaacaaaattggcgtactagggacaaggtaagcatttaacgtcaacctagttgcaaatttctcggtttggcttgattttaacacattttaagatttcgagtgatattggtgcaacacgaagccaaaatcatgatttgcttacatgactttggaaaaaaacatgattagagccctcggtggtgcacgctacactagcttggcgtaggcatcgtcttgacacccaatgcctaggcactaggtgatgttttttactactctccaaaaatgttagtgaaatagcatgattgagcaccacatagttgattataacgaagaaatttatacactcttccattcttagtgattgatgcttggttgagcacaaggtgatgattggagatcacttgaatgcatctatgtcaatcaagccataggttaatatactagaatgagatttacctttaccatgagtgcttattcttggtgcaaaataagcataatgctctaagtgcttattcaacctgagcgctagttactctaggtgtgcataacctaggcacagggtgtcaacttgagcgttgagttttgaactaaagtgttatgttgagacgttacaacacttaggagctcttggataaggtttactcacacggaattttcagaaagcttaatagagcccaagtgtgacctaattgtcaatctggccactggtttcatgaggatgtcaacgtaggcacccccaggtgtttcaacatcgagatggattcatttagttttagaaagctattgtttcctcttatttgattaaaatggaggaaattcttaggaaacatcttcagaaaacatgttctaagggtccaaggtcaacctagggactgggtttaggttaagcatgcttgaattctgcttctttttcgcccaataattttcttggtggaaaatgttcatgcaaatctagtttcatctaaagcagcaatgatttgctcagatttttcacttgggtgacctgtgcgcccagtgagtgcacactaccaatgagggccctagtacctatttgtccgccaaccgggagcccactgcacaaactcaagtacacacattgttccatgacagatttgaggaatcattgttgaaagaagttctcataaaacctaaacacttgtcgttgtgtgcccagggtcacatgatgttaacctgggtgccccctaagtagggatctattctaaaattggttatgaggcttgaaacttgattatggcatgtcttccatgtactttgttgcaattgtctagtcatttgcctatggtattgaaacttagaatcgaaatcgatgtgatctagggcacatgaattaacatgggcactaggtgcttacctaggcgccgaagtggacttctaagatgtccaactcatatctctagcttccagatatcattctagtgtcttcgtaacccattctcttgaactgttgaaagacaaaacttaagtgcttacctctatatccccatatgtcaacttaggccctactacagtgcccagcatataggttgattgccttgtccaggatgtggggcccagggttctttcgtttgtgccacatgtcaaaaacagtgtccatagtatttacattaaggatgaggactggtggagctacaaagctctaattcaagggagctaacactggaagagtcttgtctcccttaaagatcagatcaaatccttgttgaatgaccaacagtttttatagagcaaatacatagtttctaatgctataaaatgttttgtccctcgcaaaacaaagctcactggagccatgaagtttgggggagattcattacctttaaacacaacttcatactatgaatggttgttcatagtatgtatgaagagacatgtatgatgtgtaaccaacagaaagaaacaacattgcatctgttctttgaatgttagtatgttgtccaatgtttgttggagattaattagaattggctacaacgtagagcaatttctactgctcttcctattctaattcggtggattcgcagagcaaagattagtaagtttcaaaaacttgtgttggcagctgctctggctagcttgggacggataagttagaggacccttccaagcttatatgtgctattaaagcaaacttgaagcagaggattgatttggttggcctaaaaaggtcaatgagaaagacaaagagtggtttcattcattgtaaagttaaaaaacgaaaaagatttgtatagttgatatattttaggccctcttgttagggtgctaatagtttttaaataattagtttggagcaatataatataacttgatttatataaatatatatatatatatataaaaacagtgttcacgtcatgagataaaattttaggtgaacaagtttgatttatggttcttatatattatttgcatggtgataatgttacaatattagaaaatggctatgatacagtgaattggtcatatgactatcttgtatgttgtatttatagttgatacttatgttttgtgcttagatgcacttatcgtcgtaccggacccggatcctgacttgggacccagacccgaactcggactcaagacctggactcggactcggacccggacccgaactcggaccctgactggagacctagatctagacccagacccgtaacctgggacccggaccctgaccgggacctgggaccaaaccaggacttgagacccagaccgggacccgggacccaagactaggggtgttcattggatcacatccaatggatttggacccaaccgatacaatccaactatttattggatattgaattttgttatccgatccaatccaatcaaattgagtcatctcatcttatccaatccaatagatatattagattggatcggttccgaccattggatgcattgactggttttttatttgaatggattggatccatccaatccatttcatttaagttaatttcattaaaaaatatatgtataaaaaaaaaaacaatttaaaactgaataatccaatatatataataaac

SEQ ID NO: 116546 - DNA, 4052 bp, Cannabis sativa
tgaaggaacaagcgagcatcctcatggagccatatttttcttgaatcgtcttaatctttgggatgatcgcagtcaagtgatcatctttgtcaatactcctcagatacagttgaatcgtcttactacattctaaataattcaaaccaatcaatttatggtctgtgattttagacatcatgggaactacacaactactgatttagaatatgattttatctctgccataatcttgaaagcaaaaacaattgaaagagaaaaggaagaaagcgaacaccaaaaaatgaacacccaaacacgaagaaggtaataatatcaaaccacaaaatgataagaaccaccggaaaccgatgcaaggaggatagggaaaggccgggagcgtgatagacgttgaccgtcaccaaaaaggaggctggatgcgccctcatgcgtcgacgcgcaagagtcagggcgacgacgattggcggcgtgtggggcccacatgcaatgattttggctgccggacttcggggttttgtagatcgacggttgggaatccgtctatgtaggctgtgagaaagaactcgtactctaattagggtttcgaaaaaggaaccataaactcgaaccctaattttttttttatgaactttatttttgaatttcgaattacaattctaagtattgttctgataccatgtagaaaatggtgaattgaattgtttgttgtattccatagaataatatatatttatatacaaaactagaagactaaatgggaaactaaatacaaatagaaaattactaaatacaatttactattatctacaactaatatacaattatactgtatatataaaaatattatttgcttttataattgttatttaccattatagtgtcctttgatttggagagtattctgtagcaaggattgagctaaattccttgttcggagagtattttgtaccagattatatgtgatgaatctccttagctactgattggctacgttaagttgtattatgtatcttgaaatattcttttgtttatttactgatgccattgatcgtgccatgtcttttgttttagggaaaaggatgaagaggaaagtgacctacaagatctaatgatgtctttttctaagcttgaagagaaagtcctcgagcaatatacttttgccaaggtaaggtatagctaaactttattttcctcttaaagtttaatgtaaattgcacaggtcaccgccccttgtgtttcccagttgaattgtaaatggaacatgtagttatgtttctatctctagattgtttgtactaaagcttgattcttgttagagtatatattagttgtatattagttgtagaattgtaattacttagttttcaagtttttcttagtttcctattttagtctccctagttttgtatataagtacttgctattctattgaataaactacacttttgatccaccatttataacatggtatcagagcacaatttgaaattagggtttttcaccaaattgagatttgcaattagggttcgttcttccttttccttaaagttcatttctggaaaacatacttagagagcacgtgaactctcattgtcggtacccgcatactgcccaatcgccgatctgcagatccctaaagtttgatggccagaatcctcggacgtgaaccacacgcgacgcctgaagattctacattaaaccccatgcgccggcgcttgagtgtgcgtgaggagctttttctcagtcgtttctccctcagttgactttttctgtctttttgatcttgtggtgcattcgttctgacattattttcttcttttgtgatcgttgaggtttgtttgtcatcttttggtgtgaatcttcgtttctttgttcttgcttcgctatttgaggattatggcagaaaataagtcaaccattgtgatgaatatgatgccggtaatgtctaaaattactgaccataatttcagtggttcaaactatttggattggagcaaggctattcacctctatctacggagtattgacaaagatgatcacttgactaatgatcctccaaagtcattcaaaggagaaaactgatttgacatgacttggggaggatgcttgcttattccttcagatttaaaattctattgaaaatgaggtaaattatttaatcaatcaccttgaatttgtttaaaaactaatagagtatttgaaagttttgtactctagcaaaggaaatctcacttgcatgtatgatgtgtgcaaagcattttatcgggtagaaaaacaagatcaatccctcataaactattttatgacatttaagaagacatatgaggaactcaatacgttgttgccttttattcctgatgtgaaggttcaacaacgtcaacaagagcagatggctatcatgagctttctagtgagactctcctctgaatttgattttgcgaaaacacaagttctttctggatcccacatcttatctttgcaagatgtttttagtcgtgtttttcatactgaaactactccatttgctttgtttaccagtggtttggtaagttgcaataatagtaattcacctggaagctcttctacctcaagtggacagaaaggggttatccacaagggtttgacaattgaacatcggatcctggaggcattttttgcaactattgtaaaaagcctgatcacaccaaatttgagtgtagaaagttgcagttaaaaaatcaacaaagacagtttgctaatgttgcaagcactagcgatacatctgacaaatcggtcgttatttctgcggttgaatttgccaaattctcaaggtaccatgaacactcaagtcttcatctccttttgtcattgcaattgctgattatggtaaatctaatgcatgctttctttccacatcctccaagtgggtcactaattctggtgccacaaatcacatgacaggtaattctagtctattctattcttgggtttgacactgttacatctacaccttatggatcaccatcttctattctcgggtctggcgttgttacacctacacttttgcttactttgtcgtctgtcttacatttacttaatttatcctttaatttgctttcttttacttaatttatcctttaatttgctttctattaatgttatgtttttagaaaatgcaccttatttttcatcttcatcttcacctactcctactcgtctgtgagatgatgattatttgttggtatattctgtcacatcctttgctcctgatacatgttttgataagtctcttgttccttcacttgctttggtcatagttcttgcacctttaccacctcccccgcctcctatcatagtgtactctagacgtccacctctgtttcatgtcctgcacctgcatcttcgtcatcagattcagaactcaacgatgatcttcccattgcactacgtaaaggtaaacgtaagtgtacatatccattttcttattttgtttgttataatcatttgtcttcttcttcttgttcttttgttgcttctctcaattctatcactattcctaaaactgttcgtgaagtcatgtctcatcctagttggcttgctgcaatgctaaaagagatgaatgctttagttgcgaatgatacttgggacttggttaatctgcctttaggaaaacgggtcacatggtgcaattgggtgtttacggttaaagtcaatctagatggaacaattgctcgcttaaaggcccgtcttgttgctaagggttatgctcaaacctatggagtggattattattgtgatatttttttctcctgttgctaaactgacatctgttcgactgttcatttctatagcaattactcattattggcctttgcatcagcttgatattagaaatgtttttcttcatggagatcttgaggaagttgtgtatatagcaatctcccgggtttgttcctcagggagagttagggcgagtttatcgtctttgcaagtctttatatggtttgagacaaaatcttcgtgcttggtttggtaaatttagtcaggctgttgagaaatttggtttgttgaaaagt

SEQ ID NO: 116547 - DNA, 596 bp, Cannabis sativa
  modified_base (27)..(29): a, c, t, g, unknown or other
atacttgtaagtagatctaagatcctnnnaaaataatttccaacagttttgaaatagagtttttgagtttatttgttggtgtgggagagtgtgctctttgcaatggtgtcaagtagttggaatataaacgggatggaggatgaagttcttcatattcaagtggagggagaagaagaaggaatcaagatagggggaggagtggaagatgatggaatagatgcaagatggtgtcttgtaggcagatttttatcggatcatgatatcgattttgagattatgcaaaatgtgttggcttcgttgtggaaaccaggtatgggaatgtttgttaaagaattaccacctagtagatatctcttttaattttaccacaaagtggacattcaaagagtgatctctcgcagcccatggaagtttaataggatgcaactaatattggcaagattgaatgaaggggaagattctcagaaggttgctttggataagctttatatttgggtttaggtttgttgacttcgcttttagccaaagataatgagtctttttgataagcgataaacgatatgtcgtaataagaatatgtaataaagcaataataa

SEQ ID NO: 116548 - DNA, 809 bp, Cannabis sativa
ccgccgatggagaggagagttttgatgttggggtttcggcgttggactgtggaggtgaaagttgagaacttttgggcattttgggatggaatgaagagttggtagttttgggggttgagttgagcgaaagcacagaaaagtactgtgaattgtgaggagtctatactggtcaccgggaactcgctctcagggaaccaatacgcagcttttattgtcgtttgggctgatgaggtggtgagttggtggaaaatgaccaggaaaattgagaagaggatagtttttctgattatggaagccattcttagtttttatattttgtttctctgtatagatttatacatattatatatataagataagatgtgggacaggagttggcgtttgagttatcatcactactcactagttatatgaatatcattgccatatttgacttttcttgaaagatttagcgttgactaagaaacaataaattagaaaagagaaattatgcatttcactttaatcatatattttattttgaaaaattgtatcaagacagaggtttttttttatatatatcatctatcatgctgattaattgtaagctcatgattttttaaccattatatattaatgaaacaacacaaaattattagggcaaaactttcaatactttcgttttggtttcattaaacctgcacaatgcaaatttctgcgggtaaacccccaaaactagcaaactgttagcaatttaacactttcgtccaaatttagttgttaactaccaggttagattgtctacgtggacacaataaacacgtggcaca

SEQ ID NO: 116549 - DNA, 1295 bp, Cannabis sativa
gcgaatcgtgcggcatagcaaacccagccaagaatcctccggcgacggcgccgccgtcagaggcggctcaggcggcggccgtttccaagacacccttctcggccattctcaacatctctctaaccttcttgtgccctgggtcccacaaataccccatactagcactaagatccaacggtcccatttgaacacaatcaacaccatcaacggctgagatctcaccagctttcttagctccttcctcagattccacctggcacatgattagaagatcgtctgcgaaattactaaaatacccttcgtcgattccgtaacacgaagccctaactacggtgtgagcagtgccgcgaatccccgccggcgggaatcgacagtacgagacggctttcgcggcttcttcgggtgaatcgatcatcggaaacataatcccttggggaccgagatcgagtgctttctttgcccaagtggggtttgtctccggtaatcggataatggccggagtttgtgtggccgcgagggctcggaggcagtttagggcttcggggattccgccgggaccgtgctccatgtctacaacgacgaaatcgtagccggagagaccggcgatttcggcgagagttggtgagaggcttaggaggaaaaggccgtagagggtttcgccggcgtggagacgggattttagggtttggggagagaggattgggagaatggaaggtgagttggagagggcattgtcgagatcggaggatttggatttggttatgaattttagggtttttctagggtttagggttttgagtgaaaatggtttgggggtgattgggagaagggatcgagttaaagagatgggtgatttggagaaagggttgtgaggagtgaatgagatcgccatggctgctgctgctgccattgttggaccaagaagaagaataaaggaagaatctttgtctgaactgtgaagtgagatttggggatgaagaagatgagactatgtgaaaagacacttcttttattactgaaaattaagggctcctttatatactaacacgaatacattaaacatttttttttccttaaaagagaaatttttatacaaatttcattactttcttgattggttattaatatttgtaaaggtctcatggaaaatacacatgtaaaatttacaataagaaaaagaatgagtgtagggtgattcaacaatacaccctcttaaaataaatatattgacacactggttaaacgtaatttttggcgtgttaattttttttaaaattttttaaaattttacagga

SEQ ID NO: 116550 - DNA, 1778 bp, Cannabis sativa
  modified_base (1696)..(1702): a, c, t, g, unknown or other
gaaggaaagaccattcccatgcatgatgagaaaaaatttaataatttttttatgtattttaaattttattccattctattcctattcacattcacattcctattcctatgttggacaaatgatgtgtacctttaattctttgatggtatctgcttacaaattacaattgatcaagatggcctccaaatttaataatatctttaattgtgagactttaaatagaaataaaagatattagttagatatatatgtagagatatttaacatatttacacataataatatatatatatatatatatatgagtaactaaaggtggatatagaaatttcactgacctaatattttaagaaaaaaaaaattgtggcaaccacaatccatcaacaaaaaaaaaagaacaaaaatcaataatattcaaaaattaatcaaatcaaaatcatgaatcaatgatgaaaagaattcaaaaaaaaaaaatcaaaatttccaaacaaattaatcatttgatattattatacagggtatcaaattgtactcaaatctacctaagatttgaagacaaagtgtgacaaagatcatcaatggcatttaaatttgaagattggcggtgacaactctgagatgtaggcagcagattaaattgtaggctgaaaaattaaaaaaaaatgttgaacaagaaaaataaaatgatgatttagtgagaatgatgataagtagagagaagaatttctacgattgggttataggtaatggagattttagatttagagttttggtttagacattgagattttctcttttattttggaaagcaaacattaaagaaagttttggtaaatacaaataacaagttattttgttttataaagacagttttcatatgatattttgtttttactatttgggttattgtaatagaataggattaatctatattattgtaataattttttcagaaaaataatataagaatttggcaatgaaaaatgacactttagatataattagctaattttccaaagtcttatttctttgtatagataggaattcattctattagagtgatacacaacctttgaatcttaaattcgtcatctattttttctctctattgtctcccttctctctctatagcaaagtcatagccacacctcacccacatagtcatcctgccagaccaaccttgtcggagctcaactcttcacactggccttgcaccaaggggaccattgattccagcaacatttacccaccaaatctttgcaaaaaaattatgggtatataatttatttatcatggttatttagtttacttgtatttagtttgatatatatagatctacacatttctttctattagtttggtcactctgtgtctacaatgtattctcggttttctggtttttttcatgtcttagcgatgtatcacaatgaattttgcaatatattgcaacattagtggtggttagaggttagggatgaagtttcacgtctatcgatgtgtctgtaatgtattctcagcattttagtatttctcatgttttagtgatatatcgcgatgacttttgcgatatattgtgatgtaagtgttggttagaggtcagggatgaagtttcacgatgtgtatcaatgtgctgcgatattttacccacaagttcattgttgatgttgttggatatttattttactaggatcttagnnnnnnncacaagtatgttatttaaacaccctaaatatgaactttctaaaaagatcggaagagcgtcgtgtagggaaagagtg

SEQ ID NO: 116551 - DNA, 1413 bp, Cannabis sativa
tataatcatatttttattttataatttgaatagctatttaaaactcttctattcaatgctaaaagtaaaatatatatccaaccataaaattattcaataccttattggtgttttactttctgaccccacatccaaccgtcgatatagaacagctgctggaacagaagcatacatagaattcatgaaaggtctaagctccaaagctgagatgaaaggtgtgccatccccagtatttaaaagacacacaaatatataatctgaaatcggaatatgtataatctctttggtcagagctacggatgcattatccaattttacagagtcccatctgttagctccaagattcaaatcaaagcctgggactttcatttttccatcataatttccatacaaaaacctagcccttatcaagtacttgtttcctttcccatttgctatctttagggtgtagcaatttttttcaccttgaggaaaacttcttaaggttgtaaactgttgctcatgagaattgggaatgtattcaactgatatagcatagttctcacctatgctgttttcaatgaatttggaatctgaaacgtaagttaaatcggtttttttgtcgatgtaggtcatattttctgggattccacaatccacactgataaagcctgagaacgaaatcgcaaactatgaaatagttatcaaagaaaatgtacaaaaaaaaaaaaaaaaagttatgacttggggtgatataatatatatttcaactttctgccaaattatgtttatcaatgtgtatgacagaaataactttatagcatatatataacttaatgagtattacgggtatcatcacaaatttgagttttttgattttgctatataattaagaggaaaaactattcttttttttttttttttcattatatggataaagataaatataattaaatatatatttaaaagtataatgataaataattaataattttaaaattggtatttatagttattttttctttaatactgttccttatatatatatatatatatatatattaatgttacctgcttgagcatgaattactttgaaggctagtatacaactaaggaatgtaattaagaggaaatgtcttaacatcttcatcttcatcatgagcatcatttttttttattatttatgtataacaaagaaaaaaaaaaaaaatacaataagacagagagaatcaaatgagataggcagaactaataatatcctgctatatatctcttataaggcatcatcagacaacgaatgtaaagtgctgtgctgtatgcatattatagagtcactgatcaaatagtcttgcaaagcacgcaatgaaatagtcatggacttataggataaaatacaatatacagtactacaaaattattattataataataata

SEQ ID NO: 116552 - DNA, 1215 bp, Cannabis sativa
taagcaaaataaacacattttcattactctcctcacaatactttagtttaaaagcataaaaattaactctataccatagagttatcaatgtactggcgtgacattattattgtagtgatatagtgcactaattaaggccttaagttatttattacaaaaaatatatataggttgggcacacatacataagatttatctcatcttaactatatatgaaacttttatgtatatgtatagtgattacttttcagtcaaataataacctttcgtgtcatgattcataacattgtttataattaatatttaatttatacatacagttgtttatataatatatatttatgaatataaatgataataggagagggcaaggattatgatgaagtttgcagatttgattgaggaaaacattgaggaactagctagtatggactgccgtgacggaggaaaattatttagtgtgggaaaagctatagacatacctaatgtggcaaacaccctaaggtactacgccggtgccgccgataaaatccacggagaggtgctcaaaatgtcaactccatttcatgcctacacattgcttgagcccattggagttgtgggacacattatcccttggaattttccaagcaccatgtttttcaccaaggtcagccctgccttagccgctggctgcaccatgctcatcaaacccgccgagcaaactcctctttcagctctcttttatgctcatctcgccaagttggtacgtatttacatatttaaatacaatttatcatatgtacagtttaagtaatagttttagtatgtgcacccattacacaaagtaatagtttgagtatgtaatatgcatatttgtttcttgctggggtaccacatgataaagttttatgaggcagttattgtccctttaattcatgtcatgtatttcaattatgatcttatatatttaagcaccattatcaataaaacttattatttgtttttctttttggataaattttatttttgtccttacatattttcgtttttacctacatcaaatttttacttaatttttatttttactctcataatgttatatattttttcaatagaaatacttttcattaataccctctgaaaataataaattttattttggataaatattaatggatttgagtgtatacgtaggggaattatcttatatactatttttttaactattttttt

SEQ ID NO: 116553 - DNA, 2080 bp, Cannabis sativa
ttgtcggttttctttgggttaaacaggaagttgagcttggagacatcccaattccattatcagtaagtaggtccgcaactttctcctaactctcgggacgaccctttttaggatggggatgaaaatcatgaccatgaattacccacggatcatcctagatatctgtatcttttccatctgaaatgagcttacatgctccttccttaattatttctttggacttgacaatattcttccagaaccacgagtttgaattcttatacaaacacttcaagaaaggtctacttttaaggtacttagcactcaaaactttacaacacaacgaattatccttggtaaggagggcccaacctcatttagccagaaaattatgattcatttttgaggtcctttggaacccaagaccacctctagacttggagaggcacaacttatcctaggccttaagatagatgccatggtttccttttttacaactacaccaaaaatctctaacaataccatctattttagccgcaaatttcttggacaacttcgtcgtttgcatggtatacacaccactgatttaatcaaagtagcacgatcgactttagataaggattttaacttccacccatgcaactttgagaccaagttatccattatgaaatttaagtctgcatccttcttacgacttcagagtaacgggagacccaggtagttaatgttattcactaccgagttgagccccggagcctgtttaataatacgcttcatcccatcactggtatttttgctaaaagatgaatgttttcactttattgatacgttgactcgaccagacacaaaatttctctaggcactgtcaaaatctcgtagctttctccatcgtggccctacccacaaaaataagatcattggcatagaacaaatgggaaatttgagggccattccggctcaacttgatccctttaatgctacccttgtctagggcattctctaagagttgcgagagaatttcagcggcccatataaaaaggtacggggaaaggggatccccttccctaatactgcactctagattaagtctactcaccttaccaccattaaggcaaatattgaatgttgtcgtagaaatgcactgacggacccacccacagaactttttcggagctttgaagctgtgaagcacgtgatttataaatttccagattaacttatcatacgctttaaccagatcaatttttataacaaagaagccctcttttccatttttgtgcttaaatgaatggatgatttcctgcactagcacattggtagcatatatggtagtttgtcttatatagtggtttgtttaaaccatttcttgggctgatcctaagaatggtgtaaggtagcaatgacaccctcaactctaagaatatcaaagataagttatttcttcatgaaagtaataatttgattttttttttctaacaatgaaattaaaatctctactttaatttaatattatcagtaagaagtgtgttaactaaattttatatatttatcttttatgtttattttaattcactctcttggttattcaaggaatccaaagatttcaatgagagaagtttttattacaattcaatttcttaaaattactatatcatgaattttattgaaaggatgcatgattgatgactgcttataatgggtgattttgtattacaagtttactaacagtcttccaagtaaggattatggacccaagatgttggactacctatcgttgaaatcttctcagtttcgacgttctttgtgttggctttagagtcatccatagtgtaccagattgagatggaggtatcttttcaggtattaaagtcttattgtttagtttttcggggacatctctctcttatattaggcacaatggtaatgttgtggcacatgaattgactatgcatgcccttatgatagacaatgagttttttgaataatgaaaatctctccatattttgtgtgatgacaattctttgttacccttaaaaatatatagaaatatataagggaatcatttctcccatataccatttttgaaccttttttttttttt

SEQ ID NO: 116554 - DNA, 2596 bp, Cannabis sativa
  modified_base (63)..(72): a, c, t, g, unknown or other
actcagaaattctcattcactttctctttctctcttcattctcttcttctttcttctcatctnnnnnnnnnnattttatattattttataacactacaaatattttatagatcaacgctggcttgtattgaccaggataagaagcaccatctaaattcaggccgcaatattgctaagtcagtcgccctctaaaatgttttatccaaacaaatcaaattaaactgcagcacttacaacaattattttgcgttgacttttgagatagatagaatgttttcactgaaaatataacacataaaatatattcttataaaaaagaaaatatttgtttgaccattttcatgtcaaaccttctgatcaaatcaacatggaataataattgagacgtacgatttatttgaaaatttattacgaagattttcaaaccaaattatttttattgatctcatgatatatcaactgagctcccatgtctataaattcttatatatttacacaatttttcatataaatcataagtttaagtagttgaatctcgagagaagagaagaaacagaacagtgatctattatcaaaatgataatgtttctctcctggatcgtgtttatagccatatatgccttcaccaacaatttccttggcaaaataaagaaccttccaccaagccctttcccagttctccccattattggccatctctaccttatcataaagaaacccttagtccatcgagctctctccaagatatcagatcgatatggtccggtacttctcctcaagttcggctctcgtccagttctcctggtttcttcgccttcagcagcagaggagtgtctagctaagaacgacgtcgtattcgctaaccgtccacgtttgctggccggcaaacacttaggatacaactacaccagccttgtctgggcttcctatggagatcactggcgaaacctccgaagaatatcaagcaacgaaatcctgtcctcccatcgcctccaaatgttatctcacatacgatccgaagaggtctcctcgctcatccgccgccttgtgcgctcagctcaacaagatccaagggtggaaataaagtcgctcttgtttgagcttatgcttaacataatgatgagaatgattgccggcaagcgttactacggcgataataatgtcgaaatggttgatgaagaagctcataagtttcaggagatagttagggaaacgctacgtttagggggcacgacaaatgtcagtgactttttaccactgttcaggtcagttttgagtagaaagtacgaaaaaggcttgattgaggtacagaagaagagagatagtttcatgcagagtcttatagatgagaatagaacaagtatagcattagcagcctctcgacaaacctctctccctaaagaccacaagaagaagaacatgatcgaagttttactgtcgcttcaagaatcggaccctgagtattacacagatgaaataatcagaggactcatgctggtacaataataattaaaaattatattctataattcccatttccagcatattaactttttaaaataaaataaaacaatggaaactataatgaaatgattttgtaggctttattatcagcgggaacagatactacagctggaatcatggagtgggccatgtccctaatgctgaatcacccggaagtgttgaaaaaagcccgtaatgaattggagtattgtattggacatgatcgtctagtggaagagtcagatttggggaagcttccatatcttcatcgtatcataaaggagacactacgactgtatccagtgggtgcattactaccccatgaatcatcggaggagtgcataataggtggatatcgtgtaccacgtggcaccatgttattggtaaatttatgggccatccaacatgaccccaaagtatgggatgagcccacaaaatttaagccggacagatttgaagaaggtgatcagggagtgagagaggggttcaaattagtaccttttgggtcagggaggaggggctgccctggtgagaccttagccatgcgtatggttgcactaactttggcttccctcattcagtgttttgattgggagatggttgatcatgaggccaagattgatatgacagaaaagctaggtctcagcttgtcaaaagctcattcctcactactcaactgccgaccacgtcctaccatgtccaacattctttctcatatatagattgattgttctttacttgttaatcttctatatagatatagatataaataataataaaagaaaaaacaaataatgtctattttgaagttaagaaaactcaaaaataaattatattggccagtttggcacagctgtgctgtgggaaaaaataactgtagttgtgttgtaagaaaaaacttttaaagtactgtgagttgttaagatctattataatgataatgataatgttatagttcattatactcacaaatatataaaaacttattttatataatgttttattcttttatatatttttaatttttttaaatataaatttatatgaatttgataaaaataatttatagtatttgtttattatgttttatcaa

SEQ ID NO: 116555 - DNA, 1499 bp, Cannabis sativa
aaaataatcactatgatagttttatttaggcccaattagtattgggcttactcagttaataataattatttaattaaatgttaaattcctctcttttacaacaatagtagaggaaacatgaggatactaaaagggcatagatctctcagtaaccttttctttttcacgaaggaaaataatgaaaggataaagaggtagagaaggactctcatcacatttttgcaaatatacattacaatatttcctagtatggtcaagtttcccacaaaagtagcaaaagtcaggaaatctttcatatttaaaatctaaccatttgatgatctccctacccatcttaataaacctaacattcatgcctctcctaataggcaggttcatatcaagaaggactctcatcctcaggttagacccagtaccctccctaatagtagttttgtctacctcaataaggtcaccaacctcagtagcaatgaacttggctagatcataggatttgcacataaaagggattccataaacttggatccaaaatggcacatagtgaagatgctctagagtaataggaaatgaactatcaggggttgcaaaaatagtgacactatgagcaaagttctatggctgaccctctaaaatcctacccttatctccctcacactcaaagcttaccaaaaaaaacccaacagtgtgcttagaaactaaaacagggaaacgacactcggatgactagatttcagacaaagtcttcatcaaagagggacgattaaagtgtctaatagtgtgcaacttaagaagaagactaatggaaacatgggactcagtggaattaacatcataggtaaagatagtgttttccttaggggttaacactagagcatttgaaatattagaaagaaaatcatccatagtgtaaaggaaaggaatcaatactaagaacagggaagaggaaatgaaataatattggcgatgaagagtgttgtgacgagccttaataggaagaaccagaaagcctttcgtatccttctgaaggatttcccaatcctatcaccgatcgtaggagaggtagcccaaatgatgaaggggatctgattagccaccattttccaagctttcgcctccattttgccaagatcaaagcatttatccagaaaattttttagatttttacaagagaaagaggacaagaaaagatggcaaggccaggtggaaccatttgaggaaggaagagagaaaagcttgcaattaatgccctgccaaagataattaaatttagagaaaggaagagtatcctccccaatacgattaatgttgtgatttaagctgaaagaaaaagagtatataaaaaaattttaccattaaagatgctcttagatatgaccaatcccttctaccattttcgtgttttaaattatagtcttatatctattctatataaagcgtgtctatataactgaattcttaattgatgagaaattcatggatgactttttatttatatttaa

SEQ ID NO: 116556 - DNA, 2081 bp, Cannabis sativa
tttttttttttttaaatttttggctctgggtccgatgggtctgatgcggctgggatttttttttgggttttggtccgatacacgatggtgagggggtgacgggagagggtcctagctaagaggtggagaggggggttgggtcgggtcgtgagggggtgacggcgtggtggtgtgttagggtttgaatggtgtggggtgttaggttgagagaaaagctagagagatagaagaagagagagagttggggtgttagttatgtgagggttatttttgggtttttcatagaagtgtcatatttttttttattttaaaatgtattggtttaggtataaaatattagagtttttaaagtatagtttttcaaatttcccaaaaataatacggacctagcacgcacgtatttacagggctcggagaaaagactgagagcgtgagacctcaacggactgtatataagttgtcgacctcaacctctttcttcacctttacaagcgagtactcattgctggtgcaactctttaatcgaatctttaaggtttacaatccaactttagatttctcgtagaattaaatatccctatcttatacatccccaaatgctattgtttgattttgattactcagtcgtttatgtatccgtttatctttgtttataatattgttttgtttctgggttttgcgtataatctaaatctactatatgcttctttgactggtttttttgtatagttttgtagaagaagtgatttttctttcctcacttgaatctgcatgaatgacgtcgcacttttatttgtattaactcaacagagtatagtatcatttagacttgtttaggatttattagggttattagctataataaggggggaagggctttgattttgtttatagatgttagattttgacaattgtttcagggattttgaggtcgttaagttcgcagtatgtgattgaaaataatatttttttctcagcggccttacataaattttattataatctatttcttgttttttctagtatttatacaagtttttccagattttgggattataatttacctcattgtttattgctgtatctgaaaagaactggtttatactcagattttttcagttatttcagttgggtgtgtgattatcttgaatttatttacatttcagatattgatatttccaggtttggttcaaaaaaattacaagaacgttttctagtttggtttttccttcttcgctcattagcataagtgttgcatattttgatgattaggtagaaacatggggaaggatgcaaaatcgaaggagtcaggaaaaggaaaggggaaacaagccgcgggagggagtgatgagaatgcttctaagggtaaagggaagggtgggaagagtgcagatgggcttggcacctgcacttatgttaaaggtttcttcttttttcaatttgtttcagtagataagtttgaatggaatctattgtgtttctcatcattgctgtttttcatttttttttctggtatgttgcgggtgtgcatttttctttaattggttttagcaaggcatatcttatgtgagaaacaaggaaagatcaatgaagcgtacaagaagctccaagatggctggcttagcaatggagataaggtcccgcctgcggagtttgcaaaggtaactactctttaggaatttatccattttgatttggtactcattcttcaaccatattcatgttctacttatgcccttcttttgcttttgattttttgcccatgttatgtttcttcatcttgctagcctgtaatcttgtttaaagtttaagtgatagtgagtactaatctgccttctttcctcaaaagggtgctattattagttttgttgctatgtcaatagtcttaccttttggtcttgaagtcaattatttgatgtttagtgttgccacaacttatgttagatacattttttcaaccctgataatatcatctagttcgtattttttgttaaacttaggtagtgttcggtaaccattaaaaaatcagttttctgtttaattaatcagaaactaagaacaaattataaaattttgttaag

SEQ ID NO: 116557 - DNA, 2748 bp, Cannabis sativa
ggttaattcttaatgtatatattaatatatattatgaatggattatggagcccatgttcttctctactgtggttacagtgagtgtgtactgagtggaatgaagaagaagaagatgatcacgagtacaccccagaaacttccatgtgaaaagatcttgaaatgactaaatgaaaagattcatcggtgttaaatcagtatatatgcactagtacttccaaacaaataatgcattaaaaaaaataactaatatatcatgaaatccaaaccgactatccttaaaatacaattgcggtgtttaaataatgaccaaaaaattgaaagtatagtgtttcttgttcgattccaaatacactggaatcaaattttattgttcttgtatagctcactcagctaatttcatcttataagctcactactatcttattctactctatccttaatgcaattcgacttttcatatactcattatttaagaccgatcgaaaacccaattgacttaaaaaagaaaagaaaaaaaaaagtttctgactcaaagccaataatctttctcggaatcaaaatttcaagatcagctcaagaagggtatagaaaaatggcactaattactagctatatccattacacagagcctaaagattggctttggtggagttggatttttactttattatatatatacataataataatactatgaaagctataagcctatttatctttattttctaggggccctagaaagcagaggtgaaaaaaaaaaattaaaaagagagaaaaaagcctcttctcaaaaagtggccattctttttttttttttctttaactcctctccttttcattcccattcccttcccttataaaaaccactctctccttctcatatttcccatcgaatctaactcaaagccccttcactttacactcagtcactcacttgagataaaacgaaagagtgaaatggagagtcggggctcgtctttttccagctgccgaacctactttcgggctttgacccaaacccctgcccgtttagcccgccgggctggctcggtatccacctcttacgaagaaatgagccaggtcagagcacggtctggttctaacatgatcaaaagcctcaggtggttcgacctcgtcggttttggaatcggcggcatggtcggcgccggtgtttttgtcaccactggtcgagccagtcgtctctactgcggtcccgctgttgttttatcctacgccattgctggagtttgtgctctgttatctgccttttgctacacagagttcgccgtcgacatgcccgtcgccggcggtgccttcagctacctccgcgtcacattcggtgtggatttctcactacccttatcatctgaaaacaattttttttcgtaatgcatcaccgaaaatgaatcaataaatgaaaatattaaaattgattctgttttgcttaggcgagtttgcggctttcataacgggtgctaatctcgtgatggactatgtcatgtcaaacgctgccgtcgccagaggcttcacggcctatttgggtaccgccatcggcgtccctgtcacgaaatggcggatcgtggttgcctgtcttcccgatgggttcaatgaaatagatatcgtcgctgtcctcgtcgttttgatggttaccttcgtaatatgctacaggtatacatataaaaaagcaatctttcttatagttctgtttcttcatctttctgactttttgatgattctttcaatgctctgtttcagtacgagagagagctcgatgttgaatatggtgttgacggcgcttcatattgtgttcatactatttgtaattgtacttgggttctggaaaggtgattggaaaaacttcactgaacccgccgacccgattcatcatccatctggattttccccatatggagtttcaggggttttcaacggagctgccatggtttaccttagctacatcgggtacgacgccgtttctaccatggcggaagaggttcgtaacccggtcaaggacatccctattggagtttccggctccgttatcatcgtcaccgtcctttactgcttaatggccgcatctatgtccaagcttcttccgtacgacttggtaataataatacacaaaatattaatttacataattaaaaaaaaaataaactaaaagaaaacagaacagagcaccttacttgttttttatttaattttaagaagatattaattaattttatagccgaatgacgaaatggcccttgcgccttgttattacagatcgacgcagaggctccattcgcggccgcattcagtaggcaatcggacggctggaaatgggcttcgaacgtgatcggagtcggggctagtttcgggattttgacgtcgctgctggtttcgatgttgggccaggcccgttacatgtgtgtaatcggacggtccaacgtggtcccggcctggttcgctaagatccaccccaagacatcaacgcccgtcaacgcttccgcttttctcggtacgtaactcctgagccctgccttaatagcacgctagttattattttataattatcaattcattaacaataaattttcttgtctacgtattatttttttgttcttataacgtttgaataatttaatttaataataatatataaatgagtgctttggatttatttatgggattttccatgcatcgatcttcgtttttgtaatattataatgtgtgaaaagttgcacagttcccaattgtagtcat

SEQ ID NO: 116558 - DNA, 2666 bp, Cannabis sativa
  modified_base (32)..(36): a, c, t, g, unknown or other
  modified_base (166)..(173): a, c, t, g, unknown or other
ttgatgtatttttttttttttttggattatannnnngttggattgtttgggaactccaattcaactttttgagattttcctttcatggatttaagaattaaagtcaggacattagttttatgcaaattaaactgaatttcgagttgaattttagtttcgtagtagnnnnnnnncactttttttatgaattcgaaacaacctctgttttgattgattatgatcgtcttctcaggtgaagtcgccagaattaatggtggttatctttctgattgaattttcgtttcgattgcgttgggttgatgcgtagttgtgcgatggttgcgtgatagttacacaagaagcatagatcctgggttaaaggtgtgtgtaagtggtatttgtgtaatttttttagttgggatgtatatttgtttatttggccagctggaagtatttttgtaatattgttattttttttttttttggttaaaactgaaaaaatccctttaactaaaaaaatgaattttttgtaatttattgtaaaaaacccaaaataacattcctttttttatatagttatagaagtaatgaattaattgatttttatattcttgacttgaagatagtaggcatcagaaaatgcacgccccagctgttgagatctggcattatcgacattatatatatgttcccacaaaaaatgttacataatatgtactctggtttccctagttaacaacgccaatcatttcatacatatatatatcatgcatgaaagtttggctctctgccttttacatatcataaagtttggctctcatgcatatatcatatattaaaaacaaaaaaagaaccagcatacacacaaacgcgtgaagccaaatttaatctagatatatatcttattaaatatatacctgtaggctaatttcgatcgatcgcaataggataatggcttggtctcttgataaatccgtaattttgggccagctatattaacgagatgattttaattaacttgatcatagtgctgttcttgataacaaggcggactaaaaacaatatttcaacttattaaattaagcctgcccaattgaactgatacatatatatatatatatataaatctgtgtgtcgactctctctatacataaatctgataaaggagcaagtaatattataaataaagtaattctattacgaacaatataagttgagcaatggctagtactgatcaagagagtggtactcctgcggttaatagtaataatattagctatgagcccgttggaaaaccacaaaagttagtgccaatgtctacggttacaaggattgtgtgtcttggattatggctcttcattgttattctcctctttatagcattaattgtccttgccactaattccaagacaattgaagatagcccaactctaaatgttcaaaatgtatctgcttacaggtacagatatgaatatctgtacaaaacattttcttgtatatatttcttaagttaaattttatcaaaatgtcactgatctttacttgtttttgacctacagttacatgctttctgtgattgtgtttggcttggtatattccctgtggcgattaggattctcaatctaccttttcataactaatgtgaagggatactttttgatagacttctatggtgataaggtcaattcatttgaaattaatcttcttaatttagttgtacatctttttaatatagatgtacacatgtaattacaatatctctgaaacttagtgaaaatgttatcataagatatataattaaatatataacggcggtttgattgaacagataatatcatacctgcttgccactggaacagcagctggatttgctgcaaccaaagatgtgaagacatattttagccaacaatttcaacttttggatttggaagatggggaattagatgggttctgctcaatgggatacgcatcagctagtttggttctcatcgcattcatatgcacagccatgttatcagtcatgtcttcctacgcattcgctgcaaacgccaagcctcgtgcttaatcccttaattaattaacaacaaaaatattacttatcattttttgttatgttatttaaatttccttctccgtaatagctgtaatttttgtgccttaattaatgtgcattttcattattctctaaacattgagcctctcgtatactcattagtggtgagaagtcctctactagaaatggaaatatatttcaactgaattattaattaataaaggcctttggtaaacttctgtctttttttaattttttaatcataaaaatgataatagaattttgatttttaaaaaataaaaatgtgttctataaccatttttgtattttaattttaaaaataaaaaacaaaaatgtacctacttttattttttgtttttttatttatgtgaggaataagaaattaagctaagagaaactaggtcgaggtacaatactagggccttggtctaaagccaaggcttgggtccgagtacgggtcctagtcaaggttgggtttgggtgggaccggagttgggaaccagggctggccctcaaatttagtaggccatagaaaaaaaatttattttgggccctttatttaaaaaaatgtggtatttttcaaaattagtaaaaaattgtataattttaaaag

SEQ ID NO: 116559 - DNA, 3566 bp, Cannabis sativa
  modified_base (2669)..(2670): a, c, t, g, unknown or other
  modified_base (2889)..(2891): a, c, t, g, unknown or other
  modified_base (3533)..(3533): a, c, t, g, unknown or other
atattttatttttaattgtatcactttttaataacgtagaaaaaagctaacataaaatttagtatacgtgccttgcacgtaattttttgctagtatacttatgtatatacatgtatggtgaggtgtattttaattaaatattttaattttttttttattattaattgatcaaaaatttaaaatgtacgagtaatgtattatagataaataattttagttttctttttcattagaaaattagatgaaaaatggaagaatttatgtaaattaaattaaaattaataaaataagagaattaatgagaaaatagctaagaatcattaaaacaattttaaagtaccacaccaccgctcatatttatcctttatatatagatatatagattaaactaaactaaagtaagaggaaggtcctattatgccaccttcaccttagtaaagaactatatataagtaggaatataccctattagtgcattattattaataaaataattaacttcaaaaaagtaaatcaagttattcatttttatataagggaatcttaatggtcgttgcaatagacaaataacccacgtttttatactcagaatatacctttgaatatttctattagttcaaatatatattataattttataatcataatggcggacgggttgacatttttatattgtctaattacaaacaataagcactaataataatttttctgctgccttcgacacacattttattggggtacgatggacacggttttttattttttaacaagcttgcatggtcaagtcaaatttggacgatgttataagtacaaatctaatctaaagatcaaattgcagaataacttttaatatttgaactttcctagcaattagctcttaaaatttaaattttgacgataaaatttataaactttacgttttattaaaatttaactattttcatctattttctatggttaattgcatattaataatctatgtgtacataaagtattatccataatacaatattattaagccaagtaaataaatatttaaaaaataaaataaattaatttaaaatattaaataaatcattaaaaaacatttttttttcttttttctttttgctttttcttttttacattttatctttctttcgttttcttcttccctatttctagagagagagagagagagagaggaagaccagattgagagagacgaccaggggcgatcacatgttcttcttcctgtggtggtcgtcgcttggactagggacgatcgaagatggctccaataatgggccccgcagtgacttgctttgtctctcttattttaagcgtggaccagggacgaccgcgatggtccagtgatgggtcccttttttttttttcgctcccctcctccacatcaatccatttttctttctcgcatggctgatatccaaattcaacaacaagaccactgttttgattccctatcattttctttctcctcttctttgccaacaccggtggtgtctttatcgttgtttaccgagtttttcgacaaccaagttttttttagaacttaaggaagaaataacagaatagataataatgtaacaaataagagatttttacatagttcagacattaactatccttagtccacgagtccattttattaggctcatcgaccggtaactatttatacaaataactgtacttggttagggcaaggttgtaacattcccgtgcaacttgttgatttcctctcaggcacccgaccccattcttcgttgggaacttaaggcatgaatgaaatattgacgtgataacctttaggtcatataaggctggtcggcctaacatgacattaaaggctgatggaacatccaatatcaaaaattgtgccattacaattatgctcttcggagcttgcccaacagtgaggggtaggcaaatttgccctagaggtgcaacactctggtcggagaaaccatatacggactgaagacagggggttaaatctttgagctggagccccattttttcatgtggtgttttgaacaagatatttgcagaggctccattatctatcatggttcgagccaccattttgttggctatctgtacttccacgaccaacgaatcattgtgcgggaaatttactttaacaacatcctcttcaatgaacgttatggtgggttcccttactcgcggtagttttggcttcctttcttcgacgaccaggaccacttccttttgctcgtgctgtaatgttcaggcatacctttcccgagcttggcctgaatctccagctatgtgcgggcctccaaaaatgacttgtaaattcccttctactggtggtggcagtaaatcttgattattgtctgtctgggcagccctctgattttgatcggccttggcatatttttgatttaatttgatttttgatttaatttgaattagttatgattttttgaaaattgaaaaaaatcttatgggtggtgacacaccacatctgcgcgcggatcaggtgacacacgggtgtcacccgtgttcagacacgggctgtctgaaggatgcacacccatgttgtctgaatcccccctactcgcgcggacaggctacatgcagcctctgttgtggcaatcctcggctgatcaccaaatccaattttttttttcattttttcatgnnttttcatggaattaacttcgaattttttgtgtaattttgtatttagatttttgtttttcatattttaaatctaattatcagaattaaatttttttaattaatttaagatattagtagtttttgaaccttgaaaataggtaaaaatctatctttttgcttagttggttatcttatttttaaattttgattatcttatcttattattattatttttttttnnnaatttaaggtcaaatattttatattttaaaattgttgtcctggattttgcccaaaatacgtggacgcggataagggtgacacgtggatctgtaagaaccatcacttatgaaaatcagataagtcttagacgaaagaggagtctctcagggaagttgtctctcggaagagacataaaaagtatctttactctccgggaggccagaggcatgctaaggcagttccgggaggtatagagatctcttgaacagtcacttcgcatttaatgctgcatgggggaagacatattgaaatctccataaacgacatgacagatggcgtaacccccctttttcggctattacactatgattagtaagtttagtgacagctactttatgaggaatcacatcagtcaaaagggaataaaagattatatccacctagctcataagatatacgtcatgtatttcctattttgtatctgctgggaatatgtgcccctatgaaactaacacagaaagacaagtgatccattcctagggatcaccccagaaaaatactataaataccccacaaacagactgaaaatgggtcggacatttttcggttttaaggaatcaaagagagaaaataggagagaaatccaccaagaacattctctntaataaatactctcataaataaaaaagacttgt

SEQ ID NO: 116560 - DNA, 2527 bp, Cannabis sativa
aacggcaaaaaaagttcagggggcataatttctctttcttccgtgcgtcagatttttttttaatttttttttcaaataaacaattatctcaacataaatatgtacacaacaattcaaatatatatctttaatatatataatgtgtcagtaattttttttatctttttttttttaatgtctttctccattcattttatatatttgtttctcttttttcttttttaaaagaaagtttaaaatgttttatttagttacacacaagtaattatttgaagtcaaaaattatataaccgcaatctactttttaacatgattgttttatgatatgggaagcatatatttttttaccgttgtcggaaaaaataattacaatcagaaataaccttttagtttctttactagaaaatcgaattttcaaataccaactaatttctaaaatgacgtataagatactaaatttttaatcttgacatgttctgtgctctataagatgtgttagtgttacttatttagagtacatttatttagatattagtaaatttttaaatatgaaatattataatatttattgttgtaacccataaaattagatggtatacttcttttgttcaaatataatatttagttacttttttgttaataatttataaaagaaagggaaatgttacttttatcttgttcatatttttttatatctaaaacaatatatatgtttctcataatttaaaatatagtttaaaattgctaaaacggaaaggtaacctcaaagtatcttaaataataaaataacacatagcctaaaaagtaataaataaaatcataattttaaggttatttgattaaaataagtaactaaacgtatatgagaaaaaaattatcttgaaacaattttttttttaaataaatagtaactaattgatatattatttacatcaaaagcaactaaaaagttgctctttttaaaacttgcaaaacactaaaatttttggaaacgagaattttccactttttcctattttcggtaataattttaaatttcggtatttatgctgacgtggcaatcggtatttgtgtaaataaattttttgaaggtatttttataaataaaattaattttaggtataatattgtaagtcactgaccatatagttaaacttcttaaattacactttccataattaaactcattattgtattttacaaaaaaagaaaaaagaggcgtgacaggtatacatatgaaataataattattacttcacttattttttttttaacatattgtaaattgaataatattaagagatttttacaccattttttattttttaattcaggcgatttttttttttaaaaatactgtgtgttaagtttttatagttgttccacggttattttttaattgttttaatgatgttttaattgttttattttaatattttacaattattttatatataaaataatatttttataaaagcttttgtgacaataacattgtaaacctaattcaatatttttataaaaactactaatattaattatttgaaagcagcataagatagtaagaacatacgctcctcttacctagatagtaaagatggcaagtgatgatgaagaatcatgattcatgaatgagattattaaaaccgagtacttcataaatatgatcatatgtgcacaatacacacaaaaagaggcaattttaattgcttaccaacaaagaatctcatactttttgtttgagtgtagtgtagtgcaagccaaaaacagaaaaaaaaaaaaatgtattgttgcatataaaatccaatgatttcttatctagtctcacacccaaaatataaagagaaattttatagttttatagttaggtgtcttatttttctctctggttattttatttttggaacataaataaattataattgaaaaggtttatatatgagatgtacgttatagtaataattaatatctcattaattttaaataatttattatattgcaaatatacttcaaacaattgcatacatgtttaatttttatatgttgaggtttggcctcttgagccagttgtaccaactgtttttaacagtttatgttccaacaaacttaattaattaacagtcaatactaaaaaagagttttttatttcgatttttaagttacatataaaaaatttattttggttggtgtaactaacgctttaatcgtagacgcaaatagtgatattttttacttcagttatgagccgaaactaattgattatatgcatcggttatgaatcgaagcaaaaaaaaaagtttttacttcggttcataacgaagaaaaaaaactagtgcaccgatgccagacaccaccacaattttttcagtttcacataaaaaaaatcacatatatcaaatttacaacaatctcaaatttctttagagacggaagagcaccaccgcgcgccacgacaccaccaccaccctaccaaagcgaacctgaaaaaaaggcaacatcagattaaaaatagagagagagagagaga

SEQ ID NO: 116561 - DNA, 1301 bp, Cannabis sativa
  modified_base (1268)..(1270): a, c, t, g, unknown or other
taaaaaaaaaaacaataatatattggtcgtaaatcaaaaaaactatgtcacaaaactcaaaaacagattcaaaccaagagtgcaatccaacaaacttacatatacaattttttatttttatgttttaaaaaaagaacaaatataagtgtatgtgtatgggagctttaccacttagattcacattgggtttgaagtctactctatgaggagttcaatggaaggcagtgaccttcttccacaaagcgagatcgcggggccgagaaacccaaacacctgcgacaagtgcttcgaaacaaatctctgggtgtggatcgtgttctactcgatcagagaatttcattctctagtataagctttggcagggaaggcctccattatcagcaactttactgaagcttcaaagtaacttaggggaaactaaccaggcgcatgcaagtcatgagtgcctttttctttttaaaaaccgtaattttacagttatgatatcaccttttttttcaagcaatgactaattaatatcattgataattaactatacatttattccaaataagttgtttattcattcgattagcatacacaactaatccatatgcaactagccacattggtcggccgatgtatacgggacactctggaaaataggtgcttctagggatagcaaacacaacttttttaatttcatctggacctgggcttttttccactgctcattttctgttttgactgagtatattctgttctgttctgaagccgcctatctcaaatactagcaaggaaaaaagttgtgttcttatctccttcttgaaaccattatacttaagatatttggaaaagaaaagacttgtataatctacttgctttagcatatattcccctagctactgcttctttctgaatttattccacattaagtaaatcatttttgagttcctccatacactcctttaattgatgcaaggcctttacactttccgagtgcaattcattaaaaccagccctgttcagttccttaaggacaagtttcaatctttttaatattgtaacaagatagtacataggagtccttgacactctttcttcccagctctttttaactaatacagtaaaatcaggcgcaccattcaacattttaaagtaccgaagtggtttcctacccacctgaggcaatgagtggactgttaacaacgcggggtagttgtcaaataggtatgtcaaaaagatccatttagttggagtggatttggagctccgattcgacggatcannnctgatccgaaatattcggatacttattggat

SEQ ID NO: 116562 - DNA, 1898 bp, Cannabis sativa
ttgaaagctgagattggttcggtggtagcacattagtgcagtgtgtcatgttttgaagcaaatctggcattttgggggtcttgaagggggacggggaggaccagatggaagccacggtgtaagggatcgaggaggggatggataatggttgcgaggttgatgaaaagaaggtatagtgggtgggcaattttgctgaggatgggacgggaagcggggttgggaagagggttgttgagaggatgatttaggtctttgtttgggaaaggaaaggttggcaaagttggcttgaagggagctaggtgaggcagcagcgttttgtcgttcaagacgagcttcatagctgagaagaagggcatgtacctcttcaatggtgggtttcacaggccgggctaagattggagtaacaaaagcattgtactccagtccaaggccattcaagaggtaagtcaaatgttcttgagaggaaattgggtccccaactgaagcaagagtgttgcagagggtttttagtttttggagatatgccgaagcattgagtctgtctttcttcaggttttgcagcgccatgcgaaaatcgaagctccgtgcaaacgaggtggcggagtaggtgcgttcaagggagacccagatctctgttgcagtggtgaaacccacgatttgaccgagcattgagtcagagagggaggcgtagagccagctcatcaacagctggttgtatctgtgccatgttgtgaatgctgggtcgacttggctcgaagtagaattgggaaattgtgccgaacatgccacagtgccatctatgtaaccttcaagaccatttgcaataataatgttttgcatttgcattctccaaactaggtaatttgtgtcatctaacttcactgagatggtttggttgaatgaagaaaaatttgggggtaaggaaggagaagaagatgaggccgagataggtggtgcggctgtagtattagggttttgtgtgttagtgatggtagggttttgaatggggttttggatattttcatcttccatttgtggggtagagctagtacaatctattgatgccatggggagcctttttggctctgataccatgttagaaggaatgaaaaagatgtattgctattcctcaaaggaaaagagtacacaatacaactatatttttaataaagaggagacctaataagggacacatgtcaccatacaataaaagcaagaaaacaatacaagaaaataaagagatataattttatggtttaacacccattaatcgtgttgctcttaattaacaacaataaatatgagttgcaaataataatattgtcgtcatgataatgataagacaaattattattattattattattattaaataaaaactattatgaaatataggtaaaagttatggggcacacctgcttcttatcgtgtgttttgagttctcatattgaagatttgaaagatcatcaatgtggccaacacttaattgcctgtttatttttctttgttttctaatttcagtcatagtactgtttcttattacaaatggcatatataataataataataagcataataataataataataagcataataataataataataataataataattattgatgaaacaccgaatttaatttgagtgtagttatactattttatttaacatagattaggtttcacttaataaatttgaatgaactataaaaattagtctcatattattaatgaatgtattaaaataaataaatggactacttaacatcaagtccaataaaagttagggaaaaaaacaggaatattctaaaaagggaaaaatattacaacaatactgtgggccggcccaatgaacatttgtacagcccaaaatgaaaatattacaaaaatacc

SEQ ID NO: 116563 - DNA, 1918 bp, Cannabis sativa
aagatatagaaatgattgatgtaagtccctcatggatgacatcaatcatgaactatctcttaaatggtcaacttctataagacaaaaacgaggcaagaaaaattatgtacaaaatatcgagatatacagttgtcgaaagaaagttatactgaagaggatcaacaaggatacacatgagtttgtaaaatatggaaaaaatgtcaaagattctcacatatatcgagagtcctcctgcttgaaccccgcatgatgacctcgccttatccattccctatttgggggatagatttgattagatcattaccaacggggcaaggaggtgcaaactatgcagttgttgcggtcgatttcttcaccaaatggactaaggtcgaaccattagttataatcacttcaaagaaaatcttagactttgtgatcataattataatgtgtcgattcggtatacccattaagatagtatcaaataatgggacccaacttaatagcgatttgttcactgagttttgtgagaagaataaaatcatcaaaagtttttcatcaatctcgtgaccacatgcaaataggcaagtcgaagaagtcaacaagatcgttaaagatgctataaaaagaagctcagcgcactaaaaggaagattggtggatgaattgtcacaggtgctttaggcccctcgaaccactaaaaaaaactgtaaagggtcatactcccttttcgctaaaatttagctcaaaagcaatgcttcacgtggaagttaacatctcgtcccataggtgagaattctatgatcaagataactaagagttactcgaagaatcttcggacttgctcaaagaaaagagagatgagtcaaaagtgcgaaaatgatgcataccaacaaagaagcacaagacatttcaataagagagttaaagaaagactctttaaaattggagagttagtattgcaacgagtattctccaatacacgagatctcgcaataagagtatttaacccaaatcaggatggtccatatgtaatagaagttagcaccagaactttataaattagcttggttgaatggctcgttagtaaaaaaaaatacttagaacagcgaacatttgcgactatattaccaataatttatttgtttatgtaattttaagttctaaaaaattatgtaaatttagagttatgttgaataaatgtcaagacaattttttttaagcaagtaattataaagttgtaactttaaaattaattaggggtatagggatatgagttaactagacttttttagaactatgttatgattcgaaattaaatcccaaagtcccaaagtttaaaaagtttttacaaaagagagaatatttggttaaaattggtctggaacaataaaaaattgaatataaaagtcttatttaaagcaagaataaaaataacacttgttgtaaaatgagaccattaagaaaagtcttgaaaacaacagtaaacttatgcgacttaagaaaaataacggcttgcatatctaaaaatgttataaacaaaacctttaaagtaagttttgataaataatacttacgctaaatgttcatagacgattaactatttattgagccaaaatgttaaaataactaaagagttggtcatctaaaacatttaagttcattttcctatttgatggtttaacgagtagtgaaaatcgagaatatttataaatagacaataatttcaaaatcatttgaaattaactaagtgggccactgataattgttgttggaaattctctcaataactagtgaaataatacgtgcttcgcacgtgaactaatcacaactggataaatactattttggactttatattttgtaaaagttattaattggacattctgttttgttaaatgataaaattgaccctgtattttccaaaattgtataaa

SEQ ID NO: 116564 - DNA, 1013 bp, Cannabis sativa
taaaaaaaggtaagccgccaccaacatcataaaccctaaaagaagcagttatctcttaacccaacttcattattttttcctttttaaatagcaaaattttccaatgaaaaaagaaaatcttgaccattcccttccatctaaaattgatcaatagatcaattcttcattctctaaataatgatcaaatttggtagagaaaacatttttatcacagtcgttgaataaagggtgtgatgtggtgcccacgtgagactcagtagactcgcaccaactcagctttgttgagccctcgtgcaccacaaagtggctgaaaatggttctaaccttacacgtgtcgagatatcaaggcgtgtagggtaaatatagtctacacccgcgagtaggtgttccctaccctcgttccttttctttcttaatctgtctgtttatataaatctcaaactaataaacagacgccgtcactttgagagagagagcttccgaagtttcgaccttcatttccagggttcaggcaggctcggctcagctcagctcagctccccctcaaagccgccgtcagtcaccgccgtattcgtatcaccatagccactattttcggtacaaggtaatgttgttgtggaagaggcacgctttcccgtaagagagagagaatcagagtagtcttatttattcttcttcttcttctgatcaatcaacggaattagctgccgagtaaagtatttttcagatcagagttttacgtagacctaggtttccggcgagtcaactaccgagcttgataaatatggcttcggaggatgttaaacagagtgaatctgcggtttcgacgatcgtcaatctggctgaggaggccaagctttcgagagctcgtgagagtgtggtaaacgcccccaagcacaaccttgcgcttctcagtatatgcaagtctcttgttgctggtggagttgctggaggagtgtgagtttttctttcgttcttccttttctcattttttttttttttggcttaattat

SEQ ID NO: 116565 - DNA, 1288 bp, Cannabis sativa
atgtttcgatgcaacaacaatatgctatttgtaacaagtagtgttgttgactgctagttttcagatacgcgatatccaccctagtcgctacggacacatttgtcctattgatacgttcaaaggaattaaagttggacttattggatcctttcttttgtgatgaactattggcaccagtcctacattaggacatttatttctattactatgaaattaataaatgaaatagttaatagtggggctactattatcctttttgtagtgacgaatcttgtatgtgttcctaagaaaagaaaaagaatttgtccatttttcaggctcgtgtgactgtttaccaaaaacacaggtcttcaaaaagtcataagaccatgtatggggcctttttcgtacccccacaaaaataacaatgaaagtaaaaattattatagttccaagattttacaatgtacaaaagtaaaaaattccttatattactaggcatcaatggcaatcagtacctccacaaccaaggggccgctctgagagcattggacatgagtagtgtcaaactttctaaatgtgatatgatcatactaggcctaggccttgggaggtttctcctttacttcaaacacatcaacacaaggattatgcatacctattgatggtgagagcttctcatttgacttagtggccaaaaaatataaggtaatctaagaaataagatgatgatgaagattaaaagatatataaatattagtggatgaatattttctctctattgcattaattgtttgagttacacaaacgattttccaaccatctctctcatctaagaatggggtatttataggttctaatagccttagatacacaatggttcctaatacacaacccgtcacttttgagctgcaaattgcgagagtaggaggtggtcttgcgccatgtacctttgtatggtgtcaggtggtccctagttgcagaaaaagttgttgcagagtacctattgtcgtgatgtgaggggctataggcaatgcatctccactacttgtacctcctcactttaagagcttacagagagcgtggttgtacacttttctcttactcacctcgtcctttgatcccccctccaaaaaacatctcatcaatatacattcaaatctcaccttacacttataagccaaaaaaacacactcacacatccacaccgatgcacgactcgcatgcgagccccaaacacacacacccatgcatgcaacatacacatgcacacacacacacacacacccacacacacacacacacacac

SEQ ID NO: 116566 - DNA, 1976 bp, Cannabis sativa
gcgttccaaacgagcccgaaaagtattataaaagccttgttatgctattagactggttaaggtgtcacctccacaaatgatgatgacttaatggtttgttagcgctatttctgtgttattattaaagactatttaatatttttgcaccgtggatgtggatttttgatcaatgatatgtattgtcatgttatttaaaaatattttttttttattgaaagtttactacataaaaagaaaaagttaaaataacaccagccagcactattgtaggaaataatagctgtatttgtgttgtaagaaaaaataactgtagtagaactgttaaaaaaagttgagttgagtgtttagtaaattataaattttaaagtactgtgagttattaagatatattgtaatgataataataatgttataatctagtttattataattaaaaatatgtgtaaaagtttattttatgtaacattttattttttatatatttttaatttttttcaaatataaatttatatgtatttaatatttttaattacaaattttttaatcacgaatgatagtttttattgctcataattttcattatgactaaaaataaatttttttgttgtagatgtgtgtatatttttgttttagcttttggtattaatatttctatcttacagaaaaaaaataacagaaaatttttggtaattgttaatggtttttctttttaaagtttctagtatattcttgtaaaataaaatttatataaaatttataatgaaaatgtatattcaagtatatttaaattaattaaaaattaataataatagttagtcaaagtctaattaattgaatccagtagagaggtttggtttaaacaagcagaaagtatgacagaattaatttattatgctttacatagccacatgcatttttcacatagagaaaggctagggtgcaacagtgttggaattaacttagttatttatcaccatacaaaaataataaaagaaattttagagcactcacaacaacaagtaagttataatagctaaaaaatataaatttaaaaattatcaacaattcatttttgattaaatgtgctaaaatagctaaaaaatttagctaagtacgatttaatctctaaatgtatctacacactatttgttattcaaatttattttattttagtattatttttattatttcttcttttctctttctttctctcacttatttttcatttaaataatttaataatatctaaatatataggaaaatttaataaaatatgtgtacattaagaaaaaaataacaacctcaacaaaagttaaatcactatttgcaatgtagatttatatttcatatcccaaaattatgcctcttatatcaaaaacttcacccattctctctttcttttataacataaattttaagcacctattggaccactatcagaccatattgtgcattttatcaatcatcgtaccaccattaaacaactatagaaccttcatccctaactcgcaggttacactactaccgtacttaccattgcatcatatcggaccataaacaaaaaaaaaatcataaaaaatgcagatttcaccaaaactcgattttttaccaaacgataaacaaaaaatactaaaaaaccacagattgtttgtttgtatgttccagtggtggtcgttggtcttgggttgtcgaacacgcactagggagaaccagaaagaaagggagggtcgtgggtcgtcggccgcacaccagagagagggaggatcgtgtgtagtggtgcggtggtgcaattggtgaattttggggtggtttgtggtggtcggttggaagagaaggaaacagatcacaaagcgatgggaaaatagagtatagaaagaggatttttttttgggaaatttttatatatatacattatatacattaatattacaaaaacaacgttatataaaaacaatccattcatataccgtgacacg

SEQ ID NO: 116567 - DNA, 1501 bp, Cannabis sativa
gaaggctacaatgttaaaatgttcatatccaataatgtaggaggtcaaaatccaataatgttaaagctctctctttccatgtgttttaattattatatctatttataatgtaagacattaaaggatcaccatttaatttcacaacttgtcatagcagaaaaaagtacctgaattaactgtctcccttgcaaaactctctctttaccatccaaataaaaaaacctctctattctattcttctctctttcccatctctcttctctctttctgactcttcctcgcagcgtggagtcgctatggggaagtggtctacatcgccgccagacattgaaaagggtcatcatcatcatcatcataataagtcccggccaccgccaccaccgccacaattctgtccaccaacacctaagccatggttcccttggctcgtacctctcatacttttggccaacattgccatgtttgtgtacagcatgtacctaaacgattgtccttcaacaattgatggtgctctagaccaatgtattctctatcattatttgaagaggttttctttccaaccctttaaagaaaatcctctcattggccctacaaccacaacgtaagaatttttcacctcttcattttcatcttttgttttcttttttgaggaaaaaaccaaatggggttttctaaattttggcaggctgaaacaattaggggctctggatagaaaccttgttgtggaacatcaccaagtatggcgcttgttatcttgtatgtggcttcatgctggtgttgtccatttactcaccaacatgttaagccttatctttatcggaatccgccttgagcaggagtttggatttcgtaagaactcgaaaccatttctggattttgtctgtctgcaaagtttttattctttgtcatgaaatactttcttaatgttttgaatttggttggtggcagtgagaattggaatcttgtatgtactttctggttttggaggaagtttattgtctagtcttaatcttgatccatctgaaagaccaaccatatcagttggtgcatctggtgctctgtttggattgttgggagccatgttatctgaacttctcactaactggacaatttatgcaaacaaggcaaatttctaattctaagcatgttactccaataatttcaatactgtctaaaaccctgtaccatatttctcaaaaccaacctttgttgattcaaaggaagatacacacaacaatgggagacttatcttaatccatacttaattgaactcccttcattactctctagctggttgaatagaagagaagaaactaatgtattagagaccataaccccttttacttgtataatttctacaccaaccatttgagtccaaattaagattgcatttagttaaaaggaatgaaaatataagaatataaaatggtagaaaaatcattatattgaaatgacattataatactttaaaatacaaccatacaaatgaataaaataaaaa

SEQ ID NO: 116568 - DNA, 794 bp, Cannabis sativa
  modified_base (101)..(106): a, c, t, g, unknown or other
ttgtaactaatatttttagccacggacattttagtcacaacataagaatcataatttataattagtcacagttttttcacttttagtcacaagttttattnnnnnnaaaagtaaaattttttgtagtgctgacttggaatgtattcaaaattcaaatatcacttaccacaataataacaataattgaccaaaattactgaaaaattagagcagcaagcaggctcctaattagtgagcaaaataagttggcgaaacaattacgacaaaccacataaggacaaggcctaaaaaaagatgaagttaacctaagttattttcttataagtactcctatctatatattcagccacatttccaaacttcttatgtgaagattccaaaaaaagaccgaatcccccaccacaggaaaatctaaggacacacattggtcaacggaaaaaacaataaaatattgctacaaatgttggattttcttaagaaatttatgatgatgtagcgatatatgatagaaatatctcgaaaaattgtatttgggtataagatgaatgaggttatatcttaaaatcaattagcaatgggaggagtagctcattcctcttatatgttctattatttttctacatattagcaatgtgagactctctaacatcccccctcaagatggtggctatgttatatgctcatcgtcttggacaactcgatcataatcgactcttttttggctcactattcctgatcacaagtggctcttttgctctactttttggatcggtatttttggatttttggtggct

SEQ ID NO: 116569 - DNA, 1228 bp, Cannabis sativa
ttaggctgctcagcctactcaacctagcggactctccctcttgccatgagttgaggatcagttgggggagcctggtggtatgtctgcttagtcctcgcaatggtttaatgttgcttagagtactgaccaacactcatagcagtctctgctgtaggaagatctctaaacatagaatatgcttgtccaacaggcaatgtgtagggcacgccctgccagacgatgtaagtccaacacttgggaaggcactacctcaacccttggttcagttcctaaatgaatcttctataaatttcaccacctattcgctcaaaatagtggtgatgttggatctcatgtttcggtgaaccattactcacgttgaaatcactcaaagagctgcatgatgagctctgagaggaggagccaattgggcaatattctttgtacaaaagactatgtaaatcctcatcgatccgcttgtcacctccctaatagtcgcctgaaaaatcggagatcataaaatagacatggataaaaacacaggctaacagcccaaaaattaagggtattaaccagacagcctgaaaatagtctatcattaaccgggcaaccttaatttgagaggccaagaattggccagcttaaaattggttccacaagaaccgaccagcctaaaattggttctatgagaatcggatagagtttctatagggatctaaacgaccaggcagggtctctaaaagacccaaagtaccaggcagggtccctaatcgaatctaacagccctatttaaacatttgaaactcaattatttgtgttctttgaaccctaaagttcaaaatgtttaaacaaagtgcatgattcaatctttttcatcaaaaagtcatgcattctacatcctaaagatattgcatggattataatgtataaagactactctaaagcatgagaatcaaaaatttcaaaagcttgaaactcaacaatggcagaacttaaaaacctaaacaaagaaaagagaagtttttggactcacccactatgaagacttcacaaaagtagcatgaatcagctcgacaagggtgattctccgtaaacaaggatcaaatttctcaaagaattcatgggtcacaggggcttcatgtttggaaagctttgttgggattttatgccctaaataaaacccatttcaatgtaatctgatttgttatcaatagaagattagaagttatttatgtttacatgtagtttt

SEQ ID NO: 116570 - DNA, 2128 bp, Cannabis sativa
  modified_base (1849)..(1859): a, c, t, g, unknown or other
tcaatttcttgtagtggtttcaattacatccaattacataattaaataaatataatcacataattaattatatatcaaacaaacatattaaattatataattaagttgcattcaaatctaattcttaattatacttgagaaagttaagagagtcaattgctccttccagtgctcatcaatgcccaaatcataccccccatcgtaaatatgatgttccctcaagtaacagaaatatactttgataaattataatgttatttatattattttaaaaatatctatatatattaaatgaagaaagtaataatatattgttcaatgatgatcatgcttaattgcagccaatacctatcacacgagattattagactaggtctgttgttattgttaccctcaaatctcaatccataccaaattaattgaaacaaatagtaaatattataaaaataaaaataaaaaagttccttaccaaatgtgttttctttttattatattattattaaataccaatataatgagaaatttattttaattacaattcaaattttccagttattatgggaaaaatgatttgtatatggttgatgaatgatgagtagcttgagctgaattagtaatgacccttagccttattatattaaataataatatttctctttaatatttcttacaagagacgccaaataacacttcttgaattgtacaataaaaaatatctataaaagaggatttcatgtgccatattcaaaaccaatttcaaagaaaccaatcctatagccctacaattacttaaaggcaattttgttgaatcttggagtgagttggaagctgtacttctagttctaattagttataaccattaatagaaatttataaatatatatataatatatctttctttaaaaaggaaaggaaaaaaaattatctttttgactaaacctaaaaattcatcatgaaagttataatagcttgttattatcattattttttatacaatagatgatataatagtttgttattcattacaaagaatagtggtttattcttttaaggctaaaatcactttaacataaccaagcaaaaaagagttacactcctttagatgaatgtggacataattatatatataatatatacttaattaagttttatattctatcttgacatatactatacaactaatgcaaaattaataataaaaatagaaaggtgaagatttgtgtgagagtaaatcaactagtgaaccatagagatgtgagaaagtttgggtgagacacatgctcatgaacatgcatttaattatttataaagaaatatccaaccctaagcaactagctgctttttatatttttttgatccttatattgaaatttctatttttctaataataataataataataagatacaacatttcctaattgttttgaagttttgggaggcaaaggaaagttccatttaattttatttatatattctatgtaagttagctgataaagaccttataccattcgagagaatagttagggtaccactaccacctcattcaatatattttttttattctttggtatttaatatttgtgaacacgtttaaatatttgtccaattgagctttttaggttgtgcatcatttttatggtatgtttattttaggagaataagaatcaattgtatagtatttaaaattaggctaattaggattgttgccccccgaattttgacatgtaccaagtcatgcctcctgaacttttctgatcgttaaaaatttttcctaaactattcagattgttgtatttaaagatttttgtctaattttagtaaagaaagtttaacatggatgaaagttnnnnnnnnnnnatttggtacatgtcaaagtacgaggggcgtgatttggtagatattaaagtctgaggagcatgatttagtacataaaataaacaatcactaaattagtaaaattgaatgaaattggataaaagtccttaaattcgataatctgagaatttttaatggtcatcaaagttcaggaagcatgatctggtacatgtcaaagtttaggggacaaaaattctaattagtcttaaaattatattttttttatgattaccaaattaattatttaaatt

SEQ ID NO: 116571 - DNA, 2590 bp, Cannabis sativa
  modified_base (2539)..(2543): a, c, t, g, unknown or other
tatgttgtattatttaatacataataaatagtctgtattagcttgtattataatatttacaaagaatttgagatcaacaccaatctctaactcggacccagaccccggacccggactcgggaccccgaaaccggactcgggaccccggacccggactcgggaccctagacccggactcgggaccccgaacccaaactccagacccgcacccgcacccagacccgcacccgagacccagacctggacccgaacccgaactcgggacccagacccggacccggacctcgacctggactcagaccccaaacctggacccgagacgtggactcgaacctggacccgatacctaggacccggacccgtagttggtgttaggatcgagtgtattataaaatatattataactttacacaatcaattaatacaagtcaataccaaacattgtattgtattaaataatactaatacaatacattacaacacaatctaacacaatacattacaatacggcgtaccaaacgagccccttaagttatattgaattcaatacttaattacactaacagcagtatgacaccgaggagggtgctaagcaccaataatattttttaataattctctataaaaaaactagtaattaattataagacgtcacctcatataaatatttagcactttaataccgcataacaaacaatcacaaaaattataaaattgttgtcaattgggtctattgtacaagtttttagggtgcgcaagacaagttggaaatgattttaatggcatgattggattaatatggtactaaaatgaagtaaagacacggtttaatgagtcatgttatatgttaattttttttttttctaattatgattgttcaaatcaaacttagacactatactttttaaaaaaataaataaataaataaagtatttttttgttttcattcttttaatttgtagattaagttttgcaatgaatcaagggtgcaaaaaagaaaggaccattatattctaaactaagaaggtcattcactaataaataataacacatggacattatttttaatttaaagaggaactattatataatttctcttaaactttttattttttttaataaagaagaagaatttcattaattaagacgcatacctcaactacccaaatggcataaaagtagtaatcccaacatgcaaataagacaagaatttgtgtatacattaacataataagatatatttaaaattgatacaccacaataccattaactagtttgtatttacattttttaactaaaaaaaaaaaacttcatctaacctgaggattttagttttagaattcgaaaaaatttcactgattaaatatgaaatttacagagaaaaatgaatatacactcgagctagctttatatactaatgcaagtaactaagactagtaactaaaatgttaccaatcactatcaacttctaagtaactcatacaactcacttagtcaactaactctctaactaactaatgtttttacattaaacttttaatacttcccctcaaaatgggttgtatatattctccagtctcatctttattgcgataaatccaacacgctagtatacatatcgtttttacaagtaatactcagataagtgaaattattttcacgataattatagctaaaattagttatcttcaaaaggtgaattaggtttatgccaattagaattgagaatagagagttaagtgttgatctagtagagttggattcaactaggtttgatatcatacttgggatgtattttctgtccaagtatgcagccaacattgactgcacacggaagatggtaacatttcagctagagggtgaggaactgtttgtgtttgtaggatacattcagggttgtcagatttcaattatttcagtattaaaagctagagatttgctgcacaatggatgtgtagaatttctagtagttgtgattgactccaacagacctaaaatatttgggcatgagaatgttagagttgtaagagagcttttgaaggtatttcccaaggagtttcaagattgtcgttgcagcgggaaattgacttggcacctagagtagagtctgtttctaaggcaccttattggatggctccgaatgaacttaagaagttaaaaatacaactttaagggatgcttgatctagggtttaccagacttagtgtgtcaccctgaggaactctaattttattcgtgaaaagaaagatggaaccctttagatgtgtattgactacggagagttgaacaagctgacaatcaagaataagtattctttgccttgaattgatgacttgttcgaccaccttcagagaaaagcaattttctctaagattgatttatgatcagattatcattagtggagaattcgagaggaagacattccaaagactgcatttcagaccaaatatggccattatgagttcttggtgatatcatttggtttgacaaatgcactcacggcctttatggaccttatcaatgttgggttttatgcccnnnnnaaaactccatttcaatgtaatctggattattcaatatcaataaagaa

SEQ ID NO: 116572 - DNA, 2341 bp, Cannabis sativa
ttttgtagttagtttcaagaatatataaataaataatcaagatctaacaaacaatcaatctccatcatcaaaaactttatccatcttggactgacttttttcacactcttttgatcatattttcatttatttaattttccctattattgacttgaaagccaaagtcaacatattcaccatccaccccacttagaatgttcctcatcatataaaatataaattatatggaaagtaattaattagtgaaatacattttttttattataaggttattttgtatttctggatagctttgataatttttaataaaaaatttacttttaatttcgataaaatttgggactaaaaatgaaaaaaaaatgactaattataaataataattcttatgttgcgactaaaaaatctttagctaaatgtattagttacaaaaattacaatttgttgtgattaaatttaattttaatgacaatatttattatgactaaaattaaattagtgacaacttatatataaatactatattattttagttacaaataactttttgttatgacttaaagtcacattaagttataaaaaatttgtgttgtaaataaaaaattatcactaaagataattttttttgtagtaattatttataaataataaaatttgattagctgtctaaatatttcgatcatctgataaaattggatcaatatctccaattttgaaaactagttattttttatttttttttttaaaaaaaaaagaacacttatgctttttcctacaacatataatattgtctcttaattatatattacatccataaatataatcaataatttttttttaaaaaaaaaatctttagggctttgtcttattattagtatccaattcctatagtgtgaaaaaataccctcttggtttagatccttcaatataagtcaaaaaaaccacttgacttgttctaacaaaaattgatgaaatgagagaagcttttaatatttcttctctcttcattattttattaatttgaattttatataatataatgaagtagaagagaccatatttcttttcaaaaaatacttatttttttaatggagtcattatgtatgtcatagttccaataagtagagtagttgactagagctcagtctatgaattatcatatttataaatatacataaatgatatattttagtaatttatttggtaattttttcttctttgatttgggtaatctcactagatagattctctaatattagaacatggtcttattagctacactagtcaagacaccactgattaaaagactgtctattttaattagaagaattcaaaaaaaccttgtcatgtttctttaattgtcaaattaattcataagagatgactaggtatgcacttgttttgtttttttgtttttgagtattgtttcaccatttgtggggttttttttttatgatatgatagaaataaatttgatcaagaattaaaaaagtaaatacccttgtgaagagccaagtactaaagcaagtaacatatacaaacatatataaggataaatagcagtataagtttaaaaaaatttaagtttataagtagtataatttgatgtttatatttagtggcataactaatcaatacttgtaaaactgtaatttttctctaatttggtcagtattattatcttaaatagagcacacataagacttagattttagattatttggtttaaataaaaacatgtagtatcagttactttcaaatgttctttttataaattcaaaatggagtctctgttgttgatgaacttttaggaaaattacagttttacaaatatttattacttatgccgttaaaataaatattgagtttataccgcttacaaacttaaaattttgggtatttagcctaatatgtataaaaatattacacataattatttgtattagttttttaaattatacagtcagtttatttaaataaatgtgattggttaaaaaagaagtgattatttcataaataccaaaaactaatgaagaatttacatttttatggatctacaatttttttttcaatggagtgttattttttcgttgctttgaaatcaaagtatttttatgttactttaaaaaaaaaaaaaaaagtgaaacacctataaaaaaaaatggaatccataataaaaaaaatttaatttttaagtgcattgtgtaaatttttgtgaaaaaaaatcatgtcacatagatttgacttaaggagagtgaatgggcctactagattcaagggccctcattttggtccaattttttttttttttttgaaattatttcacaaatacacaaaaacaaaa

SEQ ID NO: 116573 - DNA, 2956 bp, Cannabis sativa
gaggttacagagagaaagagcatcgtcgtcgtcttctaatgaatcttcatcattgtcggaatagtaataataataatcaaaatgaccatcattgaccagaacctctcgtagggttttatcgattttcatgtttatccgtttgtaaattataacttaaatatacgaccaaaatatatattagatgagtagtatatgttggagaatgagatagacagttcaagatatatatacatttatatctatgattgtgattgtgagattataatgagacaattttttctagaaacaagatggacaggttgttctgttggaaaaattaaatgtgttctggaagaaagtggttacgaaaaacgtatgtgagataatttttatttgactttatagttctaggcttggtgttcagtcaaattatgtctagaagcagacaaggtagcttctatgtgcatggaatgaaagtttatttaataaaaagaaaaaggaaataaaagtcacaaaaaaatactttataatccgtgtgtgccaagccatgtctgattaaaatattatcttctagaaacaaattttgagaaacagcatttaaagttgtccaacactaactaactctatatttggaagggaagaaaagtgagaaaaataagaaaggagataaaattgagttatttggtaagaaagaaaaatagagaggagaaaaataaagtttgggatgtactaaatttttttttgcctctaataatttggaaagtaaaactcagagatctccaacaaataagtaaaattatataagattgtaaaaactagtattttttatagtgacacattaggtccagttttatctagaattcgtgatgttatgtgtggagtttatatttttagtgataatctacatcagcaagatattttgggtgtgtatttaccaagctgtctactttgaatttctttatttagttgggtattgtagaaaaagaacagctagaatagcaagaaagaaaaacagagaaatgaaaaacaagccttacttaagagagtaggcaaaggcctttatttatatcacaagtctcttacaatcaagaaccaaggaatgactaaaacataaatagtactacaaccaaaataacaactaactaacccaacaaaataactaactgacaggtagtttatgtgacatcactattgagtttgtattacatccctcctcaaatgaaatggtgtgggagacatcttgagtttggctgtcaaatagttgaacctttcagttggggctttgttaaaccatctgcaatttgatcaaaggcagggacatatcgaatagataattccttggaaactatgagattccgaacaaagtgcagatctatttcgatatgcttagatctagcatgaaatacggggttagcagcaattattgcaacactttggttgtctacccataagataggacattgagtttgttgaatatgcagctcagacagtagagaaacaagtcactttatctcagcaagtgcattagcaagggccctgaactcactctctgagctagatcgtgccacaacatgttgtttcttggctaaccaagagacaagattccctccaaagaacatgacataacccctgtactttttctatcatcaatacatgatgcccaatctgcatcagaatacccttgtattgaaaatgaagtagcaggagtaagatggagaccatgtagaattgtacctttaaaatacctcatcagtcatttgcaagcatcccagtgtgtggtggtgggagcatgaatgaactggctaagtttgttaatgatgtaagcaacatcaggtctagctagtgagagtgagatactacaataatccaattgtacttttgtataatgttttatcttcaagggggtcaccatgagtaagaaacaattttgtgttggtacttgtggtgttcgggcttggtttagctccatccatttttaacttgacaagtaggtcaacgatgtattttgtttgggacaaatacattccaatagcatcatgaaatatctcaactcccaaaaagtagtgagaatttccaaggtcctttagggagaaagattgatttatgtcagagataaacatgttgatgaaggtgacatatgggcatgtgacaagaaaatcatccacatatacaagcagtatgattaattgcctgcatgatccataggtaaagagagaattaacagatttggatgaagagaatcccctttgaatgagagtgtctttgagagtttgtctatgaggttgtctcgttaaaaacaacaagtaaagttagaccaacaatgaagatttgaaattgatactacagatgaaacacaatgaatgttcaatataaattcatacacatatttagaaattattaagcatttagcaagtaacaaagacaagtgaaaatacaaaacaaacacatcttaaatcatttctaaggtttttcaactacatgatatatagtgtcccggtaggtgagagtcaaagacatcattagttgaagaggtcttagctcatctaaaatggagaccattttaacaacctttatttgatcaaaataagaatccaacattgtcccggtaggtgagagtcaaggttattcttattttatgagcttcttccattgttttatacttgtaaatttatttctaagtagtcaccatagaggagagtctaataaaaaagaaaacttacaaaatacttatctttcgagatctttacggtgttaaatgttcagtgtaagaccattcataagggggcgaagtctagcgtctcgaggtctcattgaaatattaatcatgtaagaccaacaatggagattaaataccataaaatttaaagctcattattttaaaaggttgtatttcaatttgatgtatattcattcaattaaaattactaatttagataactctaaataaaaaatttaatttaatatttataaaattata

SEQ ID NO: 116574 - DNA, 1913 bp, Cannabis sativa
tgagaaaaaatttgaccaaaaatttatttcggatgctaaaacagataggagtgcatcaatatacctattttaagggggtgcattgtaaaattttcctatattttttaagcgatgaacaacagaggaaagttcaaaattacatttctcaggcaattaattttatgattctttaccttacccaaaaaaaaaaaacaatagataataaaatattgcgattcatctattaagaaaaaaaaaaggctacccttcttggtgtagcttctataatttttgtttttagattataagacacgttaaaaatttaatttgtcatatttttttaagaataatttgcgatataaatataatttaagtattattatgattaaaaattaaatttaaatatttatttacaacataaaattaaatttatatatttatgttgtaaattattattttttaattaataaataagctgaattaaattaatataattgacactgactgctcatcaaattaattaatataaaagccagcaagactgtgagaggggaaaaatgctgtttatgtaataataataattttggaattattattttattgtaatcatttatttatttgttggtgcaaattctgtcataaataaggtgacgcgtgtagagcacgcatgagaaagagagtttggttggtttgagcgtaaaagaattggcgccagagaggcagacatccaatttcacctgtaacgtaagtataaggcacagagctacaaaatccggtgggtcccactctctaatacctttcactgttctgtttccactttttaatgatttaccgcacgtgcctacctctattatgtacttaataatttaattacaatttcatttaccttatttttattcttatttttatataaagttttgggtaaatttgagtataagttcccaaaattctatatttgtaaaggataaatttaatatttatttttagtggtataagtacttaatatttataaaattgtaatttttctttaattttgttagtacaggctctgttttgaatttattaaaagaacatttagaaataactgatactacatatttttatctagaccccatgattaagaatttaagtcttatatgtgtcctgtttaagataataacatagtctgtactgacaaaattagaatgattttaaagcatcatgttaccgtttcattctttaatttttatgtttcaactatttgtatcactatttaatttgataaggaaagaatattcaatgagaaagaacagataaataaaattaagaaaaataaatagtaaattgaattattaaaaatattatttatattagtttaggaatcttttacatttagtttttcaaatttttttacaatattaataataattattatatattttcttttttaaaatttgatattaataatttttttcacatgataataattagatatgtcttttttaaaaaaaaattgatattaacaaaaaaaaattcacgtaatcatattttttttaatttttagattaattaatatttaattacttaaaaatgcaaaaaatgagaaaaataataaggtagaataaagttatttaatttattaaaataatagtaaaatatcaatttgtagatttatgctctaataaaatattaaaaatatgaaaattaaggagagaatagaaaaataattttataataattttagagcgtcatgtcaccgcctcattcttctcctttatatatataggtgcactcttaatggtaatacccattaataagtatttcatattccatatatatatatagattctctcaattttaatattttttttaattattttaatatacaaattgatattttactattattttaataattttttatataaaaaaaaagcataaatctacaaattaat

SEQ ID NO: 116575 - DNA, 735 bp, Cannabis sativa
gtttttatattttcttatatacaactgacatttgtaaaaacacggtttttcaagatattttattttattatttttttagagaacttattagatatttagttaaaaggtgttgttaaaactttttaattactaattaatatttgcttgtaaaatgtttaatatttttttagaagagtttttttttgctaaagtattttcagagaagagtttatgtagatatatgatgttccaaaaacaagaaatcagaaaacgtagttgatgtttgaaaagaaaataaatagtaacagcatttaacattatgttttgtagggtttgcacccattattattctaaattgtacatggtacgaattttttatgaaacttttttttctttttcattttttttttcattacgatttaccgacccatcgtcgtctcaaatacaaattggtagatttggtggtgaagatagtgaagttttgagagaagccatgatgttgtgaaagaagtgagcaagtgtaaaactgggtattaatcaagttttacaaaaagcccatgtataagaaaaggctcatttgtgctttctttttgggaaatttacatagattactaacttttcccaatttattacatttatactgtcaggcgacttttttatcttttttattgtgtatgttttttttttttttttatacggcatgtacagattttttggaacaaaggttttttattttttttacttacccatatcttt

SEQ ID NO: 116576 - DNA, 3877 bp, Cannabis sativa
ttgcaactcagattaataaaactcaaggggagtaggctattaccgacatccggggccgaacctctttaaattctggtgtcttttatttacatttaatgcgaattccggtattattaactgtatttattattgtgattttggtttaaatctcatttattacgactccgcgttgattggctaaaaatccagtcaacactaaggtaagtgagatcgttcccacaaaaactgtagctaagtaccaatcaattaaattcttgtttctattgtgtaatcaaaaaatggattgtgaaactaaataatctaagcaagaattatataacaaaataacaaacaagatttaatcaagaaataaaatataggaaaattaatttcaattgtttctacttcctatttcaataatgcaaacctatgttcttcttctatatagtatgatagcagattataaaataatctatattctgattaggaaatatagattctaaattatatgatactatcttacatttttgaggtataacacacataatcagcattaagtaataacccaaaagctacacaagctatgcaaatactcttgttttgtatcaaaatttatgtttatttaattagagtattttcaaccccactttttagattttatatagaaattataaatcatgcataagatggacaatgaaacacatgtaataagcataaatatgaataaatcacacattaatagaagagagaaatcaaaatagaattaatccatagaaagtacaaacaatctccatgaaaattcctaaattggagtagctcttaatctctattaacatgttcataatcaaatccatagaaatcataataaaattagaaaattaaaaaagaagagaggaagctagatttgaggttgtcactatgctccaatcttcatcattcctagcctccaaatattttttgagctttttagaggtgaaaaactgatgaaaattgcacttgaatttgtttatatagtaattctagcaattctatgtgaaaagacacatttttcccttttaaaattaaaaattttgtgtcgtgcagacaatagcgccgcaatgcttgacaccatcagaaaacattaatcgtctctgttgtggcgcgccatgacgccatatccagcgtcgcaccgctaattcttccacgacggtagctccgcaaatctagtttcacacacatactggttgacacgcttttggctccaacttagcactaactctcacttttcacttctattgtccaaaatgagtacataaacctaaaatgaaaaaaaaaaacataattctactcccaaaacgcatacacaagaagaaaataaagattcaaacgcttaaaaagtagactaaaactagtctaacacattaaccatctcagtgggtgagacatcacgtcctttaacacgatctctataataaaagaaataaatattacaaaatacacacatctatctatatattttattaaaagaaatattttacaaaatacttaattttgaattaagaatattatattgtggtaaaattttaatattaataattttaacaaaaaacataacgattaagagaatattattttgagattaatctatcatttataatttttgtataatctattcataaattatataaagtaaaatacaaataagttgatgtgactaaaaatgagttagagagagtttgattgatttaaaatttgaaaacaagtttatgtttttgaaaacttaaaaggtgggagtccacataaaaatacttaattgatagagtgttatcaaaaactaaatctgaatattattagtttcagactaaaaaaataaaaacacaattttatgttttttatattttcaaatcattgaattcaaaaattattcaagtattctcttacttttttattttgagattctcaaccaatcataaatcaaattttttaaaactcaaaacactaaatcaaactacaactaatcacatttttagaaacaatttttaacataaaaaattcaaatttttgtttccaaaacctttttttgaaaacacaattttgaatcacaaaccaatcaaccccttagagacatatttttggtctatcagcagcaatctgaagcttatatcacacaaatcttaatttagtattaattcttatcatcagagtggagggtctctgtgaatgcagaataattataattttttttccttctaattaattttatcaatagggatatgaaaatttaatgattataaactctttacaaaagttttttgttgggtattcttaaaatgaattattgttcatatacttatttcgtttatagtgtattttatgctttttattgtttaattcaatttattatattaatgatattattaatattattattagtcatagtgttctataatattttaggcatatatttatttatatgattttttaattaataccaaaaaaaaaaacaatataaaaaaattataaaagttgaatatataacatcaaacaaagtacgacttagttaattagtatatatatatttatacattgaataatattatttttttctaagatgagattatagtattttactactatattatataactaagtattttattactcaatattattttaatacattagagcattaatgaaaatcagaaagaaggatcgaacaagaaattgaaaataaagcaaagtagaggcagaaagacaagcagttatttgtgtaataatctttgtgtatttttctcagtgaatatacagtgtaattggaccatgtatttatagtacaaataaaggaatatttctctaacgataaaatcttcccttgcacaatgattggctacaatagcaagggaattctaggataattctgacagctcataattggagaaatatcaagaatgcccgcacaccaagagagggttgtgatggtgaggaccatctttctatttttacatgcaccctcaaacttgacgtggttgatcgacgatgccgagttagtttttcagatatgagaattgttggatggacgtggcctttgtaaagatatcagcagtctgttccgaagtgggaatgtgtctgacttcgatgatgccttacttaacttgatcacgaatgtagtggacatcgacttcaatgtgttttgtttggctgtgaaaaattgggttagatgagagttgcttggcacctgtattatcgcaccagataacagcagggagtttatgttgaatgccaagttctttgaatagagaatggagttaggcaacttcagtagcagtttgtaagagggctctatattttgcatcaatggatgattttgcaactgccttttttttaacaccaatttatgagattgcctcccaaatgaacacaatagccggttgtcaattttatgtcatcgatagatccagcccaattggcatcactaaaacattcaacgcttagctctttcgattgtttgaacatgataccttggccaactgttcctttcagatatcttaggagacgttttcaaactttccagtggtgttgagtaggcttgtgcatgaattcacttggcttcttgactgtgaaggcgatatcaggacggctgagtgtaaagaccgcttagtttaatttacaaattagcagttaattaagatttaattatgataattatttatagatatttaaataaatatttatgttgatatatttgaattctgaatgcatttttatgtcatatagtgaaatttcataatttgtatattcggtgtccggcaacctggaacgcggtgtatggctcagtagaatcacaatttagtattttagtatagcggggcgatttattagacattgggaatgtcgggattagtcaggaatttagaatttc

SEQ ID NO: 116577 - DNA, 3211 bp, Cannabis sativa
atatgagttttgcttttatcataggagtattttttatattttggtatattaagaaattataaactaagttgtttatttgatggtatacattatatgtagttatattaggtattctgtctgttttcgaaaaaatttaaattgaaaaataaaattcaaatattcagttgtatgtatgtctgttttattcttcatcacgtcatataaaaaattagtatattatttttaaattgctgataagaacaaaaatgatgcagttatctaaaatgcttccggtatattatataatatgtaaggttttataattagtttgtagatgcattataaatttttggatcacgttgtgttagtttttgtcaaaaatattgtatgaatattctctcttttcttataactttttataacaaagttttagttctcttttctcgcaaagttttaattcaactccttttctttgtccctttaattatattttatatttacaataaatattgatcgatttttatacaagtcaatcaacttttgtgttatagcttcaatatcaaaatgtcactgataattatattctcataattatcttaattaatctcattcgttttgtaactaatattattaattaattacttatgacaaataataatcaaacctacccaattaaaaaagaaaatgatcagaaatggatggacctggaatttaaaactattgtgtatagcaaatatatatattaatatttaaaatagctatttgatgaagagagaaaatgggctcatcataaaaagttatggagagcaatatgatatagaatgatttcatttggattattaaaggggaataaataataatgttcacaaccctagctacctccatcgccttataattatttttcagtgatgcttcctagggtttccttgatcatatgaatcacacacatatatgatatatataatatatttatacatatatttataatatattttctttggcccaaccctatgtcccattagtataatatgcatatcatacaaacgtgtggcctcatcaacacacattttttctttcaacacaaattaataaaaagaatatattattattattattattattagtattgaggatagggtgtagtcccgacatctcaccagtgacggagccagaaattcggttttatttttatttaaaaaaattatagaaattgaaatgaaatgaaaagaaagttaaaagactatgtgtttacatatgtactatatgtacttagtaaaaaaagatgcatgttgattattttttaaatgtggttttaaatttgagtggtataattcattatgctaaaccttcacaattgggtgtgatcaaattaagggaaggctttatatacaagtttctttattatatgtgtaattgaggagggtttaagcatacacaataacctaactgctgatcaccactctttcagtacacaaaaatatacaaataaaaaaaatacaaatacacaattgtatttttacggttttaaaaattttatttacagtaattacgatcttttgatgttttttgttatttttatgttgtgttcttattattttgttattgataaattatttttatattgttttaatgttattttttggatactttcatatggtttttttgttttcattttaatttaaaaaaaacaatgtatatatattttaatataaaagtataataaaattttaccaaaaataatatttttgtttaaatttctctatattaatgggcgtttaaatgacatataataattttggaaaatagtcttcttctaataactttttgtaaaatatcactccaaagacactataattaaaaagaaatacattgtgaattagtggcttgcattatgaaaggtgttgtatattttgtgacacaaattctaaaggcttagcccgaaaagcttttggtgcaacaataggcaaaataaaattgaaaagtttacaataatatacatattttgtatctaatttataataataacattattattatattgtatctaatttataataataatatattattttcaaaattaattaatttattaattaatattatatatattgagtttttgcaatacatatattaattgtgtaattaaccttaattaatacatattcatacaattaaaattgatatagtccctacttaagattattatatgactatacatatggcataatcaacatttttcataagtcaaaaatatatattatatatatatgccatgatgaacatttttcatcaggcaaaaataagagattaatcatatctcaattcattataacgatccccaataagaatagcatacacgacttgaatttttttttttaacaaaatcgaatgattaattatatcaaagaaaaataaatcaattttgcctatgattgtcatttatgatatatttattatagtaatcacatttagtactgcattaaatgttaagcatcccacacgttgtgattaattaagtagtccattattattatatatcaaacctctcataataattaatttacaatttgagtggaatcttactctcgtttgatgtcattagtgaagaaacagttacgtaattaatcaaggttaaaaataaaaattactacaatataaatatatatatgtgtgtctataattaaagaaaaaaacaaaaaaagttagtgtggtaattattttcagtacagttaatgatcgaaacattaatggtgggatcaacaaaaaaacgactacttgatggatcaagttggattatttcatgaaaagattaacaaaaagatcgatcagttagttaaatcttatgattatatatgtgtatatatatatgtgatgtttctcaaatagtatgatgatgtgttgtaaagctatacagtaattttaattttgatttacttgatgatgttatttctatttgttttttccaagccacctattaaaatttgttggattggttcattttaatttcttacatatacagtacttaaataaaagtaaacttcaaacttaacaagttttttgcatactttctcattaccctaaaaaacttgttaatctaatgatgttggagacctaagcatgtctagtcttttgacttgtcgttgtatgtattgtcgttgttgattgtttttctggtgtagtttgtttttggctggattagtctggtgttatctatggcttccagtagctatac

SEQ ID NO: 116578 - DNA, 2601 bp, Cannabis sativa
aatacaaatattagggtttttttttacgtacatttagaatttttcaatcttaattaataaaatacggagaattagagagatattttaaactaaaaacttaaaaaaatggaacatacctataaaaagggtatttctatatttaaatttcattcactaaatagagtactgaacagaatacacactcactaaacagagtatacatttactccaattttttcgtctactgcgatggtttcctcatcctaatttattttctcatcaatcaatctgttcgattgttcattattcttctccattgcataaatattcttcttcttcttaatgttctttttgcctgatgaaggaaaatcaagaaagatccatgtgatttgattgaaaaaattggtaagaaatattgaattatattgtaattttttcaagtaataatttcaattccttattatacatctattttaattgtgtaccattgagttaattaatctattatttggaagaaaaaaaatgacaagatagttaaattaatggttatattaagcagttgaaagtaacttagtaccttcaataaagttaagttgagttgagttaaaagtaacttggtaccttcaattttgaatatgaatatgagtgatagtgttgcattgtgattatattttttaatgaagaactcttatatttcaaaaaagtcacatggtagtccaatcttaggcttttattttatttctgaaagtgacgggtaccttcacttttgaatttggttgggagtgtttaggtgtaataaaaaaaccctcatatttcaaaaagtcacccggtagtccaattttaagtttttattttgcttctgaatatagcttggtacttgtaattgtgaataaagtagggtgtgttgaggtttgttgatgcgatttttcatcagcctaatctaagataataattatttatagaataaattcaagaaataaagacatgaaaaatattttaaatatgagaaatatttttttacgtagttttgtaattaaatctatatagtccacgagtcaatattatttttgaattttggttatgtttataatttgtcagagtttctataaatcagaattgtctccctattccctttgagtgaacccttcttcataggaatagaatggtaattacccaatcctatcctcatagcaagttacaagtgatgggtggttaataccctgtttcatgtataattatacattgaaataagtgtaagtaactgtttacatttcaaatgcaaagaagtggtctttgacttgctcagaccatgttgtttgtgagcaaatgcatagctgagtttgtaatacgaccaggtccaagatccttgtattacgaccagctacaagatcattgtattacgaccagccacaagatccttgtattacgatcaatcataaaatccttgtattacgatgtgttgaatgtttatcgaaataacttcctaacaatgttgaaatacctcatttcctaaatctcgtgatccttattttggtgtagttgcctcacaagttgagtcatgagtttattcaacctaaatgtcccacaatgtatttgttgtggaaattatttatgccatgtggcatataattcggcttgtttattaaatagtccaaaaaataggcataaccatttccccctaagttagtttttcatggtttgcacaaagctaaattattatacatagccttcacattaatatatgaattgacaaacatttaaagattctcatgtttatgcttgggcaaaatcgtttgagcaatgaagcttttatcttgtgtatcctacatgattgaaaacaaatgaaatttggggttttctcttctctaaccatttttgacaattttcaatttaatccgacttgttctctatttagattttgttgagttgaacttgaaataacatttatagattcaatcttgattctttatagattttcatgagaagattttgaacttagtcaaacttagtgtgacttgatctgtttcttttatgactagatgtatggtggagtatgtactataactaaatgcattaggagtatgtactatgaccaaatgcattaggagtatatactacaaccagttgcacgacggagtaggtactattaacagatgcattaagagtatatactacgactagatgcatggtagtgtaagtactacgaccagatgcactagagtatgtaatatgactagttgcatggcggagtaggtattatgaccagatgtattgggagtatatgctatgaccagatgtattgagagtatatattgcaactagatgcatggcggagtaggtactactacctgatgtattggaagtatgtactaccgactacgaccagatgcattaggagtatgtactatcaccagatggatgacagaggtactactaccaaatctattgggagtatgtattatgaccaattaaatggtaaagtgtgtactacgaccagatacatttgaagtatatactacgaccaaatctattaggagtatgtactacgtccagatgcatgaggagaaaggggctacaagtttcccgacgatgtgggtggcgatggtggtcagaggtgaatat

SEQ ID NO: 116579 - DNA, 1630 bp, Cannabis sativa
  modified_base (27)..(41): a, c, t, g, unknown or other
aggatgttaatgaaacatacatggtannnnnnnnnnnnnnnggtaaaatatttccaacaagttatggtttggagtcaggtgcgaggcctgtgagcaggggttgggttcctctgttgcggtgttctttctctttggtcactgatgctgttgttactccgggtcgaggttttgttggttgtggtggtgtgagcagggatgatgtgggggttgtttgggcagcctgggctattgggtgtgtgagtggttttatggttgaggttgcaaaactcttggctctttgagtggggctcctttcggcttttaatatgggtttttcggtgtctaagactgagaatgattctttgagtgtttgtaaatgggttagattccctagtagtactattgtacaaacctattgttgaggagattgttgattgtttctcttttagctattattgatggtggttcgtatcaggccatttcgagtgatgcaaatagtgtggcccatttattgacaaagtctgttacatatgcgttaggagttcgtatttaaactgatgtttgtcctaaatatattagtgctcctataaaagttgatttgattcattcataatatcaccttttcattaaaaaaagacactaagcacgagggtagttttttttgaaataccttctggaccaacatcattcatgaggcacattgctattaaaataataaagttgcaagatagattattttaatgatcaataataagaaattaaaagtaaaataaaataatcattaacatatggaatgtgcacaaaatagacaaatttatatatggatatatatatatatataaatatatatatgatagcgatgaacaagtgtattttagtgatttacacgtaaaataacttacatgaacaggtaaggctcccctcccccacaaaaaagaaaaagaaaaaacttagattcatgcactgaggttggaatatgtaccccaacaacaactattaatactttaattaaaaagtatttttttattatatataatcctttaattaattgggaaaggtgacattacatcttaaactttttctttttgaaagaattacatcttaaacttttgacaatgacatgtatcggaccgaatattcttaatttttttttaatttatttttgctaatttgggtgggaaaagtctaattaaatagtattaactaaaaaccaaaatcatttatataattgtgcgatctagtgtcaagaatatattataatatttaatgaccaaagaaatatatactaatacattaataattagagtcgtatctgactaattatgtcataataacatgtcagctacgaacgcactattaatctttgactcttcccaaaacccaatgtatttggagccgtctctattccaagttgtgtggatttaaattaaaacaatgtacacctagaaaactaaagataccacctacactaaaccacttgcataaaataacaaaaaaaaaaaaaaattgttagagtttacttttccattatatctttatatattaaaagtgtttatctaacgatatttcttggtttaatagaatattcttaaaagtaaaagaatattctgttaaatttaacgattaatttgatctcacattaacaaataaa

SEQ ID NO: 116580 - DNA, 1264 bp, Cannabis sativa
gaatctttctcaataaattatagatcacataacataaaactaagtatacgtgccttgcacgtaactttcttctagtatatatatatacatataaataaatatatatatatggggacttgaaacttggatagctcacacacattcaacttgaactacctacctacttgagtagcttcaagtagttatatttactaaatattgcagataaccgatttgagttcacaacctacccacagatattctctaagagaaaactcatgtaaatattcttttttgaatgaaccaattggatgagtgcataagagaaactaaaaaaaaatgtaaattattaaattaaaaataatttaaggaaataacaacacaattgtgtaatatttatgatgaaaataaatcaagataaagatgaatacacctaacataaatgtacacacttgaaggcccaaaattataaaaaatatatcagaacatgcacccaccttttcaaagaagataaattgggaaatttggattgtgaagatattgagcaattgttatgctctatttctctctgcttctccatattcagatattgctctattacaaatcattcccatacttggtcaacgtgagattcgaacaatataaccctttttggagccgacggcggtccactctgcggtggcctagcctgggcctaatccacaaatcgcctctttcacaatgtcaatcccacttgagagtgcatggttctgatatcacttgatatgaccgcttgggattccacattgatcaagtatgggattagttagtaatatataactatttgggcaccctcctccccgagctaacttttgggaatgagttctacctaagtggttatatcaaggtcacccattatctattcacaactcagctaatgaacttctagtcataaactatgttttggttcattggtgtctatgagtcagtgctagaagtgtggaatctatccttgaaatgtaggtggcagggagcccaaggtaagtgcctcaaattcaacagaatcaattttgtattttggaatatgttcattaataatgggcttggctatagtcaccgcggttctgctgatggcctgaaacatataatatagggaaaaaaaaagcaaaacaaataaaaggtctgtcaatacaccaaaacaagataatgttagactataatataatatatgaaataacatatatataagcgatatgtaatgcggaaataaactataaacatatcgtaaacatatgcaatgaaagat

SEQ ID NO: 116581 - DNA, 1973 bp, Cannabis sativa
  modified_base (1935)..(1938): a, c, t, g, unknown or other
ctttgaccatttgagtaatattgataggtaacccaacatttgaagcaatcccttgtacaagcttaaacaactcctcttctctaatgggttgaaatgtttgaaccctagctggactcaaaagctctttcatacaaatctttcttagttgtttccaatactcaccatatggagcaaatgcaaggttggtacaatcatatgctatgatcttgcagcaagagtttgaggcctagatgcaaaaacaacatcatgggttctcaagacctctttagcatactctggtgatgaaactataagagttggaatttgtccaattttgaggtacatgagtggtccatgttttttggctaagtctctaaatgtatgatggggtaataatgattttgagcctaataatgagattagttggtgtatgtttcccaccaaaggtaatctccatggccctggtggtagttttgaagttgagttgttggtttgggctcttttcaaaagtaaatttattactatcatgaacagaaaaactaaggagaagaggatttggaataaagaaggttgggtgatgatctccatgtagaaattaagtgatgatgatgagtagttaagggaatattatacatatatatatatatgctatatacactaataatttatgtatgaattcatcatgatactacatatatatatatattggaatgttgtgttgaagatgccttagccaagtttgattcattaattataagtttttgttttttgtttttggggacagttatgaatgtgtaaacatgtgtcatattattattatgtgtgtttgtaacgttggcacgtttgcatcatgacagagatttataattaataatggcagagaaatacatgctatatacatacaatacaatgtcttttaccctgcacgtatatttcttattacttttataacctcgaaccttaatttaatggaaggaaaatacatataaactctgccaaaacacaagtggcccaacacttacctcatgcatgctgaatttgtaacacgtacaacagatatgccagaggacacctgtgatgataatactaagcatatataattatacgtaagtctctccctccatgataaagaaaattttggaagaactgaaaacataaatgttttggatttttttttaactcattctgaatcagctcattggaagtttgtatgcaaaagatatacacatttttttgaaagaggtcgaagtagaaaaatgaattttggtcgcaacgagcctaatttttggtcacgactaacttttgtttgtgaccagaattagaattgtgatcgtgactaaggagcctgggcagaaccgatgtttttaactttttacagtcgtcgcgactagagtatctgtggtcgtgacgacgactctgcatgggttaaggagatttttgtcttttctcgatgttaaattgtaaaacttagttttaaaaggggggtttcgaatttttatgggggcattcaaaaaagaaccctacaaaatacaagaagaagaagcttggagcgagcatggtgatccgatcgagtttaccatctagtttctttcttttctctttaatttctatgttttatctgttttttagtataattatcgatttgaatgttgagattatgaactaatttttcaatttagggatatgaagaatgttggatgattttattccaaaagttaatgtgattttctatttctttcttgactgtgttatttattcatttttgtgcttattacatatatttgattggccaccttatgcaagatctatgatctcaatataaaatctaaaaaataagtattgagaatgctctaaataattaaacatagatttttatgtgaaacgagaatagtattcatgttacgaaaattatgatcactacgcaagtatacgcaatcaagtagtaaactcacacannnnaggtcgaaccacagggaattggactaattactact

SEQ ID NO: 116582 - DNA, 1577 bp, Cannabis sativa
cagtggactaagcagaccgagatctgactgaaccactatattccccttgtgtttattatttttccagtcttttgctaagtattgttgttcttgatttgactactcgtcattctgggtcgagtactcgcacttattatatatttactattattattactatctatttttggtgttgtaaaattccttcaacaacataattgattgcctctttagtgctagcatcacaaattcgtatgatagatttgttgctaagcaaaattatttatctactttatcactagatcatattatggcgtaatatattattggcaaaaagatgttatgtgctacttcatggcacttggttgatcacattgttttctcaattaatatgaaagtttaagagtattggatatgtgaccgcttaaatgtatctgagtatcgcgtcaatttctacaactacctcaggactagttggtttgataaagttgtgaagaaggcttgtaaacctttttctgttattctaccgtattatttgtctatgttagattttaaaactcttaggaatgaagtacggatttttacaatgaagccatttaaaattatttctatttttggattgcttgagcagggtacatcgtaagttttaagtttttatttgttttggttttttttattttttttttaaatttatattcatgtttgttcatttttatcatttgttagattttatgttattatttttatgtttcttcctagttgttttgcagtgactgtgaccttttctagcaccttttgcagagtactttacttataataagtctaatccttctcaggattttgatgttgaactgcaccatgattttttggccattttttttatcactatggtcggaagaagcaagtagaaaatgtcgatagggaattcgagtctccatcaaatgtctaacagaaagcatttgatgtttttttttttttaataatatgttgtttttaagttgttgctatgttgtttctgatgactgaaaacaatctttgcatgttgtcatttttatattttctaatgttttcagaatgttatgggtacttatttttataattttatgttaaatatctatgtaatgaatgatatctctctttaatatatgtaaaagtttttatgtttatatatgtttgagttgtttgactgttgttttataagatattttgttactttttttattattaaaataataaaaaaatatataaattgttcagatattattataaagatcattgacatcaacatttaataataatagaaaaataataaaacttgtacgcaaattcttttcatcagtatcatatgctcaaatgtgaacctaagtcttcatcaaccgttgttaagatacaatttgctattttggatcatattctttagttgtttgcagtttttgttgggttttgtaccctaaataaaatttatttcaatataatcaaaaatcgcactctatgctgcatagttcacatgatttacttcttgattatatttaatgtataattaagtccagaacatatatatatttgttcatgactatagtattatcagcacagtggaa

SEQ ID NO: 116583 - DNA, 1116 bp, Cannabis sativa
ttttttaatgttagattctgattttggtggccataatagtttgattgctacgtgacttggtatgtaaaaaggctcatgagttcaatcaatgtaatcatgaatttttgcattaataagttcatatggaaataaagttggattatccccacaatttaattaaattttcataattaatatcattggactctctctctctctctcttgatttgttttgggccacactaaagtccaaattaagttttattggtatatttaaaaagaaaaataaaaaacacttcttgtgtgaaaaccattatataaaaatggctgctctacattcaatttttatttatatttattaattaaaaagaaaattaccttttttaaaatatatatttatataaaaatagtaattaataatgatatattattcaaataatggtgactctgtcatacacaaataaataaattaattttcaaatgggtttttgcctcatactcattcaagcccatcaatattgactcaaagagattttagagagagatttcaaagcaaatactcatcactaataagactaaagagtcacctctttagattacatgttagtaaaaagctaagctacaagatctccttaatatgattttggttcccaataatgataataataaagagtatataacaaaaaattaattaaagaaatgtagaaaaaaagacttttttaacaaaaatataataaaaaaattatatatgtctaaaaaaaaattgtcacacccaccatatatatctttattagaaactttgtttcattacataagacttacctcatatgagattgagtgacactataatataattttggggagattttctataaaagcaaagtaatttttctttttttttttcattcattagtgtgataaagatatcattatactttgtccttttgtgttaattacttttctcatttctttatttgtttatttttggaaatagaaaatgactacttatcatttagtattatcaattatacttagctaattcaaacacaagctaagttgactttggttcaatgaatacaagaaatagagaattgccaccaagtattggtagatttgtgtccaattaataattttttt

SEQ ID NO: 116584 - DNA, 2082 bp, Cannabis sativa
ttgtgttttaaaaacttcaaaaactattttttattcttatttctaaaaataattttttgaaaactaaaaacagaaaacaatatcaaacatgacttatgttttaattaacaaatctttggtctttcctcattttcaattacaacgtgcaagcaaatttttaggatagagtttcaacataaagatataaaaattaggaattatttaaaaacaatgaaaaaaattataaaaatatgcaaattttaaacatttatgtaattttatgattttatttataaaaaataccgtattttgatatatgtatatatatatatttagattgtactagtcaaataaataaccttattaaaatgtttgacataatgttttttttacagtggggtgaaaaaagttacaccaatgatgtagcatatgctgtattgaagtctcttaattttgaaattctttctttccatcagttcaaaggcatagaaaggccaaaggtacacaggagaaaaaatatttttatatctaactaggcctttgagtacgaagtgataatgatgttgattttatgttgtatgtaacctctattctaaccatcattaacttttaaggattttatttctatacaaacgataacaaatccttacaatcatggtgatgacaatattgccgatgatgatgatgatgatgatgatgttgatgttgaagatttgtcatcaattgtgagttggtagcttcctatagtaaagttgtattcttttgttcttttaaaatcgttgtcaattcattattgaaaattttccaaactattaattgagcagagtgtacatacaccaataaactagtgttagagtaattgcttaattagtaaactctacctaagaagtactgtcatggaatagatattaattataaacactagcactagtagtgttatgcaaacattagttacatttttatatgctatttagctaagaagtgtgtgccttgaatgatttgattttgcaagctaaaaaagagaaacggaaggagaaaagcaaagaacgatctaagaaggatgattcaactgataattatagtgttacactatgaaatagtgtaggggtttattagtaatttgcaaagggtgtgaatcactataaatatgtaattgtataactattatgggatgtggaatgagtaaatagaactttggttcaattggagtttggcactgactcaaagagtgcattttatgatattagtcctatctcgaagaggactattatctaacatatggccataaaaagaaaaaaaaaaacaaagacatgaaccaccggaagcagcagcatctaagtgctacagatgatgagatcaaagatgattctaagaaatacaaaaaatcaagaaaagtacagtatttatttatatgctaaattaattacaatgtctgtttgtttgttaatcgtaaaggcttctttatttctttcttattatatttattattaaatttctttgatgtttatttattgacaacatgcacattcaccccaaataaacagtgatcatagtcggcataaaaagcatagaaaatatacaacatatgcatagaaatggtggtggtggacacaatgaatgttatatatacttggagctaaccttcatatgcgttgatattaggtacattttatagctaatgcatgacaagtttattttattttatttgtttaagcaagggagaggaagaaaatgagagtactgcatgtaattttagtggattttccaatttaaatttttgaaatcctcttcaggtgaaatggaagtgatttttcacctcactaaccatacatttgatgctatgatgatcaactaactctctggagtttggaatggtagcaattaagtaaagttggattgttttttgtgcattcaattgtaaatatatacacattttatattattcctgcaagttgtgaggtccaaaagctcagtctaatactgtgggtgctcttagggcccgtttggtacgcaggactggattggattagacaggctaatttgtccaatcccgtgtttgggcatgttagaagtctgcataactaatccagttaacctcatctg

SEQ ID NO: 116585 - DNA, 2900 bp, Cannabis sativa
  modified_base (2062)..(2070): a, c, t, g, unknown or other
gtgtttgtttaatttctgcactttagtatagtttctttccattcttacaggctagtagtgaacatccattggcaaaggcaatagtggcatatgctcgtcattttcatttctttgatgattctacaacggatgattatcaaagccataaccgagactctgcaatctctggttggctttatgatgccacagagttttgtgctcttccgggaagaggtgttcaatgctttatcaatggaaaattgattttggtgagtgatttgactagtattctgctgctttctgctgagcttgaattctcatacataaactttgtgcttctttggggatttttattggtgacttttggttgaacaggtgggtaaccgaaagctgatgactgaaagtggaatccttatccctgaagatgtggaaaaatttgttatagatctagaagaaagtgcgaaaacaggcatacttgttgcatatgatagtaatttaattggtgttttgggggttgctgacccactgaaaagggaagctgctgttgtagttgaaggcctgatcagaatgggcgttcggccaatcatggttactggggacaactggaggacagcacaggctgttgctaaggaggtttgtgtccatatttcttactaatgaaacccactttcgaattttaattatcatactaaattattaggtctaccaccggcagtgaagctattctagatacagtcttattatcaagtatagtaataatgaaaatgatgtggacatagcttttctgtcagtgagcactctcccataactatttatgtctctcatgtagacttattctttactacttaaaaatgattcctggcaggttggaattcacgatgtgaaagcagaagtaatgccagcaggaaaagcagatgttgtccgttcatttcagaaagatggaagcacagttgccatggttggtgatggaatcaatgattctccagctctagctgcagccgacattggcatggcaatcggagcagggacagatattgccatagaagcagctgattatgtgttgatgaggaacaacttggaagatgtcatcacagctattgacctctcgaggaagacatttgctcggatcagattgaattatgtttttgccatggcttacaatgtgatagcaatccctattgctgcaggagttttctttccttcactgggaattcagttgccaccatgggcagctggggcatgcatggctctctcttctgtaagtgttgtttgttcttctctgttacttaggagatataaaaagccaaggcttacatctatactagaaataactgtagaatagtaagtatcaagaaaaagggttaggtttctgctttatgtttaggaaaaacactgaaattggataaagtgaggagtcaatgaagtttggcatcccaattttgtgtattatttttcttttttcaacttttctctttcgtctcacaaagtgtaactttactactcccagtcactgtaaatgctacttgtataataaaattctcaggtttctatccttgttcccttgttactttttaaatatgtacttctgaaactatagtaatcctagtgatggtctcttgaaacaactggatgatttgggaattttatgatatcttcaaattaaaatttgtttattttattttacctttctcaacttggttttctctttgatacatgtaaatataaacagtgttatttagtgttttaattactatttataaatatagttttttcaagtacattaatggaccttgcatattcttttccaaagaaaagatttgaagaaccatttctcataggtgataccaatttggaacactggcatacgtaccttattctagaaacaacgatctcgtatctctttctgtaaatgggccgggttggctttctgtaaatgggccgggttggatctgatccgactataatttgccctgatttagattatgtaaggatctgccccgtcctgtcccgctagttcagatactcgaatcagacccgacttgttttgtattagtattaattaatacaatactatgtttggtannnnnnnnnattaatagattgtgtaaagataatatatttttaataaactcgatcccaacaccaactacagatttggtctaggttggggcccaggtctaagacctgggttcgggtttggatctcgggtcctaagtctaggtccgagtcccaggtccaggtttgtcccaggtttaggtctgggtacgggtcccgcattcaggttcgggttcgcgttcgagtccttggtccgagtccggtttcgggtctcgggtccaattccgagtctcaggtccgggttcgaacttggtcttacgtcctgagtttgggttcgggttcggctcgggtcctgaattcgtgtcaggtcctgagtttgggtctgggtacgggtttcgagtcttgggtctgagtttaggtacgggtctcgagtttgggtcctggtataggtctggctacgagtttgagtccaagttcaggtttgggtctgggtccgggtcccgagtttgggtctctggttctaatcctgagtccgggtcccgggtcaagatttgggtcctgggtttgggctcaggtcctaggtacaagtctcgagatcatatccatgtcggaagtgttaaaattgttgatcatgtaagatacaacaaatacattatactctggaggaagactattaagtatgaattgaacccactgttcctttgataattcaattccaagtagatgtgctttttggaacatcagattcattatcaataagtgcgaatttatgcaactaccagggtgcattttcacactatagagttcatttgataagacattgactaggagtgggtcggggtgtgggttattcatattggcactac

SEQ ID NO: 116586 - DNA, 667 bp, Cannabis sativa
actttgtaagtaaaaatgtagacataggcgtgtatgagtaattgtgtaataaattatgtaaaatggatttttcatgtaaaaatttcaatatattatatatgaacaaccagcattttgtttaaaacaaaactcatctatgattttactataattagaatgagcatatccatttgtatatatgtacaagtaattatagtagggtctagagaacttatttatatataaataacccaattattattatttataatataggtatacttggtattttatttgttttttcaaattaattaataattttacaatactaaaaataaaattttaaatagttaattacatataaaaaaacaaatatgcatgttaattaaatgttgaactttgtttacaacatagtatatcattctaaatcttccaaaaataggcattgcgatattaggcaccatagtgctccttaccacagttacaccaattagcaattttttataataaatattaatgtaaaataagtaaaactccaatattaaattgtatcagtagcaatataatatctcataagtatactgatactagcactacaaaattttttacttttagccacaacaaaatttgtgactaaaagtaaaaaagttgtgactagaaggtccgtgactaaaagtattagttacaa

SEQ ID NO: 116587 - DNA, 2288 bp, Cannabis sativa
gtttttatattttcttatatacaactgacatttataaaaacacggttcttcacatgtttttatggttcccctattgaggctttaagaacccacacttggaaaattttgcatcggattggtgacaataaccccattaatccttggctcattatgggggatttcaatgccatccttactgtggatgataaaattggtggtaacccagacaggggaccatctgacagttttaaacaattcattgatcaatttaatttgtcacactttgatcctattggtccaaaccttacttggaataatcacaatgcaaatgagagaaatatccaaaagcagttagattggtgcattgctaatgtacctttgatgaatatttttctgacggcttgccttcatcaccaaggtttttttggttctgaccatcgggcccttcttttttactcttaaggaatatcttcccaaccctcacaccgtagttccaaaaggtttctcttcaaaaatgtctagctcactaatcataattggtcccgaattctgacttcattttggacaaaccaaggtgctaatccttttgccatctccaatgttgtggctatgcaatctgcttgtggcaaccgcctcaacgattagaaccacaagtcaggctttcaattcaaacaaagaattagtactcttgaaaaggagcttgaccatgttaagaacagagataattaggataacaacaatgtccaaagaataaaaaccctccaatcccatctggatagacttctctttaaagaagaaacctattggaagcaaagagctagaatccaatggctttcccaatgcgatagaaataccaaatttttccactatcatgcctcgtttagaaagaaatcgaatagcattcacaaacttgctagggacaatgggaccactgctacttccttagaggacatatctaaggaaatgtagagttatttcttgaatctattcacttctaccgcccctacgatggatgatatcgaccgtgttttggaaggcattgtggcttctctaacgaaagacgacatacaaatgctctaggaagcctacactgttgatgaagttgagaaggctttcttccaacttcctttggataaagccccaggcattgatggttttaacaccaatttctaccgaaataattggtcgtttgtcaaacaagatgcggtggctgccattcttcaggtgattaatgaagcgggtgatatcacccttcttaatcaaacccttgtcaccctcattcccaaggtcaaacaccccacccttgtcaaagatttttgactcattagcctctgcaatgtcacttataaaatcttgtcaaaaataatcgttaataggtttaaattggttctcaataactgatatccaccaatcaaagtgcttttctccaaggccatctcatatctgataatatcatgatggctcaggaaatcactcactccataaaacttaaatcttggggaaaagctagttggatggccttaaagttggatatggcaaaagcatttgacaaagttgaatggagcttcataagggccatcatggataaattcaagttccccacaatcttcaccaagctagttctcaattgtctcacctctttcacctttcactttaatattaacggacaaacggtgggaattgtcatcctctagaggaatccgacagggcgatcctctctcgccatatatcttattactttcctctaaaggcttattctctctccttggtcaccctgatagagttcagatcgaccttgcatggatacagagttgccaggaatactcctacaatttcgcaccttttccttgcagacaatagtatcatttttgccaaagctaccaatattacttcttgcaatgccatctaagatggtgagttggaaacaatttggtgggatccaaatatctattttggattaattcccttagtcaacctgggcacaggactagagacccttcctaggttgactgttatgactctccgagatattttctttcttgctacgcatcaaatattaatgtttatgtcactagagtcaatatctaagtaaataaaaattaaatatatatgaaatatataactaaatttgtaataaattaatatgttatcatgcttccatataacaagtgattaaaataataaataaaagtatttaaataatataattatttatgttaaataataagttaaactaataattattaatacaaacactattattgtaaaaattttgatataaattttctaataatttaaagaaaatatac

SEQ ID NO: 116588 - DNA, 1786 bp, Cannabis sativa
tagttttctttcaaatagactcatcatagacaatattttaatggcttttgagttgattcatcatctaaaacataaaactcctggagttagaatccattcaacactaaaattagatatgagaaaagcatttatcagagtggaatgtgaatatattcatgaggtaatgcgcaagatggggtttcatagcagatggataacattgattcaaaattgcttatcttctaccagtttctcctttatgctcaatggtaaaacaatgggccatgttcaaccaaagaggggtctttgacacggcaatccattatctccttatttgtttttgatttgttctgaatgattatgtagggtgctacaatttaaggaatcaatgggaaatctcaaaggtttatgcttaacatgtcttgctctgtttcacacttactattcgctaatgattgtctcttattctatgagactactaatcattcagctttggctattaagagagtattggagatctaccatatggcctcaagaaaattactgaatactcacaaatcagttatgtcattattcccaaatacaacacaagatgctcagaatttttttcaccaaactttgggaatgcctattagcgaatgtcatgaatgatatcttggtcttcctgcatattctcatcgagataagaaagaattattcaacgatgttaaggagtgtatatggcagaagttacatgcatggaatggaaaactcttctaaattgatggaaaggaggtactattgaaagttgttgttcaatcaattcctacatacgctatgagctactttcgtttaccgataaccttttgtcatcaattagaatctatgatggcaaattttttatgggaatctaataaagatggctctaagattctttgaaaaagatggaaactactttgtaagtctaaatttgatggagggatggattttcgctcttttgttcattcaaccaagcgcttctcgcaaagcaaacatggaggatttttgaaatgtcgaattctttgattagtcgattattgaagcactgttatttttccaatatttatttttggaagtcaattttgttcattctccatctcttacttaagaaggcattcattggggtcgagaattgtgttagaaaaaataaaagagaatatggagaagacaaataaacataacaacatatattattaattaataaaaagacggaaatataaatacaaatgataaaatgcaaaactagtaattgaaaggaaagtcaaggcacgtgaaacacactttccttaaagcagatttgtcccctctacttgaacggtactagaggatcaacgagcaaccacttcctaggatataatgactaacaagcagatatatacaccactttcactactccaacgaactcagattaaaaccttcactttatcaccttaaaacttacgaaaaagacaaagaaaaagaagacaatagagctttttagtgagtgactctttttgttggtgtgtttagaatgaaaggtgaagcctccttttataggcttcatatagggtggaaaactaagtgtgaacactagggaattaatgccgaaaattctaaaaaattagtgatatgatcaatcacaatcttcaccataatttctgatatcaataacaatatttatcattattttggtaattacatccttgaccaaatctgcatttattagcagctatcaatggatcatatttaaggcatcaatttctcattcacacattagcctaaaatgattatttattatatattaaatata

SEQ ID NO: 116589 - DNA, 1134 bp, Cannabis sativa
  modified_base (31)..(42): a, c, t, g, unknown or other
attacaggttaaagaaaaatgtaaccatatnnnnnnnnnnnnaatgtaaccattgaatagtcacatccatatatatatatatatatatattttttttaattttagttaacatgcttatttgcattaattttgcattaaatgacttgtattgccattgcattaattaaattttatatttatctttacattattattattttatatttttataataaattattaagtgagcattaaatgacatattgaattttgcattaagatttacaaatatatattgaagcataatattaaaagttgatgtaaaaatatcacaaaactactttttgtgccaaatatatctcaacttttatatttctccttaaagataatcttagtttaattatttagatcatctccactaattatactacgagtagttaaagtttatgacttagtttaattattcaaatcatttccagtgataacattaatttggtgtagaatcaacactaatttgttgtagatttttttaattttagtgaaacaatttcaataattcacacaaaatatttcatcaaataaatatattttacttaaaaaatttcatattttatattatttacattaataactcaaaatagcaaatttatattataattttatcattactattagtaagaatttaaattttaaaataatatatttaaataaaatatttattaaatcaattaaacataaaatatataaattctatagttatcctaatatacacgaccattttttttttaaaaatgagcaaacaagttctatgtaaaaaaagcttaccaatatcaagcattttaagaatattacgattctcaatgtaattcaagttcatccatatagtcaatatgttgatattcttcaaagttaagatccttaaatatcaatttgactatagaattattattttacttaatatttatttttatttgtgggttatttcagttttataatttagtgttatgttatttaattttatttaaaatttagtgcttttgttattgatactctgtagttttaaatatgttaatattttaaattaattattattttttattataaattttaatttaataactaaaatataaaattatttcttaaaataaaataaaa

SEQ ID NO: 116590 - DNA, 3210 bp, Cannabis sativa
aaaatcacgtaatacgcttatgttagttagggtgttacaatatgggcctttcttttctggcactggcacaaatgtcattaacacactcgtgggatgctttcaccacagctgcatataccattaatcgacatccaaccccagttttgcaattcataaatcctttttgaggtaccatttcatcaaaaacatgattacaattttcctaagacttttggttcctcttgttatcccttactcaagccataccagaaccataaactggccttttgaacagctcattgcctgtttcttggttacagtcccagccataaagggtacagctgtatgcatctctcaggcagaatttacatagctcgagctgtcaaattcaatgagaataatttcccctaccacaccctatttcccaaaccagcaatcgtcccacctatttcacctttaacccaaacaagtatcttccttattccttcaccaccatcaactgtcctccctccacagactacacacccacttgctccaccacatcattcacctcctaattctccaccaccactacaacaacaaccaatagccccaaccacaaccattcccacctcaccagcatctcttatttcccctaccttaaatcaccctcctcctgtcagtaccacttctcaaccacatgttgaccatgaaccagaactaacactacatcatgttgacagaatccaaactcaaccttccattgtttcttaaccttctcaaccagtcaacagacatcccatggttacaagcgccaaagctggtattcataagcctaaagctctcacaacctcctctaatatcaacattgaacccaagacacttaaagcagctcttcaagacccattttggtttagtgcaatgcaaagtgaaatcactgcacttgtcaaaaataaaacatggagtcttgttcccttttaacctggtatgacagttcttaataataaatgggttcatcgaatcaaatacaaccctgacaacactgtggacatgtacaaatccaggcttcttgccaaaggatttcaacaaacccttggccttgactactttgagacatttagtctagtcatcaagccatgcacaatcaggattattttctcccttgcaataacacatcactagccaattcaacatatagatatcaataatgcattcataaatggggacctacaagaatgtgtttatatggcctaaccaactggtttttaaaatactacttatcctaatcatgtttgcaagttacacaaaagccatttatggcttaaaataggcccctcgggcctggtttgataagctcaaacactcgcttatgcaatggggatttcacaactcgaaggctggcacttcattatttttttctgagaaagaaatgcaaacttactctactattgatatatgttgataatatataactaacaggtgaagattccacctttattcatcatctgatttcccaactacatcaacaatttgcactgaaaaaccttggcccaatacgatattttttgggatttgaagtcactagaaaccactctggtatctatcttacacaagccaaatatactttagatattttggctcgcactaacatgtatgcaacagcttcaacacctactcctatgtgcccaaacacataactttcagtcaacatgggcactcctatggaaaaccccactctttataagagtgtaattcgagcccttcaatatctgacattaactaggccaaatatttcttttgctgttaacaagctctctcaatttctcaagagccccaccaatgaacattggcttgcttgcaaaaggcttcttcggtatctagcatgcacaattgattatggccttcacttcaaaccagctgatgcactccaactaactgtctatacagatgccaattgggcaagttcaattgatgatagacgttctccctcaggttattgtgtctatctaggtggcaatctcataatgtggagctctagaaaaaagattgttgtggctcgtttaagtacagagtctgaatatcgtgcaattgcccttgccactactgaacttatatgggttcaatccttatttagtgagcttgattttcagctttcctcctgccccattctctgatgtgacaaccttggagcaacatctctagcttcaaataccgtttttcatcaaagaacaaagcatattgaggtggatcttcactttgtcagggacaaagtgcttgatcacacccttgttctattctaataattgtgggtcacaacttattggctacacaaatgcaggatatttatctgatccatataaatccatatctcaaactggctatttgttcacttgcggtaacactgttatatccttgcggtcaacaaagaaaactttggtggctacttcctcaaatcatgctgagatacttgcaattcacgaggcaagtcgagaatgtgtttggttaagatcaatgacacaatatatcgaggaacatgtggattcatctaataaagaagtatcaacaattctctttgaagataatgctgcttgcactgctcaacttaaatgagggtacattaaaggagatagaactaaacatatttcaccaaaaattttctttacacacaatcttcaagaaaatggtgatatcgatgttcaacaaattcgatcaagtgataatcttgtagacttattcacaaagtcattaccaacatcaacttttgagatgatggttcacaagattgtaatgtgtcgattaaatgatctccatgaatgctaaaatgagggggtaatttcatactgcactcttttttccttgaccgagttttgtcccactggattttctcgacgaagtttttaatgaggcagttattatggacatccaagggagagtgttataaatattaataattatatggatgtctaaattttttatttattaccattaattgtaatcaatattcctcttttcttagttttcatttttcttagtttcttaatatttgactcttatatatatataaataggagatcacccattggaataaaacactaagaaaattctcatatattctctattttatttttctaagttataatattttataattattgcccctaatttttcccaatatacgtggaccaaccaaacaaggacacgtggatcaagcaatgtacaatccaaaatatttgctaagtctttgtgctgtaa

SEQ ID NO: 116591 - DNA, 1455 bp, Cannabis sativa
  modified_base (1387)..(1387): a, c, t, g, unknown or other
taaaattataatttggaccagtaatacttcaacacgtggcattttaaaaattaataaacggacagttatcttagggaccaacggactcacaaaaaatgtgaccttgaggattattactgccaattattgaggttgagcactaatctgcatcaactctaagtttttggggacttttgccgcaattatccctaataataattaactgttacgtaattaacttagaaaattcatggcgtgacatgcgactatcctcgccactatttcggcttcctcacacatccgacagggtggcgctctgatcaatggctttagtttgttcttgaacaaacgagactccattttcttaggtctgaccatcaccactccaaaagcccaatggaaatatcttcgccgacgtagaatcccacgggaaaactgggaattggtaaaataatggctttaaaatttggatattagatgtctcatgtttgaagcttcgaattcgttgtagcctgaaatattaagtatcatagcctgatgaaaagtaatctctcaagacatggttgaacaattcctaaaatcaatattacttaaacagtaataacttaaaggaacatttgtaaaaatgtaataaacaaaaatctaacccaatataagaaaaaaaaaacaataaaataaaaataaaaagtaaaaaatatagtgaaaactgatggatgattatgatttgattcatggcattcatacagacgccgaatctataagaacatttgctgatattcatccatagtgacaggagcgattgttcagccgttgaatgtatagaggctatacaccaagactcttttctttcatcttcttcttcaccaccactggtacctcaactgaggcagacgaattaaacaaatcaaaggcatcactgacagacgacttcatgatttttcttaactccgatgggtaccgaggacatggtgacatgtattaagctagttaggcatattggttaagtttgttctgaattttaggctttaagtattgtaatcatactactaatagtaccataactcataatcttactactaataaatttttggaaatcaataaatttttgtaaaacaacaagattattatatatatatatataataaatcaaaatttggtgtatgaaaccaccacatttgagtcacattccaaacgcaaaatggcgacaatcccactttcaccgtcaacaactctgcaacctgctagaggcactaaaagcctataacgccgcaccagaccactgctatcacgaatcaccccctcctaaccccacaaaatcagaccctggcatcacaactgcactagtgaacaaagaaaactgcctcgacgctagtggccactgttaaaaataatgagcatcaaacaaaangaaagattaacattaacaattatgctcaatctaaaacaatacaatatcatcttatttaaggcatcaaa

SEQ ID NO: 116592 - DNA, 1806 bp, Cannabis sativa
cacaaatccaattacattgtggctttccaaacgcacccttagagatctttgtaagagctttcgagaaagatcaagacattcttgttcatcttctcacaaatcaatataaccaaaagagagtaagctattaccatcaataagaggtcgaacctctataaatatggtattttctttactttatattatttatgttctactatttaattattctcaattgctttaatttgactcactatcgttggctaaaagcgaagtcaacaaacactatagctgactatttaaaaccttcgactatagtgagcattattgtcgatgattttaaaatcgataatagtttttgccgactcttagtaatagtcataactattctacccagttttgcgacagtcaaataagtgacaattatatagaccaatgacgatacattaccccgactattaaaaacagtcggggttcatcctaaccttagaatcatttaccaatggtcgaccaactgtagatcttccctctacaaaaggaaacatcacacaagattaaaaaataataacataataaaaattcaagatcacattaagagtttagtcacccagtctaatactaaataaaatttcatattttaatattatactaatttattatttaactaatcaattaattaaataggaaataataaatatggtattcaaacagatattctatagctacagaacacgattctgtcactgcagaagaaaaaatcagcaatgaataaaagtgtaagaaaataaaaacacacaagatttttataagtagaattaacaattcttgtagattgttactagtccatgagggtacacctacgagtaagattcattagtaagatctcaaaaatataattttttttaacttattcttaaatagattccatcttgttatatgccttaagcttgatctattctatcttcacaaatgaaccttactgaaactttaagtgtttgaactccttcgatctacttgaagagtgtttgctttctctcaaggcaagacttaaaatattttctctcgaaagcttaaaaaacctttttccgaaggtttgcactttatttcttcatctttgttgacttgattatagactcaaagcaataacaaagacatatacgtagagatagagtcaaactaactctcatctacaaaacaaggacactctttttacaaaatatgaataaaatacaaagatatgaaagagataaccaaccctagctactaacataagtatttacagacaatatactcatattatataactcatgcacggactaaacacacccgcaattcataggaaacttttctaaaatagatcttgaaccagctcaaaaaaattttattatgtacctacataattgtcaattataagtgcaagtttcctttacttttatttcgattttcttcaaataatatctcatcaaatcaattaaaaaatcaatatagaatcaaactaacatacgaaacacgactgaaaaagaataaaacttaaaatatttgatttctttattagaaacttaccatttatatcatactttcttaaattagaaaaattagacaccaaatatatcctaaagaatcaatcaaatatatatttatgtatatacatattgaaagataaatacaattcatttaagatatacataaatattataaaatattcactactccaaatattagaatttgcgacggtcctaaaaaataattttttttggggaccatcgctaaaaaaattaaaaaaattaagtaactatttaaaactattgagaaaaatttagtattccc

SEQ ID NO: 116593 - DNA, 2971 bp, Cannabis sativa
  modified_base (2943)..(2946): a, c, t, g, unknown or other
tagtaggtggggtcagcaaatggatcactaccagtagctgagagcttttgacctcctgtcataggtgtaggtaaggggttcgcactatccatttttgccttaacaagtaagtccatgatgtatttcttttgggacatatggagccttctttggtgtgagtaacttgtatgcccaaaaaatagttgacaagacccaaatctttcaaagcaaacttgttattgagattggaaatgagttctgttacaactgtggtggaactcccagtgaccaagatgtcatccccataaacaagaagaaaagtagaatgagaagttgtgtgtctgtaaaagagagaggtatcagctttggcacaacagaagccaaatgatacatgagcaattttgagtttgttgaaccaagtccttggtgcttgtctcagtccataaatggatttggtcaacttgcatacgaagtggggagcttatggattaatgaaaccaggaggttgtgtcataaacacctcttcttgtagcaccccatttaaaaatgcattattcacatccaattgtcttatggaccagttgtaagacaaagtagttgtgagtacaatcttgactgtagctgtcttcacaactggactattaagtctctatgaaatcaaagacatattgctgaaggaatccttttgctaccaacctggccttacattggttgacagtaccatttgatttttgcttctctttgtaaacccatttacagcctatagcctttctaccaggtggtagaggaacctttacccaagttttattttgagtgagggctttgatttcagtttgcatagctaccagccactttggatctttgagggcagcaataagagtgactggctcttttgatgtcaagtagacctttttcttagacaatcctgccttggcctttgttaccatagaatgttgatttataggagggtgaggtgcaggtgcagaactctctgcaggagttggggactcaggaacagttgcaggggaaccaacacttaaagtggtacttggagatgagtggaaagaatcagtggttggggaagtagtgggtgatatggaaggattttttgggaagagagtgacagaaatagtagcagatggagtagaatggggaacatggacatgggtactggtattaggaaacagggtactgtaaggaaattgatgttcattgaaaatggcatctgttgaaacatacacacggcctgttgaggaaagacatttgtatcctttatactttaggctatacccaagaaagacacattggacagacctaaattcaagcttgtgcttgttgtacggtcttgtgtttgggtaacaagtacacccaaaaacttttagttgattgtaattaggatctttgtggaacaagaccctatatggagtggagttttgtatgaatggggaagggagtctattaataatgaaggcagaggctatgacagcctcatcccaaaaagagaggggcatggatgactgagctaaaagggttaatgcagactctattaaatgtctgtgtttcctctcaacaacaccattctgttggtatgttgtaggacacgagactttatggttaatgccacaagtcaagagataaggttcaagtgcttggtattcaccaccccagtcggattggaaggctttgataggacaatcaaactatttttccactaaagttctgatgttaatgaatgttggtagggccttagatttgtttttaagcaaaaacacccatgtatatcgactatatgcatcaataaagtggacataatatctatagccttgtgataagagttttggggaaggaccccagagatcactatggattagttcaagtggcttagtgtaaacagtttgggagttagagaaaggaaacctatggattttgcctttgaaacatgcatcacaaaagtcattaacagttttattagaattaggaatgttacacaaggacattacatgtttgacaattctagcagatggatgggccaatctgttgagccatgaagagaaatttaacacctgatccttattacaagtgaccttttaagcatgattaacagaaaatgaaacactgggatggaaagaatggctcgagggactgtcttgaatatgcatctgagaggaaggaatgacatagagaccatttttaagatgtccttccatcaacacagccttggaatcctggtcctcgacaaaacaatggttaggatagaattcaaagaatgcattgttgtcagaagcaaactgggatacactaatcaaattcttaattatttttggtacatgaagtaaatggtttagaacaagagattgggatgagaaaggtgtagtaaatagtgtcttaccaacattttgaatttgcaagcttgcaccatctcccatatgaatctgatcttgtccaagatagggctctttgtgagtgaaattgttgtcattaggtgtacaatgactcgtggcacctgagtcagggtaccaagaaatgtccgcaacagtgtcagcagtggctatattagctgagaagtgttccacatttgctgctcccacacctggaaagtccatattgaatcattgatagtatcgagctgcagtgtggccaggcttggaacacagttggcaaattggtctcgatccagacgcaccacttgtagaggtgtgtggagtagattgaccagtaaagggaggaggagctccacgaccattagaagtcgaaccagggccattatttgttctaggtgggacagcataggggttcaatgaaccacgaccccttctaggagtggaggaaggaggaccaaaagtagatctgtcatctgcattagaaaaagagaaaccagatcctcagcctcaagaaggttggttaattgccaaattaacagaatttaaatctttatgatgattatcctgttggaaattattttannnngatctatttactatcatgtatgttg

SEQ ID NO: 116594 - DNA, 1816 bp, Cannabis sativa
aattcaataagtgcttgattagtaaatatgttgttttcaaggaagatgaaatggccatgataaccaaaagcacttccaaaaacaatgaagttgtatcaaatgagaatatccagattgaggtggaacaggttgctcctacaacaccaactaatgttgttcaaaatataactgaggtaacagaaggagaagacaatgaagatcagcaagaactcaacaactatcagttagctatagatagagagagaagacaagagcaatgaacctgattgttttggttatgctgaattcattgcatatgcatttatgattgcagaagaggttggcagttcaaaacccactatctttcaagaagctacgagaagtaaagatgctgaagcatggctgcaggccatccaagaagaaatgcaatctcttaggaagaatagaaactggattgttgtgaagaaaccatagttctacaagcgagtcctaaggtccaagttggggtagagtccaaaatattaattaagaaaaaaaattatttaaaattttttgaaagtaatttttttgttttcaaaatttttaaaatttcaattctcaattaaaaaattaaaaagtgaaaacagttttatcaaacatattttgaaaaatatttttaaattaaaaaagtatcaacaaaacaaacgcacttaaaataaataaaaaaatgacatatttatggtggtgttaatttagtgcaccatttaaatacaattttaataaataagttacattttaactttatattacttatttaataatatgttattttttccttaacaaacaacaaattatatacaaaaatgaaatgaggcaagccaattaagcaaaatgaataatcaaataataacaacaataatatatttagtatagattagatttagcagccgaaggtgataaattatagaccaatacagagaagaagacagtgacctttccccaactaaactaaactaaactaaacaactactcttactccttcttcaagcactacatacagactatagaaagagaaagtgagcagttatattcaagcccaagcaaagctaaaccaaccgactcttcatcactccaaccagaacttgtcggcaactcaaccgcagctgagagaaacccaaccacaagaatattattactggacaaaccaacacttatacctctctctcttctccctctgtcttttcccaaaaacccaagtagtagtactactactagttctactacaacaagaagaagaagataaagacttaagctttcttaagtcttttcatggtgagagcttgatcagaggcccaattggggaaaatcgtttctgggttattgagatttttttttgagagatttgtgttctggggtcagagatttgaagggtttgatttcaatgttggttcaagatagagtagggcctaagtctcccaaacagacccagatcaggagtttgcccactcatcaccatcccggtagattaaccgaacccaaaaacctagatttctcaacatgggtatctgagaatctctataaagtcgtgactgttttggttctgatcggtactgttgccgctctcttctttctccggaatgtcggtgataccgcggcgcttctctgcttcgagaatcaggttgaagctttggagaagatcgaattccccaaagtgaattggaattcgattactccaatcactgataagggttcaccttatgcgaattttcggacggagaggtggatcatcgtctccgtctctgattatgcctctgattcgcttagaaagctcgtgaagatcaagggatggcaggtcttg

SEQ ID NO: 116595 - DNA, 3670 bp, Cannabis sativa
  modified_base (2505)..(2506): a, c, t, g, unknown or other
taaattagtagaatcataatcccacttattatctaattaacccataatataaatataaaccctaattatttaccattagacttatcgggatattacattgatactcaatacgctctgtttgtgatcgaaaataaaatctgaagcttcaagctaatttttaaatgatctgttaacttccaggaaaaacattatgaatgaaagttctagatctctcttttagcttttcaaaacatcttgaatcgtcaaattttgagctatatcgaaacaccattagtcatcgtagcagaattttagaattgcaacaatttttttaaaaaaaaaaaaaaattgagcaagagctacgaccttcccttggaagtcacaacctttggagaaattgaaaaatctcatctctataaaaaatccaagagttgcgactctctatcaaaggtcgcaactcttggctatttttggtaactctattgattcgatctaaaaatgagtggaggctaagttttcatgatttattcgaattttctggacattgggggtaggggatcgagcatgactagaagcataggaaacaccattaaaggacttcagttagtgttctttctcattttcttcatcttttatgtttttaatttaatctttggatgtttaagatgattgttattggctaaatctcttttagggttgttatgtgattctcttaaacttctttcatggattaatgcagtagttattttttcttcatcttttattcaattccttacaatctattttatccttgtaattacttattggtcatttataattgttattcatgaatcaaattaaaatctaaaaagtgaaatttgatatgcaaattcaatttagagcaaaatatctaaattatttgcttaattttcagagttattatgtttaatgccttctttatggtctaacttgccataaaaatattggaagttatcatttagattgagtttgtaaatcttagccgcattataaactattttgcaacttgtattgaataagaagaagaggatttgagttcttgcattaggaagtaaaagagtaggtagtagatgatcataattgtcttaatttctttctcgttgttattttattacaatttcatttcaaatgcttttattttttttgtttgaaaattttgaatattgtttgatctaatagaaataaaatattgattgacttgtaattggtaactcagtccttgaggacgatacttggttttaccaattttattataaattgcgactatgtgcactcgcataacaaaaatttcgcaacacatgcaaaaggtgttgagtggtatactcaaaggcaaaacccaagcccttcactttcagtacaaaggccactgataggagcacatggtcccaaccgtatatgttggtagagaggactccacatcattcactaatagcaacccaaaatgtcaaggtggaagggggccattgcgagacaaggaccctttggttttttgagatgactcaagcctacccactgtaagaagatcagaatgaggaaacatcccataaccttatgaagaggcttcacctaaaggctctcgtgctagagggcaccttgcctatgaccccctcccaagagcaaagcaaatgtaaagccttatccttcagccttggtgggaagtcacatatggtgtcatacactacttcttgaaattgggtggaagtggttcaacttgaatctcccttgagaaaggggattcctcatcaaactcaccatcatccaagctagtctccctttgaggtggtagctatcttttgatgtaggtcttgcatctccgtttctagctccttcaacccaatttcaaggagtaacatatgacaccatatgatggtgtaattgatctgaagtaccatctcagagcttttgatgagctaatgaagatgaaaaaagagtcatgcaaggcaaggtgccaatgcttcacggtcacactgaaatgagctacatataagtggttcaaaaggctaagatcgggaacaatcatatcttgaaagcaatttttaggagaatacctccaacaacatcaagttgcatgtgattacgttatgcatgtcgcaagtatcaccaatgtgaagcaagggaacaagaaagcttgtgaagctacatccaacgcttcaacgccgaagttagcaaagtaaggaaggtatccaaagatgaactcaagatcggcgtacctgctggagtacaccctggaagttgactatgggggaacatgatgaaaaaaataattggatggcatagatgacttctacgaaagagcgaagaagtacattcgtgtggaggagggtaacagaggcttaagaacagatacacataagcatttttatatttaactaggtattagtaatatgcaatgcatgtttggttaaagttgcatattagagttgttattacctaattattaatttagataataataataaaaattaaatttaaaacaattcaatcatattttttaaatatataaaattnnatctagttttaaatttatttataagaaaatacatcaagttaaatttattaaacaataaactaaataaataaatttagatattttaaacaatataatttgttataaagtatgattaattaattaaattaatgtctaattcaaatttaaattgtgatttatgtaaaaaaaataattctttaattttattgatacttttagataatttagatatttaaaattatttttttttataaaaaataataattaattgattgatttaatggtgttagctttaacctataaattttaatggaaaaataataaaaaaaatcgttaaatcaacattttccgtttaatagccacatgtaatataagaaaagatatttaaagtttacttttgaacctttactaataaaacttgtatttagctccttcaaaataagcttttctttaaaatagagaagggaatggtcaaaaaatggcatacatcaagtgagctattttacattttcttttaaagtaatgaatagtatttatctacatgtagagaagagaagtactattcattattctaaacttatttcattattattttttgtttgttttatatatgtgtatgtgcataaattaatattatatatttaaaatgaataaatatatattttaaaatataatattttagtgatgtcgagaaaaatacagaaattgatatatgatgtaatgtaaaaatttaaggtaaaaataaaaaaaaaaagttttgataatatattttaaaggatgtgagcgctctataccttattgaagtcaacatttattgttactcttttttattataaactatatttaatactataagggctcgtttggtacgccatattgtattgtattgtaatgtattggtgtattgtattggattggattgtataattttaatacaatattatgtttggcattgaattgtattagtgttgtgttaaattatacaatgtttggctcacattgtattgtattaattaaaaattttgcaaaaattcaaaaaaaaaaaaaaattaaaaaaatcaaataaaaactgaaaaaaaaaattaataactagaaaaaaagaaattaaaaaatgttgaaatattgaaaaaaactaaaaaaaaaaaataaatcaactaaaaatattaacttttttttttaaaaaaa

SEQ ID NO: 116596 - DNA, 2556 bp, Cannabis sativa
  modified_base (2421)..(2427): a, c, t, g, unknown or other
  modified_base (2504)..(2504): a, c, t, g, unknown or other
tgtctaaaccattgaaacgacacatgcaactccgtaagataggagaagagtggatatggatcactttcaagtatgagaatgtccctaccttttgtttcatctatggactgttagaacactcggagagatactgtgagaagttattcgacactcctatgaatgaaattacgaaactgtattgtgaatggatgagagccccgcttcgacgtcgaacaaagcttcttggagctcaatggatgaggactgggtttaagggtggtggagctaattttgctggcggccaggcgacactggttggtggctccaatcaacattcagtgctcctaattttcaggacactaatgttatgtgcatggatcgtgagaagcaattaatgacatatatgggaattgattatggtattggtcaacttaaccattcattgtaacacgtggtgaatgagttggcaaataacaaccaatttctaaaaaaggtactctcaatgtggaatctaaaaaaaaggactaattatgacttgggccaaaatgaagctatgtgtgtagaaacagaattgggccttgagtcaaaatgaagctatgtgtgtaaaaaccgaattgggacttgacccaattttatttttctttgtgagatactatgtcaaaaataaaaagttgatataattaaaaatgttattggatttgagggcatgtttcagtaggatctcaaggacatagtggtggacttgcctttctttggaggaataaggatgaagttatgctgaatacattaagcccaaatcatatagatatcattatttctgtacccgaatggccagagttttgacttacaggattatacagttaaccaaatcgattcaaacaacatcttacttggaagcttattggtgaccttgttactacatctccattaccatggtgtctaattggagatatgaacaatgttctcaaccaaagtgacaaaatggggggaagaccctatcctaattggctcatagaaagtttccgaggagtattagatagttgcaaattgatagatatggagtagggaggctattcatttaaatgggaacgagggaaaggtacatataaatgggtagaggttctgcttgatagagcccttgtcactccaagctggctggataaatttcaaggcgcttagctcttatatcttgaggtttctacctcagatcactgcccaattcttcttgctccagttgtgcaacttgagcatccttcatgtcagagttttaagtttgagaacgcatggctccgagaaccaatgtgcagaaagttgatcgaggtgtttggctgctgaatcatgagtcgtcccttgatgcaaaaattaaaaaatgctctaaggtactggccgattggggaaaagacattactggaaattttcaatcgtggatttctcaatgtaaaaagagaattcgtctactaaagggtcgttgtgatgtcaattcggctcagaagtatcaagaggagaacgagaaacttttcgagatgctcactcaaaagaagatattttagagacagagatcaaagcaactatggttgaaggaaggggatcataactcaaaatactttcacgcaactgccaaaacaataaaacacacaaaccagatgaattctcttcgtaatgaatctggacaaatggttagttgggacaacgaactccaagaagtgatggttaattactttgagcaattacttacaccctcagatacaagatggaatcaggttgttgattgtattccaacaaccattacccccatacaaaactcataacttttggcaccaggacagcgaagtaaagaaagccttgttctaaatgcacccagataagtccttgggaccggttgagatgagtcctggtttctatcaaaatttttggagcattgtgggtcatgacatggttcaattggttaaagatttctttcagaatgggttctttcatggtcatttgcctgataccaatattgttctaatgccaaagaagaagcaagaatcaatgacagaccttcgtcccatttcactatggaactcttatagaaaattgtctccaaggtgctggccaatcgaataaagtcagttcttgatcaggtaatatctgaaactcagagcgcttttatccttggattgattactgataacattataattttctttgagataatgcattacatgaagagaaaaaatgcagggaagaatggttttatggcactaaaacttgatatgagttaggggtgttcatccaatccaatccgcactattttgctcatagtgcatctgatccgcacaatagcttaaatccaatccacaaaagtacggattggattgattattttggattggttactttttcatattaaattatttaatattttaaaaaaaattatcacataactagcaacaaaataannnnnnntattgttattttatgtctctaacaacgaattaaaataagtaaactaacaaatttaaagaaagaaaaaaaattgtatntataaagaaatgtttaattttgttttaaattgtatgtaaaaaaaaatatata

SEQ ID NO: 116597 - DNA, 2276 bp, Cannabis sativa
tcttttgttttaatttttaaaataaaccaaatgtaatttaatattttcattgattaataaaattagagtaaggtattttagtcattttgtaaaatactttgaccaaaatcaattttaaagactatagttttgtctctgacaaagtatgtagggtctaatttattttttattattattattttgctctatatatatgtatatatactcattgttcattctgaaatttagttttaatagacagaaccaaaataatataaactcatatgaaacctataaccaaagaaagaggattagttttataggtgtaggtcaaaagtagaagtgactcgaaacctttgaattaaatgtgaactctgtagaccctaataagtaactaattacctagatctatatgtaattatggcccccaataacaatatagtctcatgattgtcacaataaagatagcccaaagttggtaaaatattgagagtaatcatcatattgatgaagacaatcttcatatcctatccacaaatttgaagccatagccagtcggaaactcatcactcatgagtagttagtatgtatacacaaggacgaagctaagggaaggaccaggtgggcccacctcaacttttgaacttttatacaaaaatgtatatcctatatataagtgtgtataaataaattagtatagtctaaattttattgattaagttataacacaatatcatatatatatagtgtatataaatacaattatatcatttactttttaaaatttaaaattataggtatataccccacctaaaatagtgtttttatagatcttttatctaggcatctggaagaatttttcagtaatttttattcataaataatttgtacattatagttatttaaggttatacttgataaatttttaaaaaatttagaatagtttattgtgcagacataactgttttttttatacgtatggtaagcaattatttgaactttatttttgattgtgtaaactattcaaaattttatgaaaatttttaagtaatcttaaatagccacaacttatgcgactatgaaaaaaaaataaacgaaaaaactcttttaaataacaacaaatataaaaaatataccctttaacaaaatatactgcatatatttggaaattatatacatatatcctacaaaaatttattatattttaatagaaccatttgaatataaaattaatatatttgaataaaatttaatttttttgttaatttatgataaatattaatcatttgatcacttaaaataatgttttagcttctcccactacaaaaaatcttacttttagtcacaacaaaattattgactaaaagtaaaaaaaaaatgtgattaataaattataaattttcatttctatattgtgactaaaattaaattagtaacaactttatttaaatactatatactctagtcacaattaatttttttgttatgattaaaagtcacatttaccaaaaaagtcacatttaccaaaaaaaaaaattaccaaaaaaaaaaatatatatatatatatattgtgaatgaaagataatgtaactgtttttttgtcatatacatgattattattaattgatgattgtatcatatttctctttaaaaatgtctactgcatgcgcatgcatgacctttttttgatgcctcaactcttatcagttgtccgatattaattaaaaaaaaaaaaaacttgaatttcataacttgatgatcagaaaacgaaattttcaaaagagtgggacctctcctttggtagcttagatgagttagttcagaaatccagtgagcaatatgatgtgccgttgactatatataattatatatatatatatatatatctgtgatgtgagatgtatcgttaagtgtaagtggcatgcatatgcttgtggatgatcccgaagctgaaccctaaaaggagataattaatgtcataacattttcataaacaatcgagttattctgtaaatgatctaggagggttttacaaatgtatatttgtgattgtttttgtttttgatccgtttttcatttttttggattttataattacaaaattatgttattgatgtgtaaaataaataattcttaaagtaaatttcaaattattttacagcgttaccttaatgttaaagtgcatgcccaatataccattcggctgaccccaggtgagatcagtgacactactacaaaaattgcatgagaggtcggttaaaaaccgacctacaatcgttcataagtcggttgggaac

SEQ ID NO: 116598 - DNA, 2110 bp, Cannabis sativa
tcaaaggtctcagaaagtagggtcaggtagcgaaaaaactcttcgctgaaatctttacgccgccttgtaacgattgcgttaatgtctgttggactatcctgtatctccttaagaagttcaccgttcctctccatttcttcatcaatctgcaaagctcactcctgatcaaacacaaccagaaaagactctaaactcaaagtacctctgtatatgcagttctttgccctctctatgcattatcttacagaagtagacctaaaaaaagatcaaaacacctatacactcccaattcccagaaaaaatataaagagcactggtatctaaagtaacatgttccatattcctccgcaaaatcaaacagtgttcagaatgtaaatattaaatttctcttcactcagtcatttcagcaaacagatataatgcaggtacgaaaatcaaatgattagaacatgaatacatatacacttgtgccttaccttcttcagcttttgccccaatgaaatcaatttttgtttcatggttggatcactctcggcatctgcacgtcttctacaacgactatagaagctctctctatatttattccattcctccctaaacaccaaatactttctccattcttttgtcttaggcttctcatttagaaacacatcaatcatcttatcacaaaattcagtaatggtgtaaccctcagcaacttcaacctgtacttcttcttccacctctgcattggccattttgctagcttcaggccctgaaagaaactttcttcttagatttccatgaaaatgattattcttttaaaccacaaagtattaaaattttagacgttttggtttattacatgaaaaacccacctcaaattactcattttgcttaacattcgaaagttatagaaggttcaaaactcatccaaaatacacactatagaaaaaaaaaaaaaaaaaaaaaagctgtggtcttgttcatgttcatccataaaaactaagaaagaaaaacagaaaaaatcccaagaaccaaaattggccaaaaggaaaaactaagaccatgaaaatggaaattctcactcactgactgtggagctgaaaagggcagtgtgggttttaatgtgaagactttttgttttccctttgagcttagtggaaggtggaaaaagagaagcagaggacatggtggggattgtatgtgtggttggagagttattttccaccatgggagagaagaagaggttggtgagtagagagtatttggctatggagttggaaatatccattgccatgaaagtgctcatggtggtagtaggcagttcagagtgcaaaaagagtatagagaagaaaagcagcaaaaatgaggtctgagtccaatgaacggataaagtggagtcatagtcatactaattaaaacgacgattcaggggcttacaacgacatgtttcaattacatggggagatggattgagccatggaggggtgtttcgattttttttttgcctcaaagtttggaaagattttatttaattttaagagaaatactaaaggtgtcaattatccttttacgtattaatcttgttattagtctaattaagtatgatatagtttagaggagtactaagaacactctctatcacattctctttcgcactttctagttaatttaatgacaaatgttatctttttaataagtttaaattttacttaataactaatcataatattatccttttattacaattataccattcccactaatttactcagataatttttaacttattgtaaattaaatattttaaagaaagcaagtcataataaaaagaaataaataaatgagcacaatacacatatataagttttttattgttacatatcttttgttaattcctcttaattaataaaaaagagtcttttaaaaaaaaaattacaccttatgccacatctctcacatgagtatactatctatataaacatataattagtattgcaatatgtatataaattaaagttatattattgttgattatttttaatgcaatatataatatatctatatatatatatataacattaatgtgcacatatttacatataacttattttttatttttattttt

SEQ ID NO: 116599 - DNA, 1270 bp, Cannabis sativa
  modified_base (1200)..(1204): a, c, t, g, unknown or other
aaaatagtatttttgaaattaataaaaaatataaatgtttatttttgcttgtaatagtataaatgtttatttaaagtaatattaacccaaaatagaaaaaacccctaattaatataagcaaatccattatatatatccatacaaattaagtgaaacattttcttaagagcaacacagaaattagatagcagtttttcagatttttcttacaattttaaagtttcaattaattaatataaataattaaataaataaaaatatttagaatattattgagctctaattaactttaattcccgttaccaatattctaatatatattctaataatataataaatacattattaaacaagtaaaaaaatataaaatatccctttaattgttattgcttaatctatgatttttcatgtgaattctaaagttaaaacatattattaaaacaaaacaaaacaataaattataaataattcaggattgatcacatacttgctaattaatatagaagaacttatacttcattctctctaattgagttttcaataaattataattatctcgaggattccatttccattaagaattttaatttttttaattagttataattttgagtatttttattaaaaatttaccgaattggtccggccctcttaatttatattttttgcactttggccccctcaattataatttctacctccgtccctctagacgagcataacaaattagctttctaaagagtcaaacatataatacatcctaagagatatgcactgttaataaaaattagcataatttttagtatctaatgttactttcaccaaaaaaaaaagtattattttgtcactaaaaattagtatatttggatacgagagtttgttatcattaattaattacgtacttttaaactacatatttatttataataaattattatttttgtgactaatatttttaatcacgaattttttaataataatagcatgagaataatataatatattttaagtcataattttttttcatgtttgatcgtaattttaatatcaattgtaacatatttggattggctaataagaacatgcccttacactagtttttataagctttcgggaatggaagaagatctcactacaaaaaattgttatttttggtgataactttatagtcacaacataacataatttttttgtgactannnnngacttttaatcacaacaaaatgttacttgtgacgacatagtatttagatacaagttgtgactaatt

SEQ ID NO: 116600 - DNA, 1646 bp, Cannabis sativa
aaaaaaaaaaaactatatgtatttgtctagaactaataatatagaatctaagtcttatatatactttttaagataatatatatcaaactatatactgataaaactgtaaaaattataattttataaacttgaatacttatattagtaaaaaagattattaaatttttaatacttataattactctcaacttaatctaaagtctttaattatatattctcacctgatcactttattgtgttcacattcacacccttattaattaataaaaagaaaagtttacatctcttacaaaaaagaaaaaaaagaagtttatatcagttatcaaaatcaacataatacttccttctatatgaagatataaataattttatttatattatatatatatatataatatattatgattcgaataggtagtcaaattcataagaaatcttcacttggaggatttatcatgcttggcgtataggatttcacaggactaaacaaactattatatatatataaataataatgacatgtgtatttatatttatatgtatatatattaccactcacatttttactctatttttaaaatatatcatcaatttttttttattttttttattttacagtacatgtttacattacattaacttctttaaaatacaacactaaaaccttattttttttaaaaaaattatgatattttatttattttaaatatataatattaatatatatatacacaaatctttatacaaaaataattattaaaatctaaaataattaataaaatatatttagatcaatgaataaaacatgaacagtaaactttaaagaaaatttaaaattaaaaaagaatttaaagcataaattatgtagtgtatttttgatacggttctttaaattttttaaaaaaatttaattttagagaagatattgtgagtgttattgtttgtgtaaagcaaaattgctttttgtgtcttgcctgtctagcttgcattaattaataattaaggttggtcatctcatgttcacacaattagtttttgcctattttttggttggattaatggataagctttataccttacacgctttcatgcattgtccttatattgtaaagttacaaaaatcatatacaaagtttaggagtgaagcctattacaaacttaatttacatatatcataaaataataagtgtaatttgtgttataaatatttattgttgtaaataaatatttaagtttaatttttaattgtaataatacttaaattataattttaattttttcataagtatttaacggtcaagtgtcaagtttatttgtccaagccattaaatttaatcaacttaactttcctttaaagaagatatagttgtgatatgaatcatgtgcatgtattgactcttgttacattttattaattttatatactaaaataactacaactaacctcaatttttatgctgtgtaagtacatatagtaatttcaacttttgtgatttcattaaaaataaaaaattataaaattataaagtttgacatgtttgttaaatgaggaatgctaattacaacttcttagtcaaccttcatgtccgaaatcacatgtcgaaatatttttcttcatagcgggcctgtaaatttttcaaaaagtc

SEQ ID NO: 116601 - DNA, 2508 bp, Cannabis sativa
  modified_base (44)..(52): a, c, t, g, unknown or other
aaaacatacacaagtgaaagaaaaattacttctgttactttatnnnnnnnnnataatctggattacattgaaacagagttttatttagggcataaaacccaacagttgcaccatcctaattgaggttggggtaagattcccactgtgagaccgactttagccttgcttgggtgggatatcctcctttcttctttcatctctgggaaggtcttggaactggttggtcccaccatatgccctttcagacaatatttactcattgttaagatgattgggaggcgatcttgtttgagaaatagttaggcccactaggcgcaaagtttacccacagtccctggggcgttgagtctcctctaagacatggggaccttttccccgaagtgggtcatttatgagtggcgattcttccattctggaccacctcttttgttgaacctcctaatcaggtcattcacctccctattgtagtggtttaattctacttgatgggctcggaggatcgcgacgtgctgatccatccattcctagaattcgcatctatgctgggcgaaaacattgccaacaacatcacgtgtttcttctttcttgcgatggaggatgtttttatgatcatggactagccttgtgacctctcttagcatggctagctcggaatcatctcctaagtcaacatagggctcgttgacactaggttggccaactccaagctcagtttttccagtgtatacttgaggctagttcttgttaaaggaacccctgtggtactttgggcaggttgtctagcattgaccgggatttacctggtatttattggatcttgcccgatattaactgggccttctggttagaacctcatagacgggtttgcccgaggtggttgggcagggttggcaggattgtcactagtgggtggagcacgaacattggggtccactatcatcaaatcttgggattcggtggacacgcttctccttgtcaagaccatggtaatcatcaggtcaaaagaggtgagatcttcgtaagaatattgaagctttcaatgaaagcaccaaaatattgactagaaaaattgccaattgactcagaatctaacaaacgtagagtaatcaccaataaagagttagaaataataaataaataaaaagaacacacaaaattatagaggttcgacccctttaaatttgggtaatgacctgctcccctttttgttgtattaattatgagataatactgtgcagatcactaaggaagacagagggaattccaactatggctctcaagatgtttacagagaatattcaacaaagtgctcttcgtgcgagattatgatttcaggtcctttctcctgtaaattcattcattatttataggggaatgttgttacaattggctccataaaaggagtgatcaaaaagtaaatattcctatattttaggaagcagatacgatctcttgaaactcctacaatctcgggtagattagtcaaattcgcatttgtaggacacagttagagatatttgtgaaagttgtttgagggagaaatcaaggcttgtgtagctttgtccgacattcctgacgttgtttctcctggtcaacatattggctacacaaccaggtccttttcgagacttgtctttcctgtgggattacttgtgaaatattcttgcaaggtgagtcaatcttccctcctctggctggcatgttaatgtcccagccaaatgcttcttggaaggcaatcttcagaccatggataccaacctcatatgggatctgccaggcatatttctgcttagaaatctcctgtcatattaagggtcggttaaattatgtcacgtgtaagtgtcacgtcagatatgcaaactttaggataacaatactgctaatttctagagaagtagcattaacgtaggaaggtgaagcagaaataagatgttgaaaatgagatagaaacctactctaaagcgtagaaacataaatgtttaatcgtttattaagccagaggtgaatagaaatgttaaaatatattagataagttaaaatttataaatagttatatagtttgtaatacttatatttttgtatatttttatactactagttggggtctaacgtacttcgcatgtcagctcgtagttcaaataatttttttttaaaaaaaaaaaatcgtagcatgattttatgtattggtctttattttattttttggtattttctagaagtaaataatagcttaatcatagtaaattaagagtctagttattggaaatttatgcagagactaactatgttagacaccactcaaagtgttttatcactattgatacaattaaatatcaaattcaatatgtaaattatataataatttttttttcgttaaattgatttaatataataattgttataaaatattcctaacatgaattattacatagaaaatataaattgatattttatttacaaaaatacatcgataaggtaaagacaacatttataccttttatgtgattt

SEQ ID NO: 116602 - DNA, 3399 bp, Cannabis sativa
  modified_base (3313)..(3316): a, c, t, g, unknown or other
tcttgctattcaacattactctagctatttttgttagagtacgattcttatttctttctaccacttctttttgtttaggagttttatgagcagatgatgcatgagaaataccattagatttacaaaactcatcatatacagtattttcaaattcttttccatgatcactcctaatgtgaaaaatcttaccaatgttacaacatttttcaactcttaatttcaaacacaaagatttgaaagcttcaaaagtatcagatttttctctcaaaaaatctatccataaaaatcgagaaaaatcatcaacacacacaaaaatatacctcttaccattcaagctttcaacatggattggaccaatcaagtctatgtggaggagttcgagaactctggaagtattcacattagaaacactcttttgagaaattttcagtggcttacaaagatgacatggtccacattttctcaaagattccttactcaatttaggcaatccttaaacaatttctacattagataatcttctcagatttttcaaatgaatatgatcatgtttttcatgctataaatcagtagtattatcaatggcagtatgacaagtagcataagtagtgagagtaaaacaattgtcactagatctaagcccttgcaagaaaatttcatcaagaatattatatacataacaatgattactatcaaagctaacagtataaccctgatcacaaattttactaatgctaagaagattagcttttagtccatcaaccaacatgacattcttcagtttaggaagcccttcaaaattaagaattcctatccctatgacttttctaactagaccgttactgaatataacctttctatatttcattggtcgaatagtgtcaagataatctttttcacctgtcatgtgtctagaacaaccactatcaaagtaccacatgttagaagcaatagttttaaaacatgaagagcctaccaagcagttattcttgacaacccaatttttgtttttgaaaaacatgtttatttctaaagtaattagatttaaacatgttttacacacttaggtcgaatgtgaccttttatcaactaaaaattgcgaataggaatgaatcgtcttttattccctttgaaattgtcaaacttatcgtactgcttcttttttgtattagctgagtgttttgcggaaataacataaccctgtaaggtaaagacagtaccttcagaacaaaaaatatcagatttgacaaatttgcactactacaaaaagggctttttgcttcggtttttaagtggcatatagagattttgctttagttggtgtaagcaacgctataaccgtagacgcaaatagtgatattttttgcttcgattatgagccgatgctaattggtttttttgcttcggttatgaaccgaagcaaataaagcatatgaaaattaaaaaaaaataatgaaaattgatctaaacgtgaatcttagtgcatgattcttagcatttcaattggattgacaaaactgatccattgaaagataattaaaaataagtaaacacttccaaaactgatgataaatataagttacaagaattttatcaatgaaactctacttgatgagtcactagaataacatttttaatgctgacagcagcaatgacacattcctgcatatttttaccaaattagaaagtgtataatcagaaacaaattgcatattttcatgcatgagaaaattgatcaaatttctgctctcttacaaaggttccatccattctactctctttcctacctaccaaacataacgtaaatcccaagaactccaatgtaacacaatatccctagccaatactgccatcttttgatacgaaaagatggcacatatctctggtcaaaggctctgttttcagtatccacgaccaccgtttgctccttgacgcctccggtatccccgtcatctccctccgccaaaaggtttcaaatgtacaaggtttcgatttatgttcaccaccaaatggtatttcaatttcctttcatgtgttaataataaaaggaatgccctcttctaaataggatatacttaaatttcactatgtatactctgcaccatattatacatatatatatttatattgagttcctgtatatatttaaaatatatgtgcttatttttattattattaacttttctgattattttagtctaagttctatctcactcttagaattctcgtattagcatggttaaaatattgagacataaaaataacagtgttgtggtggaatacaatggttgtgtcggtgtggtgattgcggtaaagaatttatcaaagcaaaggggtcctggtggcggtaaatcagtggcaaagggaattgcaagaatgactggagatcaaatagtcaatggttcactttaagatgaattcgttggagtgtcgttcatagcggaagccgccggaggcgatgaacatgatggggcattcatcaaggtgttgccgcattaaaccgacgcgtgatttgcatttttttttttctttttttcaaaggtttgctatttttatggtcaataattatgtatattaagtacatgttttttcgttaattgcagttttatattaattttgatttgtccgttattatgtattgtcggtttaatgatatgtctgaaaatttaattttggttgttttattcctttcctttttctgattctaggtgtcttgggtcttaattttaatttacaatattgtaattgatcgattagggtaagtaaattttattttaagtcttaactatttacacagtgactttttcttcttaattctattttttatgaatttattatttttactagaactatataaatttatttctttttctttaatttatttgataattattttatttttatttttctatccttaaagacttaattctcttatatttgtcagcaaattaattttatttattataattttactttttagcattctacgttagcagatctttttctatttcaatgtttgtatctctggattgtgtttagcttttttcagtaatcaaattgatttatcttaaagtcagtatggccaacatagctagttttctttatacggccaatgtggctagttttgattttgtaaagccgatatggctagttttggttttgtaaggctagtatggctagtttttggttttgtaaggccagtatggctagtttaaattttgtaaggtcaatatgactagttttagttttgtaaggctaacatgactagttttggtttgtaaagttattatatggctagttttaattttgtaannnnagtttggtctaataataacacatcaaatttttatataagaatactactttcgaaaaatgctttaaaataaaatcaaaataaat

SEQ ID NO: 116603 - DNA, 4550 bp, Cannabis sativa
  modified_base (38)..(69): a, c, t, g, unknown or other
atgtgtttaattaatttcgttttagaagttcatatttnnnnnnnnnnnnnnnnnnnnnnnnnnnnnnnntaatcctgataaaataattccaacattcagctccatgttatacaacttagttgctgtaaataattggagccaatagctagaaataagagctctatcgagatgaacatccaaccaagaattcattccttgacttttttcccaagtaaattgatttccaattaactcttaatcaattaaaccacaatcaaaaattgtattttgaaatccttcaatcaaccaattaggataggaaagtcctcctttcttatcatcatgagacaaaacattgttcaaataacccattacacaccatggaaggctagaagcttacaaaagaaactgaagctgatcctaagtagaagaacgagcattatgatttggttgaccatataggcctttgagccaccaaataccctgctccaaagaaacaacctccacatccacatagctattagcataccaaagtaaattaacattacctccattctaccataataaggaaacacctctcactacgaccataagcatccaccgtaaaaagaccatcaaatcccaaagcgacacacagtctttcaaccacatccttacgactaagagtttcacaaaagaaaataaaattggatttcttttggattacaaaatccttaaggatttggacagctcatgggttcttaagcccacgaaaattctaactcacgatactcataatgtccggtgagcctgaaaattaggacctacctcgagcccattttttgagagcccattaccagtggtcatcattacaacttcagcttccatgtcaaaaggcccaccatccacattctctacttcattgggcctacgccttttagaatctgcaaaaatcccatgaggcacatgcttatcactatgttgtatcataatcatattatctccatctacatgattctccataatagtagactttctaattaaagatccataattttatcattttaaattccacccgagtcgccaggaagaccactaggcaaatttgaatgcacattaaacctagaatcttctatacatattaacttctattttccacaatcatcgtcaccatcacgcttcatcggccggcaaccagaaccaccatcttcagtcattggtctgttactgaaaaaacgaccatcagattctaagcatgtccgcacgtattgtgaactaagcaaaaaaattctttcgttgaggttgagcatgcatccactcaccgtaaggcttaataatatcctcctctggggtatcaaataacttatggtaaaagttttctgtatggccaatgataccacaaatatagcaaaaagtaggggcaaactcatatttaaagttagcctagaaccaatccccacccattttcttcatcctcattcgtctcttcagtggaacatcaatattcacagtcacatgtactcgtaaataatcacgccaaagcccattacggttttttggatccacctccacaaacatacaaatgatcttagatgcttccttaacaacgcgctctgtcataaaaccagaggatagaccatgcacttgtacccatatatctaatttattcaatttcacagacttgggatcaccatctttggcattgttgttattccaagtcatgcgaggacccttaaaattaataacctagacataaaatttagccatgaaatctctaaagtgatcagaaggtcctatcatgttgttactactacttttatcttcccaagttaaaaaattattaaagttgcccataataatccaaggaagaagggcacgtgaatgagaaattttatgaagaattttccaagtgctagcacaattcgaaggagtatgggctccatcaaaaccagtaaaataaaaatcagaaaaattgacaccagagacatagcaataaacataattaatagagtaataaaaatgaatacatcaacatccatagtcgaaaaaaataaaaggccgccttctaagccaacacgagggacatcaaaaccattagcaaaacctagtctattcctaagtctatcaacaaaccccttacttaatcaagactccatgacaaagagcaaagaaggcttgtacatcttaaccagcagggagaggtttaagaatgctcgatcacttccaagacctcgagtattccaactaaggacaatcatgtctgtaggcaggcctattcatcaataagacctgcctcttcactagaagccacatccactactttgtgttgtggttggcttcttgtccttttcatcaactctctctgatcatttcccattgtagctagttgtccaacaccactggtctgctggttcttccttgtcacagtcttgtttgtgggccttcaaatctttcaacagaaaaagtaaggggattgggggctcctacaataacaaagttaggaatggaataagaagctgggttagaattaaaaaccaataggggcacattgatgggactagcagttagggaagtggagcttcttgagctaggggaagaggtatgcctcaaggatgcaaagcatttaatagaacctccagaagcaactgacaccaaggtagtaaaaaaggggtcaaggtgtgtttggttttgttagtttggtgggggtgttggttggaggttgttggggtaaattttagggttgatattggttttaggggtctcttggcttgagatgaacatgccagctgagtctgtatgatccctaccctgaagctagagagaaatcctgctggttatgtggcccttgggacgcattgtgggcggtaatgtctgtaacgtgttggtttggcatttgcatgaattggtttggttagggaatttcttggagccttggctgattgtagtaagggggtaatccaaatggtctttggttaggcctgaggattggtctaagcacattctcatatgggagcagtgcgggtgtggggacttatcaatatctctcatataatcggtacaccctgtgtaagtgtggctaagacatgcacagtagtagcaatggtctgggaaatcttcatacttcaactccatccatgttgcagagatcattccaggaaagagaataggaacacacctcgcgagaggcttggtgacatcgaacataacacaaatctgtaagtaagaaccccaagttttgagggggggtggttgatgtatctctaacaagactctaacaatttggccaacgagtcttgccaaagatatggatcttcgagagaaagggatgttatgtatctagacccataatgggatcttacaaataactttaggaacaagagtggagtcagagtctggtatttctaataggactgggaatttgtcaaaaatctagggttggtttatgatagctcttcacctatcaccttcaaagtggaaggcaatgaggtacaggctggagtttggtgatctttctttgacacaaatagggaaccttcccttctaatacttttctaagaatttattcaatgcattgtgtttaaagccttttatggtgtaaagactggccattaggtggaataagggcagggctagtggaagtccttcatggatatcagtagagtcaacaagagaatgcacagtattctttgtgtcagttagcttcaaggcgttagaaaaagaacgggctaagtctttcatgattggcaaaacaatatcagaaaagaaaggaaagtttgagcaaataaggtaaaaaaaacacaacctgggatttagcccttaaatagactaagataaaagaactaggtatactcgatcgagtggctgagaaaatcgatcatatagcatttaattgccttttcaggtgggggattatccaaatcaactcacagaccaggttggtagacacagtaattaatctaagaacaagcttaggatttgaaaagacccaaaaaattaaatacacagggagattatcatgagatttacttggagagaagatcaaacctacaaaactttcattaatgttgatccacgcttgccttaaatttctttgatttcgaataggatctgacctcaacgatttgaagggaggtcgttgggtgtccatcgccataaatgcggcgccaccatgacattgcgaagggtggagaaggtgtgttgggaaacataaaggttggagatggtcatgatgaccactgctattagaggaagatgaagaggatattgacgaggtaagcatgctcttagagaaaacgaaggtgtctcgaaagttctgatcctaacaaattgtacaatgtgaaataaaaattttatttttttttatatatttttaattattttctcccataatatgaaatttatatgcatttgatataaataatatattatatttttaaattatatttttagcatttttttttaaaaaaaaaattgtagtttatatgtaatttgttagtaataaaaatataaatataaatacaaaatatttttttaaaacaaaataaaaaataagaaatttaaatattatttattttaaatattttttccttcaa

SEQ ID NO: 116604 - DNA, 2758 bp, Cannabis sativa
atatatatatatatattagttcacattttatgaaatgagttaatattaaatgtgtatattttaattatttacctaaagaaaataattcaaatatatatttattattatttgttggcttgaattaatttatattctttaataaatttatttgtccaaaggtaatacattcttaattgatatgtatttttttctttattgttaacttcatgaaggtagataatgtgtgtgttatattctcacgcaaatggagtttataatgatcagttgactctacaatattttttaattgtattgttgcatatagcttgatcaagtttcaattttttttttttttgagtttttggtctcctttctgtgaacaataacaacgcttccatccaaattttgaatgcgtctaactttagggcatggagataagatgtggaatttactttatgcataatgattttggatttatgcttgcgagaagaaaaccatactgatcatactcataccagtactgctgcccagaatctcttcatacacaatagaaaagtcaaattgtcttagtcttattgctatgaaaagatctattcttgaacatttattgagtggtattctagacatactgatgccaaagagtttttaaaggcaatcaaaaaactatatgatactggtaaaaatactgaagttaaatatcttatggataaaatgataaccatgaagtatgatgaatcaaatggagtaagatattttattctaaaaattatgaatgtttagtccaaattgaaaggtcataatattcctctctatgactctcacattatttatcgtgttcttcatgcacttcctacctcttttagccttaccaagaaagtcgacaacacttataatggaacatggagcattagtgagctaatttctcagtgtgtagctgaggaaagcaagctaaaaaaagagaagaataaatcttctcactatgtttctcaactcaagcccaacaaaagaaaagacaaattaaagagtaaaaatgattatgcttccaaacagaaaagtaatggaaaggaacataagaataaatagaagaataataatgataagttaaaatatactaatgttaagtgtttcttctgtgaaaaattgtggcatcgagaaacaaactgtcacaaatttaagacttgattagaaaagaagcaatcacaatcaggggctcagagatctcacaaagcctggtgagagaaagttaaagtgtaaagtgggaaataatgttggagtcgacattatttatgttggtacattaatttttgaattatagtttagtgttaagattattttgaacaatattttttatgttcctacttttaagaggaatttagttttgcttctgctttttgttaaacaaagttattcttttctttttggcaataataatgttgacattatgcttgactcccgaataattagaaattatttttattctgatggtctttacaagttgtcactagccccttagattcctcttttaatgtattgaatattgtgggcaagagatcaaatattaaggacacagccttattgttatggcacaaaagattggatcatatttccaaagaaagagttgatcgattacatcaagctaaaattcttcctcctcttggtgattctagttgggatacttgtgttgattggactcatgagaaattgactaaaataagaagattgtcaatcatagtcaatattttttagaaactatctacgctgacattaatggactttattccactatgttgtgcagaaataaatattttatgactttcattgacgatttttctcattatggcttcacctacttaatttaagaaaaatcttatgctcttgattaactcgaaatctttcaaaatgacgtcaagaaataattatgaagagtcattaagattattcattcggattgtggagaataatatgatggtcgttatacagaatttagataacatatggggcattttgtcgagtatttataagaaagtaggatagtagctctatacatcatgcttggttcacttgagaaaaattgcattgcttaaagaaaaaatcaaactctaatagacatggttagaagcatgatgagtagattaaatataccacatttcttatggagtgaaacactcatgattgctactgatatcttaaattgtgttccaagtaaatctattccccaaactccttttgagttgtggagtgggaaaaaggctagtttgaattttcttcttgtatgggtttgtccagataaagtaaagatttataatcctaatttgaaaaatttagactcaagaacacttttctactatttcattaactttccaatgcactcaaaaaggctattgctattactgtcctactcatggtatgcaaattgttgaatctcagactgctaaatctctaaaattttatgttgttgaaaatattccttcaatatttcttgaaatgggggagtcatctaaaggaatttttattcttatgtctttttcaagagatgaaaataatagtagtcttattcctattccaattgataatgctccgattgttggtgaatatattattcctgatatcaaagatgatgaggggcttactattaaagaagttcctgttgttgatgagggtcctgttatcaaagaaattccaattgtaaaaggtgtctttcaaaatgatgatcaataaatagaagctattccaaaaatacctcctctaaggagatctcagagacaaaagaagtcaacaa

SEQ ID NO: 116605 - DNA, 3237 bp, Cannabis sativa
acgtttgttacaataataataatccaatttacccaagaaaacaatattggaggattgaatgatggatagagcaaagacaatgcttgtggctattgaattctacatcccccagactcttttgaatgccgaacgttgccataggcagaaagctcgagaagatccatgtcgcggcctgtaatttgttcaaaccaattaaagagtctgcagttgaccaatctgctggattaatccattcaagatttcaagtgagttttggaatacctgagacacgacaataagagcttttctgaataagttcagctctggatagctcagttcgatttccttttgaccggttaactgttgcctgcaatgcatcaaagtattctcttgaaagtgttagtttcatcatcagacagtagaagcagaacaaaaattttgctgtttttatgatcttattagctgtcacgataacaaatgaaattgttgagtaaaaaagatcccgcaacatcccaagataccaataggccccacggttctgcattgtcccttatttacaactgtttgtaaacagtgaaggctgaaaaggttgtaagtatgaaaactaggttggatgaggtatctactagaacgtgatcaaacatcataatataaagtaagataacctagtatgtagtttaatatattaggatgaaaaaccatgatcccacttttcaaaagaccaaatgggcaaatctataataagcagacaacaacagaaggacagaaagcacaagatagacttcaagaaataatgacatagaaagaaaaagaaatgcatatggcttaaacagttagccaaagctggttgaatgagagaaggaaaaaaagaaaaggaaaaaaagaaaaggaaaaaaaaactagatctacagaattatagatgtacaaaagtgcacctgattaaaatgcatacatccattgcacgttacaagcgtattggaatgaaaaaagaagagttgcatacctgtaaaacctgacaattttctagtgtgctttgtccaccctgaaatacaaaagatacacaattcaagccttagcattctctaccaatataatgtttagtttcaggatttagtgagcactattaatacagttctaagagttatgtatatacatctcgagtaaatccacaccccacaaagtgaagactaatcagacgcagcatagttttcaggcatctcaaacataaagtgattcttccacaaaaatgatttcataattctataccaagtcaaccttgcagatttcttatggtgaggagtttccagggttaaaagctcaaactggcagcaattttatctaacttttagtctcacctgcaaatgattttttgtagtaacacttcagattacttccttcttttcctatatttttcaagctaactaattacatggaatactgtattaattttctcaaccaaagatagaaaacatccaaaaagacccttatttgctgctgagggagataaaaaaatcaagaaaaccaaattgtcatttcattaagacaataataataattgccatttcattaactcattagcttatagcaatagccctcctcatatggagaatgtcgaattgaagtaatgatatccacacattaattaaaaccacagggaaatggagttaaatttcaaattcaagtaccttagagtaaggcaaaatgtgatcatagtcatgacacagacaacctgggcagcccacaagcttccgaaagacaatgttgccaagggaatctcggcgccacctacctggatctcgtcctttgatcttctcggccttctcccagcattgctgcttgacactgtatggaaaacttcgaggattggaattggaactggagctggtgggttcttcagaaatcgagagaccttcaaagagagtgctgtcatcaattactagctcccggttgtgaagagagactgggggactgagcctggaagagcgcggcccaggagacctagattcatatccagaagagactgtagttcggtccttgatgggtgatgaaggtcggcttcttctctttacttcctttctcggtttcatcgtactatctttctctgcactaagaatcagcgttttcattaaataactaaaacctcaggaataccaatatatacatatatatatatatatattagagaatcaacatacaaacaaagaataagacttagaatgactttgttcactgaattaaccgttgcagagctgagaaatttcaccggaagctgcaacgggaatcgaattgacagtgagaaccacgacgggagtcgctgagatagcgatgagggcgagaatgtggcggcgacggtagttgatgggtagacctgaagcgtggaggtcagcggagatcgttaatggaggagaagaagaagaagaagaagaagaagggggtttgagagtggaggagcttacgagcataatggcgggcttttgttgttgcttctggttttggtaacgtacattatcatcttctttcggatttctcattttctctaatgcttttccccataaacgacgctaatgatgttgtcgtctcgtataacaacatccttttttaaaatatgggttaaaaaaaagaataattagtatttttttttttttttggaaagaaaaacgtatttcattaatagaataaattagacctcatggttattacataatatgttgaatgggatggtagatagcggaatatcaccaaataactcataggtaaacgcccacttagctatagtatgggaaacaaaattacaagtcctgtcaatatgagagaaaatacaactcgaaaataaagaagagtgactattacaaaaagagacatagtttctaataactcaattagatcagagcattgataactactctcgagtagctctccacgatgacaaacttggcttcaaaatccaaagcagcagaattagccaaagagcacgccgccgcttccccacaaagagcatcacaaaagtcaagacaagccgtatgaactcgaactacctcgcctaagtggttcctggcaacaactgctattcacattaagggtgaaaatcggtcggttatggtcggtttttacaattttataaccgaccgtttaaaaattataaccgtataaaaccgaccgtacggtttttggcagttttcggttcagcagtttttggcggttttgacggttttttggttaaactatttttttatctcaaaaaccgaaaccgaccgccat

SEQ ID NO: 116606 - DNA, 2724 bp, Cannabis sativa
ctaagtcacaatatacgcaaaattaataaatgatacgctaaatcacttttcggggactttaaactcaaaactaaaggttttcctatcgatatctagaaatggcctgccatttttcagggtgttgcacctggaaaaaaggtaggttatttatgtaaaaacggcctgctgtttttcactgtagaaaaacaaagaccctcatttcaaatcaaaacaaccccaaacttcaccataagctctgaaacacctatatacataataaaccatttcaaagtggcaaaaccttatcaaacacaaacatgctaaaatcaccattgttgaaccaagtttgagttcgtgaactaaaagttggtaacttcaaaaaaaaacacctaattacaacccaatagccttaaacaaattcaacataacctcaaaaaataatagcaaaacaaatcaaacctaactagcaactaaaacacaaaaaatgcatgcttgaacctaactttcaccattaaaagcaatggaaaaaggattctaggttttacattggatcctagctcccaaaatctctttaattctagctaaaagttactgagattggtgaagaaaaattctggttcgttgaggaatttcctagggctgaaagaagaaagagaaagggaagaggctgatagtcttcatttatcattttttccaacttaattttctaagtaaatccataataaaacttaatcaaattaactcaatattggccaggttccaacataagaagaggccatctaacctcaaagtcaaaaatgacaaaactacccccacttgtatgcttaaatgataaaatgactttaggggcaaaatggtcaaaaccataaccccgactaatcccgacattctaaatgtctaactagttttccccgctattctagaaacactaaatcatacaaaagttattttataggccatacgtcgcattccactattattgggcataaaaatacgaaaaagcataaaattcatacataacataaatggcatacttagaattaaaatacatctctgaaatcataaaaataataattaaaagtccactagtgaatttagacctttattatctgctaagtctcaaaaataactaagcggtcgttgcaattatccccctattaaaatgatttcgtcctcgaaatctaacctgaacaactccagatattgagccctcatatcaaactcgaactcccaggtagcttcctccaccttgctatttctccagagtaccttaaccaaagctattttcttattccgaatgactttgtcctttctatcaaggatttgtaccggatgctcttcatatgttaaatttggctggagttctagggtttcataaatgaggacatgtgtcgggtccgaaacgtatttccttaacataaaaacatgtaatacattatgaattgctgatagtgctggaggcaaagctaaactggaagctactagtgcaacctttacgagaatctcataaggccctgtaaatctagggcataacttgcccttcttctcaaaacgcttcatccccttcatcgtagatacttgtagggatacatgatctcctacttaaaactctacatttctgcatttcaaatctgcatagctcttctacctactctgaaaggcaagcattctggccttgatcttctctattgcctcattggtctgttgtactgattccaaacccaagtatttcctttttccagtttcatcccaatgaactcgagatctacactttctgccatacaacatctcataaggagccatccctatagttctctaatagctgttgttgtatgaaaactctatcagtggtaaatacttactctaggagtcttcaaaatctaacacacaggctcgcagcatatcttctagtatttgaattttcctttcaaattgaccatctgtctagggatgaaaagttgtactaaacttcattttggtacccatggctcgatgaagactttcccaaaacttagaagtgaacttcgaatctctatccgatataatgaactttggagccttaggtaaccatactatttccttcacatataaatctgcatattgatccactgtaaaggtttttttcactggtagaaaatgagtggacttggtaaatcgatccacaataacccatatggaatcaaacattcccgtggttctaggtaatccaaccatgaaatctatggtgacatcctcccattttcactcaagaatagtcaaaggctgtaacaaccctacaggcctttggtgttcagccttaatctgttggtaaatcaagcaccgagatacatattccaccacgtccttcttcatcacgtaccaccaatagaaaggttttaagtcatgttacattttggtagtgcaaggatgtaatgaatagggagtggtatgtgcttcttcgagaatttcttttcttaattccaaactactcagaattcagactcaagttttataaagtaacaattcactatctgatattgtaaagtgcttagcttgactagctataacctcttctcgaactttcactaactcaaaatctgttaactgggcaactctaattctgtctagaaaatctaattacaacgtcagattattaagtttgcccgcgacaaactcaatacctgatctgaccatgtcatttgccaattgaggtgaaatcgtaactaagttagatacttgcccgggacccttcctacttagggcatc

SEQ ID NO: 116607 - DNA, 1107 bp, Cannabis sativa
tccttaaaaattccacgccggacacgcttgtatgtcggaagcctctccagcgccgcccatcggagcgcctcctcgtcttccccattctctctgaacgatgacgatcgtgcgaaaacgttctccgccgagttccacatctcggaaaaaagccaccactatatccccgcaaaagcttcaaaattctctgccaagagataatgcagagagaaaaaggtagggcttcaatgcgagcctggcatttttggtaagatagttctgtgaggctcagctactactatttctagtccataatttgccaacaaggtggttgagctttgcattaatggcgtactctctctctctctctttcactctctttctctctctaagagtgtctgtgtttactttctctctctaaaatctgtatcatatcatgccatgcgttaaagttagtattacaaattgcacattcagaaatgagagaaggagctcatttaatggccgcgggaaaggaaacgagatagacacagtaaaacacactcgcgcgcgtgtttaagattgtacggtgccaatgggtatctaccacgtaaaatcctgccatgtttttattattttttaagctaattaatatttgtgtttattgagtaattaattgttattttttttttcaaattattaataagattattaaatttaaagaattttttcaaattttattccattctactaatgtaataattaccaatgtactaaattatgtccctctattttgttatgtatcaaattatattttttgaattttaatatgtacaaattgtgtctcctaaatttttatccgtggcaaatgtctattagtaaaattatatagaagttcttgaatttaacaatctcaataattcgaaaaaaaaaattcaacaatataaatagtctaaaaaaacacgatttgatacatgtcaaaaattcatgagcaaaaattctaataaacttcttttttttcacctctaatttctggtacgacagttatttttaaggggattttttcaatattatacctaaaattgattttatttataaaaatacctttaagaaaattattggcacaaataccgttatgccacgtcagcatac

SEQ ID NO: 116608 - DNA, 623 bp, Cannabis sativa
atatatatatacataataatgaaagaaaagcatgagaaatgtctcataatgatgtctctctttatcttttttattcttctcttggacatttcaaagattaaaaagatacttccatttccaggattgcatgctttgatgtcgtgtttctcttttcttctttctctttcttcaaaaacaaattacaaaggatcaaaggcagggaaagttattatcatcttcggtaaaaatcatgcatgtaaattataataacgtaaactttttagctgaggtgaagtatagtaccctatatatgtaaacgtaaatatataacagaatgacttcatatatatgatcatgacactgtccaaaacttgatcctattacattatatttatttcttcaaacattttattttaggtttacaaccattgaatcttcaaacacgaatggagatcatttgaacttttattgattaaatctttaccttatatctttacttgctttattatttcagctcttgaactacatatatttgatatgaactacgaatttatgcgctatatattccatttcgaatcacttaattgatcaaaaaaatgttaaatattaagaccagaaagggtgataaattatatagtgactaa

SEQ ID NO: 116609 - DNA, 1347 bp, Cannabis sativa
caccattcgcatcacgcgaaatggcacagcaagaaccaccaccaacaaccgctaaaagaaaaaattgttataactagtgccacctcatcatgtgtttagtgccacattaggctacactatagtaattatataacacaatcatcataattattataattcttccaatatgataacatacaattaatttttgggggttttgttaattagtagtagaagtcaaccaaataaaatactctacaaaaagttttctttttctttttctttctatatatttaatattatgtccaggtgctttgatatataagttttatagaattaattaatggatgccaaaccttaagccgaactccatgcttttagtatagaatttttgattaattaacaccccttatgccttatataaacacaacttattatcacaacattcacaatctcataaaacatatttcattatttctcaaataatagaagtattgagaaagagaaaaaaaaaacacatataattattagttatataattcttaattagagatggctagatcaagaaagtcacacgtaattgtggctctcttggttatgttaatctcaattgaattgtccatcaacgttatgggccaagcccaaggtggtaacaataacggaaatgacaacggcaacaataacactggagacaacaacggtaacggtaacggcaacaacaatactggagataataacggaaacaacaatggcaacaacaacactggaagcaacaacggtaatggtaacggaaacaacaatggtggaagtaacaatggaaatggaaacggaaataataatggtggaagtaataatggaaatggaaacggtaacaacaacggtggaagtaataacggtaatggtaacggtaacggtaatggaaatgggaactcaaacccaagtccaaactcaaacccaaacccaagcccaagcccaacgaagcccactaaacccactaaacccacgaagcccactaagccaccggggtacgctgcttcaacacattatgatgttttaacaccgttaggttcaggaagagaacgtgcattgtgccaagctagaggaaaatgtaacaagaaaacgctgacgtgtccagaggaatgcccaacaagaaagcctaagaataacaagaagaagaaaggttgttatgttgattgcagcagcaaatgtgaagttacttgcaagtgtaagccttccttaatctcttaatttatttaattaattaatttccacttagttaatcatcttgccaattaatatttaacatcaactattttatgttttatacgcatcaaaatttcttatcgtaggtatcaaatataattttat

SEQ ID NO: 116610 - DNA, 1685 bp, Cannabis sativa
agaacttcgaaaagctcagtctcggcctctttgtacttagtaatggcatcagggtcacggccattcttccatcgtctcacctcctttttccagtatttaatacgagaagcaaagtttctgttagaccatctttgttatttgaactaaattttgttaaaaatatgagttaataatatatttgatcaaaattttattataataattagaataaataaaaaaattatttagagagattagtaacccaataattaagcttttaatcttttttaagcaactgacaatctgacatgaaataacatgtctcagaatggattgttcattaaaatagacatctactatacgtctcaaattggagaagaccacatataaacataatattggacctatttcataaaattaattaaataaaaaaaaactactaaattacaaatttgatgggcaaataagagtcgaagaagttatcaaatctcagtcctgtctacaactctagttttgaaccttgtcttctaatactcttataaaatttaactcattttcttatatacttcttaaattataaacttaacttaattaaaaatatttagtatatacttacataccttttataccacattatattttactatataattgtcattaataaagatataattaattctgttatttattattatttattagcttataaattaattataattatatatcaaactaattaatagaagatcaatttagtcattctatttctaataactctataactaaacctaaaaaaaaacttatttaatggaacattaaagacttgtgaagtgatgatcttaataattttttatgatatagaaaattatatgcaattatttaaactaatatctttgaacccctatccaattttactgttggaggtgttatgattattgagatatttttaaaatttatatgaaaaattagttatctataatatttattataataatgtaaaaagaatttatgttatgaaaagcttgtaaagacatttctatttataaataagagtgtatttttatatatggttaaatgttttattattaatgttatatattatatatataatttaaataaaaatatcagaattttttttattcatatatgaggttgtaacttgtattacgattacttagccacggataaaacagtcagcaatatattaacattttagaatctttaatcaacaatcactagtgtggttcactgattcaaattactaatgtaacatggcatctaagtaaagttgttgtatataatatagattatatattacatgaaccgatatgtaattaagttgtctttatcaaatatatcgtttattataaaaacctgatttatatcataatgataatcaatggtagatcgacctgaattttgagtattcatgaacatgttaatagtttttttgattcactcgttaaaatttcttagaaaagataagtcttagtacttctggtttttaataatctaataatatgggtggctggaaacatgatctacaattttggaattttaactttcctaactgatcgaatgttagtttcctttaagtgttaattctaaaactgatcaaagttgtgtacacacttagatattggatctaaaatattatattttcactagtgacactactacaaaattgggctttagaggcggttttt
